United States Patent Application Publication US 2007/0214517 A1 - sequence listing, part 63

SEQ ID NO: 82916 - protein, 463 aa, Arabidopsis thaliana
  peptide (1)..(463): Ceres Seq. ID no. 12667880
  misc_feature (8)..(266): Pfam Name: Protein kinase domain Pfam Description: Protein kinase domain
  misc_feature (1)..(463): Homolog of NCBI NO: 15239716 NR Description: calcium-dependent protein kinase - like; protein
  misc_feature (1)..(463): Homolog of NCBI NO: 15239888 NR Description: calcium-dependent protein kinase; protein id:
  misc_feature (1)..(463): Homolog of NCBI NO: 18175903 NR Description: putative calcium-dependent protein kinase
  misc_feature (1)..(460): Homolog of NCBI NO: 34909116 NR Description: putative calcium-dependent protein kinase [Oryza
  misc_feature (1)..(461): Homolog of NCBI NO: 5162877 NR Description: calcium-dependent protein kinase [Marchantia
  misc_feature (1)..(461): Homolog of NCBI NO: 5162878 NR Description: calcium-dependent protein kinase [Marchantia
  misc_feature (1)..(460): Homolog of NCBI NO: 7428008 NR Description: calcium-dependent protein kinase (EC 2.7.1.-),
  misc_feature (1)..(458): Homolog of NCBI NO: 15236560 NR Description: calcium-dependent protein kinase (CDPK6); protein At4g23650.1, supported by cDNA: 37278., supported by cDNA: supported by cDNA: gi_15450436, supported by cDNA: gi_17386099,
  misc_feature (1)..(458): Homolog of NCBI NO: 15450437 NR Description: AT4g23650/F9D16_120 [Arabidopsis thaliana]
  misc_feature (1)..(455): Homolog of NCBI NO: 19171502 NR Description: calcium-dependent protein kinase [Lycopersicon
MEDVKSSYTLGKELGRGQFGVTHLCTQKATGLQFACKTIAKRKLVNKEDIEDVRREVQIMHHLTGQPNIVELKGAYEDKHSVHLVMELCAGGELFDRIIAKGHYSERAAASLLRTIVQIIHTCHSMGVIHRDLKPENFLLLSKDENSPLKATDFGLSVFYKPGEVFKDIVGSAYYIAPEVLRRKYGPEADIWSIGVMLYILLCGVPPFWAESENGIFNAILSGQVDFSSDPWPVISPQAKDLVRKMLNSDPKQRLTAAQVLNHPWIKEDGEAPDVPLDNAVMSRLKQFKAMNNFKKVALRVIAGCLSEEEIMGLKEMFKGMDTDNSGTITLEELRQGLAKQGTRLSEYEVQQLMEAADADGNGTIDYGEFIAATMHINRLDREEHLYSAFQHFDKDNSGYITTEELEQALREFGMNDGRDIKEIISEVDGDNDGRINYEEFVAMMRKGNPDPNPKKRRELSFK

SEQ ID NO: 82917 - protein, 404 aa, Arabidopsis thaliana
  peptide (1)..(404): Ceres Seq. ID no. 12667881
  misc_feature (1)..(207): Pfam Name: Protein kinase domain Pfam Description: Protein kinase domain
  misc_feature (1)..(404): Homolog of NCBI NO: 15239716 NR Description: calcium-dependent protein kinase - like; protein
  misc_feature (1)..(404): Homolog of NCBI NO: 15239888 NR Description: calcium-dependent protein kinase; protein id:
  misc_feature (1)..(404): Homolog of NCBI NO: 18175903 NR Description: putative calcium-dependent protein kinase
  misc_feature (1)..(401): Homolog of NCBI NO: 34909116 NR Description: putative calcium-dependent protein kinase [Oryza
  misc_feature (1)..(402): Homolog of NCBI NO: 5162877 NR Description: calcium-dependent protein kinase [Marchantia
  misc_feature (1)..(402): Homolog of NCBI NO: 5162878 NR Description: calcium-dependent protein kinase [Marchantia
  misc_feature (1)..(401): Homolog of NCBI NO: 7428008 NR Description: calcium-dependent protein kinase (EC 2.7.1.-),
  misc_feature (1)..(399): Homolog of NCBI NO: 15236560 NR Description: calcium-dependent protein kinase (CDPK6); protein At4g23650.1, supported by cDNA: 37278., supported by cDNA: supported by cDNA: gi_15450436, supported by cDNA: gi_17386099,
  misc_feature (1)..(399): Homolog of NCBI NO: 15450437 NR Description: AT4g23650/F9D16_120 [Arabidopsis thaliana]
  misc_feature (1)..(396): Homolog of NCBI NO: 19171502 NR Description: calcium-dependent protein kinase [Lycopersicon
MHHLTGQPNIVELKGAYEDKHSVHLVMELCAGGELFDRIIAKGHYSERAAASLLRTIVQIIHTCHSMGVIHRDLKPENFLLLSKDENSPLKATDFGLSVFYKPGEVFKDIVGSAYYIAPEVLRRKYGPEADIWSIGVMLYILLCGVPPFWAESENGIFNAILSGQVDFSSDPWPVISPQAKDLVRKMLNSDPKQRLTAAQVLNHPWIKEDGEAPDVPLDNAVMSRLKQFKAMNNFKKVALRVIAGCLSEEEIMGLKEMFKGMDTDNSGTITLEELRQGLAKQGTRLSEYEVQQLMEAADADGNGTIDYGEFIAATMHINRLDREEHLYSAFQHFDKDNSGYITTEELEQALREFGMNDGRDIKEIISEVDGDNDGRINYEEFVAMMRKGNPDPNPKKRRELSFK

SEQ ID NO: 82918 - DNA, 1894 bp, Arabidopsis thaliana
  misc_feature (1)..(1894): Ceres Seq. ID no. 12667886
  misc_feature: MA Experiment ID: 20000180 Result: Down-regulated in Transcription
  misc_feature: MA Experiment 20000180 PARAMETER Experiment Name: At_Germinating_Seeds_P Parameter: Age (hr) Value: 24 vs. 0
  misc_feature: MA Experiment 20000180 PARAMETER Experiment Name: At_Germinating_Seeds_P Parameter: Tissue Value: Germinating Seeds
  misc_feature: MA Experiment ID: 20000184 Result: Down-regulated in Transcription
  misc_feature: MA Experiment 20000184 PARAMETER Experiment Name: At_Shoots__P Parameter: Age (day) Value: 7
  misc_feature: MA Experiment 20000184 PARAMETER Experiment Name: At_Shoots__P Parameter: Tissue Value: Shoots vs. Whole Plant
  misc_feature: MA Experiment ID: 20000794 Result: Up-regulated in Transcription
  misc_feature: MA Experiment 20000794 PARAMETER Experiment Name: At_Petals_P Parameter: Age (day) Value: 23-25 days
  misc_feature: MA Experiment 20000794 PARAMETER Experiment Name: At_Petals_P Parameter: Plant Line Value: WS
  misc_feature: MA Experiment 20000794 PARAMETER Experiment Name: At_Petals_P Parameter: Tissue Value: Petals vs. Whole plant
ttgcgtttgtgagtgatttagttgtttgatgaaatctcaggacttctcagattcgaattataaatgggaaattgttgtgcgagcccgggttcggagactgggagtaagaaggggaaaccaaagatcaaaagtaacccgttttatagtgaagcatacactacgaatggatctggaactgggttcaagctctctgttttgaaagatccaacaggacatgatatatctcttatgtatgatctggggcgtgaggttggtcgcggagagtttggtattacttacttgtgcactgatatcaaaacgggcgagaagtatgcgtgcaagtctatatcaaagaagaagcttagaacagctgtggatatagaggatgttaggagggaagttgagataatgaaacatatgcctagacacccaaatatcgtgtcgctgaaggatgcctttgaggatgatgatgcagtgcatatagttatggagttgtgtgaaggaggtgagctgtttgatcggattgttgctagaggtcattatactgagcgagctgctgctgcagtgatgaagactattcttgaagttgttcagatatgccataagcatggagtgatgcatcgggatctaaagcctgagaactttctctttgcaaataaaaaagagacatcagcccttaaagccatagattttggattatcagtcttcttcaagcctggtgagggattcaacgagattgttggaagtccttattacatggcaccagaggtacttaggcgaaattacggacctgaggttgatatctggagtgctggagttatcctttatatcctgctctgtggtgtcccaccattttgggccgagactgagcaaggggtggctcaggcgatcattaggtcagttatcgactttaagagggatccatggccgagagtttctgagactgccaaagaccttgtgaggaagatgctcgaacctgaccccaaaaaacggctttctgctgcacaagtactcgaacattcttggatacaaaatgcgaagaaggctccaaatgtttcactcggcgagacggtgaaagcaagactcaaacagttttctgttatgaacaagctcaagaaaagagcgctacgggtgatagccgaacacttatcagtggaggaagtagctggcatcaaggaagcatttgagatgatggacagtaaaaagacgggaaagataaacctcgaggagcttaaatttggacttcataaactcggacagcagcagatacctgatactgatctacagattctgatggaagctgctgatgttgatggggatgggactttaaattatggggagtttgtggctgtctctgtgcatcttaagaaaatggcgaacgacgaacacttgcataaggcttttagcttttttgaccagaatcagagcgattacatagagattgaggagctgcgtgaggctttaaatgatgaggtggatactaacagtgaagaagttgttgcagctattatgcaagatgttgacacagacaaggacggacgaataagctatgaagagtttgcggcgatgatgaaagctggaacagattggaggaaagcgtcgaggcagtattcccgggaaagattcaacagtttgagcctcaagttaatgagagaaggttcattgcaattagaaggcgaaaattaagaaaggttctttgtttctgtatctcttaaagaagtaaaaagaaaaaggaaaaaacagtattctttgaaaattgtttatctttttttttcctcaataattgtagatcagggtttcaaatgttttagttacttgaatagccagccatgtacgatatgaagcagatgttcttaaattttctgactctttattttcatgttgtctggatccttaatactatttgttggcaaac

SEQ ID NO: 82919 - protein, 533 aa, Arabidopsis thaliana
  peptide (1)..(533): Ceres Seq. ID no. 12667887
  misc_feature (57)..(315): Pfam Name: Protein kinase domain Pfam Description: Protein kinase domain
  misc_feature (1)..(533): Homolog of NCBI NO: 15239742 NR Description: calcium-dependent protein kinase; protein id: supported by cDNA: gi_836941 [Arabidopsis thaliana]
  misc_feature (1)..(532): Homolog of NCBI NO: 18416872 NR Description: calcium-dependent protein kinase-like protein; id: At5g12480.1, supported by cDNA: gi_13605616, supported by gi_1399276 [Arabidopsis thaliana] >gi|1399277|gb|AAB03247.1|
  misc_feature (1)..(533): Homolog of NCBI NO: 2665890 NR Description: calcium-dependent protein kinase [Fragaria x
  misc_feature (1)..(532): Homolog of NCBI NO: 30694663 NR Description: calcium-dependent protein kinase, putative (CDPK)
  misc_feature (1)..(528): Homolog of NCBI NO: 11259874 NR Description: calcium-dependent protein kinase - Arabidopsis
  misc_feature (15)..(529): Homolog of NCBI NO: 34899838 NR Description: putative calcium-dependent protein kinase [Oryza
  misc_feature (1)..(532): Homolog of NCBI NO: 15227452 NR Description: putative calcium-dependent protein kinase; id: At2g41860.1 [Arabidopsis thaliana] >gi|25287680|pir||A84847
  misc_feature (12)..(527): Homolog of NCBI NO: 14484895 NR Description: calcium-dependent protein kinase [Funaria
  misc_feature (1)..(532): Homolog of NCBI NO: 22331739 NR Description: calcium-dependent protein kinase; protein id:
  misc_feature (1)..(532): Homolog of NCBI NO: 17064926 NR Description: calcium-dependent protein kinase [Arabidopsis
MGNCCASPGSETGSKKGKPKIKSNPFYSEAYTTNGSGTGFKLSVLKDPTGHDISLMYDLGREVGRGEFGITYLCTDIKTGEKYACKSISKKKLRTAVDIEDVRREVEIMKHMPRHPNIVSLKDAFEDDDAVHIVMELCEGGELFDRIVARGHYTERAAAAVMKTILEVVQICHKHGVMHRDLKPENFLFANKKETSALKAIDFGLSVFFKPGEGFNEIVGSPYYMAPEVLRRNYGPEVDIWSAGVILYILLCGVPPFWAETEQGVAQAIIRSVIDFKRDPWPRVSETAKDLVRKMLEPDPKKRLSAAQVLEHSWIQNAKKAPNVSLGETVKARLKQFSVMNKLKKRALRVIAEHLSVEEVAGIKEAFEMMDSKKTGKINLEELKFGLHKLGQQQIPDTDLQILMEAADVDGDGTLNYGEFVAVSVHLKKMANDEHLHKAFSFFDQNQSDYIEIEELREALNDEVDTNSEEVVAAIMQDVDTDKDGRISYEEFAAMMKAGTDWRKASRQYSRERFNSLSLKLMREGSLQLEGEN

SEQ ID NO: 82920 - protein, 478 aa, Arabidopsis thaliana
  peptide (1)..(478): Ceres Seq. ID no. 12667888
  misc_feature (2)..(260): Pfam Name: Protein kinase domain Pfam Description: Protein kinase domain
  misc_feature (1)..(478): Homolog of NCBI NO: 15239742 NR Description: calcium-dependent protein kinase; protein id: supported by cDNA: gi_836941 [Arabidopsis thaliana]
  misc_feature (1)..(477): Homolog of NCBI NO: 18416872 NR Description: calcium-dependent protein kinase-like protein; id: At5g12480.1, supported by cDNA: gi_13605616, supported by gi_1399276 [Arabidopsis thaliana] >gi|1399277|gb|AAB03247.1|
  misc_feature (1)..(478): Homolog of NCBI NO: 2665890 NR Description: calcium-dependent protein kinase [Fragaria x
  misc_feature (1)..(477): Homolog of NCBI NO: 30694663 NR Description: calcium-dependent protein kinase, putative (CDPK)
  misc_feature (1)..(473): Homolog of NCBI NO: 11259874 NR Description: calcium-dependent protein kinase - Arabidopsis
  misc_feature (1)..(474): Homolog of NCBI NO: 34899838 NR Description: putative calcium-dependent protein kinase [Oryza
  misc_feature (1)..(477): Homolog of NCBI NO: 15227452 NR Description: putative calcium-dependent protein kinase; id: At2g41860.1 [Arabidopsis thaliana] >gi|25287680|pir||A84847
  misc_feature (1)..(472): Homolog of NCBI NO: 14484895 NR Description: calcium-dependent protein kinase [Funaria
  misc_feature (1)..(477): Homolog of NCBI NO: 22331739 NR Description: calcium-dependent protein kinase; protein id:
  misc_feature (1)..(477): Homolog of NCBI NO: 17064926 NR Description: calcium-dependent protein kinase [Arabidopsis
MYDLGREVGRGEFGITYLCTDIKTGEKYACKSISKKKLRTAVDIEDVRREVEIMKHMPRHPNIVSLKDAFEDDDAVHIVMELCEGGELFDRIVARGHYTERAAAAVMKTILEVVQICHKHGVMHRDLKPENFLFANKKETSALKAIDFGLSVFFKPGEGFNEIVGSPYYMAPEVLRRNYGPEVDIWSAGVILYILLCGVPPFWAETEQGVAQAIIRSVIDFKRDPWPRVSETAKDLVRKMLEPDPKKRLSAAQVLEHSWIQNAKKAPNVSLGETVKARLKQFSVMNKLKKRALRVIAEHLSVEEVAGIKEAFEMMDSKKTGKINLEELKFGLHKLGQQQIPDTDLQILMEAADVDGDGTLNYGEFVAVSVHLKKMANDEHLHKAFSFFDQNQSDYIEIEELREALNDEVDTNSEEVVAAIMQDVDTDKDGRISYEEFAAMMKAGTDWRKASRQYSRERFNSLSLKLMREGSLQLEGEN

SEQ ID NO: 82921 - protein, 425 aa, Arabidopsis thaliana
  peptide (1)..(425): Ceres Seq. ID no. 12667889
  misc_feature (1)..(207): Pfam Name: Protein kinase domain Pfam Description: Protein kinase domain
  misc_feature (1)..(425): Homolog of NCBI NO: 15239742 NR Description: calcium-dependent protein kinase; protein id: supported by cDNA: gi_836941 [Arabidopsis thaliana]
  misc_feature (1)..(424): Homolog of NCBI NO: 18416872 NR Description: calcium-dependent protein kinase-like protein; id: At5g12480.1, supported by cDNA: gi_13605616, supported by gi_1399276 [Arabidopsis thaliana] >gi|1399277|gb|AAB03247.1|
  misc_feature (1)..(425): Homolog of NCBI NO: 2665890 NR Description: calcium-dependent protein kinase [Fragaria x
  misc_feature (1)..(424): Homolog of NCBI NO: 30694663 NR Description: calcium-dependent protein kinase, putative (CDPK)
  misc_feature (1)..(420): Homolog of NCBI NO: 11259874 NR Description: calcium-dependent protein kinase - Arabidopsis
  misc_feature (1)..(421): Homolog of NCBI NO: 34899838 NR Description: putative calcium-dependent protein kinase [Oryza
  misc_feature (1)..(424): Homolog of NCBI NO: 15227452 NR Description: putative calcium-dependent protein kinase; id: At2g41860.1 [Arabidopsis thaliana] >gi|25287680|pir||A84847
  misc_feature (1)..(419): Homolog of NCBI NO: 14484895 NR Description: calcium-dependent protein kinase [Funaria
  misc_feature (1)..(424): Homolog of NCBI NO: 22331739 NR Description: calcium-dependent protein kinase; protein id:
  misc_feature (1)..(424): Homolog of NCBI NO: 17064926 NR Description: calcium-dependent protein kinase [Arabidopsis
MKHMPRHPNIVSLKDAFEDDDAVHIVMELCEGGELFDRIVARGHYTERAAAAVMKTILEVVQICHKHGVMHRDLKPENFLFANKKETSALKAIDFGLSVFFKPGEGFNEIVGSPYYMAPEVLRRNYGPEVDIWSAGVILYILLCGVPPFWAETEQGVAQAIIRSVIDFKRDPWPRVSETAKDLVRKMLEPDPKKRLSAAQVLEHSWIQNAKKAPNVSLGETVKARLKQFSVMNKLKKRALRVIAEHLSVEEVAGIKEAFEMMDSKKTGKINLEELKFGLHKLGQQQIPDTDLQILMEAADVDGDGTLNYGEFVAVSVHLKKMANDEHLHKAFSFFDQNQSDYIEIEELREALNDEVDTNSEEVVAAIMQDVDTDKDGRISYEEFAAMMKAGTDWRKASRQYSRERFNSLSLKLMREGSLQLEGEN

SEQ ID NO: 82922 - DNA, 1830 bp, Arabidopsis thaliana
  misc_feature (1)..(1830): Ceres Seq. ID no. 12667901
  misc_feature: MA Experiment ID: 20000184 Result: Up-regulated in Transcription
  misc_feature: MA Experiment 20000184 PARAMETER Experiment Name: At_Shoots__P Parameter: Age (day) Value: 7
  misc_feature: MA Experiment 20000184 PARAMETER Experiment Name: At_Shoots__P Parameter: Tissue Value: Shoots vs. Whole Plant
  misc_feature: MA Experiment ID: 20001458 Result: Up-regulated in Transcription
  misc_feature: MA Experiment 20001458 PARAMETER Experiment Name: At_50mM_NH4NO3_L-to-H_P Parameter: Age (day) Value: Undefined
  misc_feature: MA Experiment 20001458 PARAMETER Experiment Name: At_50mM_NH4NO3_L-to-H_P Parameter: Organism Value: Undefined
  misc_feature: MA Experiment 20001458 PARAMETER Experiment Name: At_50mM_NH4NO3_L-to-H_P Parameter: Plant Line Value: Undefined
  misc_feature: MA Experiment 20001458 PARAMETER Experiment Name: At_50mM_NH4NO3_L-to-H_P Parameter: Timepoint (hr) Value: 2
  misc_feature: MA Experiment 20001458 PARAMETER Experiment Name: At_50mM_NH4NO3_L-to-H_P Parameter: Tissue Value: Siliques
  misc_feature: MA Experiment 20001458 PARAMETER Experiment Name: At_50mM_NH4NO3_L-to-H_P Parameter: Treatment Value: 50mM NH4NO3 vs. 100mM Manitol
atggccgctatggatccgagaaataatggcaacgttgctccgctaaatgagcgggagagagcagaaaatttggaagttcgtgaagtggtagaggttcaagatgatcaaagtgtggtgtctcttatgtccaacgattctgaccttcagaaaaagatgatgaagaaagaggagaagaagaatggtggctggacaaacgcaatcattttgctagtaaatcaagggttagctacattggccttctttggtgtgggagtaaacttggtgttgttcctaacacgtgttatgggacaaggtaatgcagaagctgcgaacaatgtaagcaagtggacaggaacagtttacatgttctctctcgttggggcatttcttagtgactcctattggggtcgttacttgacttgcacgatattccaagtcatcttcgttatcggtgttggcctcctctcttttgtctcttggtttttcttgattaaacctcgaggatgtggcgatggggaccttgaatgcaaccctccctcttccctcggagttgctatcttttatctatctgtatatttggtagcttttggatacggaggccaccagccaacgctggctactttcggtgcagaccagcttgatgatgataaaaactccaaagctgcgtttttcagctacttctactttgctctcaacgtgggagctctcttttcaaacacaatccttgtttattttgaggataaagggttgtggactgaaggtttcttggtgtcactaggctccgctattgtcgcattggtggcttttttggccccaacaagacaatatcgttatgtcaagccgtgtggtaacccgttgcctcgtgtggcgcaagtatttgtggccactgctcgtaagtggagtgttgttcgaccaggagatccgcatgagttgtacgaacttgaaggtcctgaatccgccattaaaggaagtcgaaagatatttcatagtaccaaatttctcttcttggatagagcagcagtgattacagagaatgataggaatgggacaaggagcaatgcatggaggttgtgcagtgtaactcaagtagaggaggcaaaatgtgtgatgaagttgcttccaatatggctatgcactataatctactcagtgatcttcacacaaatggcgtcattgtttgtggagcaaggtgatgtgatgaatgcatacgtagggaaattccacatccccgcagcgagcatgtcggtcttcgacatattcagcgtctttgtatcaacaggaatctaccgccacatcatatttccatacgtgagacccacggaacttatgcggatggggatagggctgatcatagggataatggcaatggtagctgcaggattaacagagatccaacggctgaaacgagtagtcccggggcaaaaggagagtgagctcaccattttatggcaaattccacagtacgtgcttgtgggagcaagtgaggtgttcatgtacgttggacagttagagttcttcaacggacaagcaccagacgggttaaagaacttaggaagctcgttgtgtatggcttcgatggctttaggtaactacgtgagcagtttgatggttaatattgttatggccataaccaaaagaggtgagaatagccccgggtggataccggaaaatctcaacgaaggtcatatggatcggttttattttctgattgccgcgttagcagctatcgattttgtggtttatttgatatttgcaaagtggtaccaacccataagtcatgatgaagatagtatcaagggcggttctggtggtagtctgaagaagaccgtttctgagttggaacaagtttga

SEQ ID NO: 82923 - protein, 609 aa, Arabidopsis thaliana
  peptide (1)..(609): Ceres Seq. ID no. 12667902
  misc_feature (131)..(519): Pfam Name: POT family Pfam Description: POT family
  misc_feature (41)..(581): Homolog of NCBI NO: 34895718 NR Description: putative peptide transport protein [Oryza sativa
  misc_feature (57)..(595): Homolog of NCBI NO: 7489404 NR Description: peptide transport protein - barley
  misc_feature (17)..(582): Homolog of NCBI NO: 15076661 NR Description: peptide transporter [Oryza sativa (japonica >gi|15076663|dbj|BAB62327.1| peptide transporter [Oryza sativa
  misc_feature (47)..(582): Homolog of NCBI NO: 15232435 NR Description: peptide transport - like protein; protein id: supported by cDNA: 117581., supported by cDNA: gi_13430485,
  misc_feature (35)..(465): Homolog of NCBI NO: 30685529 NR Description: peptide transporter - like protein [Arabidopsis
  misc_feature (35)..(465): Homolog of NCBI NO: 26451333 NR Description: putative peptide transporter [Arabidopsis
  misc_feature (60)..(428): Homolog of NCBI NO: 25513683 NR Description: F5D14.23 protein - Arabidopsis thaliana Contains similarity to a peptide transport protein homolog gi|7488004 from Arabidopsis thaliana BAC F17L22 gb|AL035527. It
  misc_feature (60)..(428): Homolog of NCBI NO: 30692706 NR Description: peptide transporter PTR2-B -related [Arabidopsis
  misc_feature (32)..(582): Homolog of NCBI NO: 4102839 NR Description: LeOPT1 [Lycopersicon esculentum]
  misc_feature (32)..(582): Homolog of NCBI NO: 31088360 NR Description: peptide transporter 1 [Vicia faba]
MAAMDPRNNGNVAPLNERERAENLEVREVVEVQDDQSVVSLMSNDSDLQKKMMKKEEKKNGGWTNAIILLVNQGLATLAFFGVGVNLVLFLTRVMGQGNAEAANNVSKWTGTVYMFSLVGAFLSDSYWGRYLTCTIFQVIFVIGVGLLSFVSWFFLIKPRGCGDGDLECNPPSSLGVAIFYLSVYLVAFGYGGHQPTLATFGADQLDDDKNSKAAFFSYFYFALNVGALFSNTILVYFEDKGLWTEGFLVSLGSAIVALVAFLAPTRQYRYVKPCGNPLPRVAQVFVATARKWSVVRPGDPHELYELEGPESAIKGSRKIFHSTKFLFLDRAAVITENDRNGTRSNAWRLCSVTQVEEAKCVMKLLPIWLCTIIYSVIFTQMASLFVEQGDVMNAYVGKFHIPAASMSVFDIFSVFVSTGIYRHIIFPYVRPTELMRMGIGLIIGIMAMVAAGLTEIQRLKRVVPGQKESELTILWQIPQYVLVGASEVFMYVGQLEFFNGQAPDGLKNLGSSLCMASMALGNYVSSLMVNIVMAITKRGENSPGWIPENLNEGHMDRFYFLIAALAAIDFVVYLIFAKWYQPISHDEDSIKGGSGGSLKKTVSELEQV

SEQ ID NO: 82924 - protein, 606 aa, Arabidopsis thaliana
  peptide (1)..(606): Ceres Seq. ID no. 12667903
  misc_feature (128)..(516): Pfam Name: POT family Pfam Description: POT family
  misc_feature (38)..(578): Homolog of NCBI NO: 34895718 NR Description: putative peptide transport protein [Oryza sativa
  misc_feature (54)..(592): Homolog of NCBI NO: 7489404 NR Description: peptide transport protein - barley
  misc_feature (14)..(579): Homolog of NCBI NO: 15076661 NR Description: peptide transporter [Oryza sativa (japonica >gi|15076663|dbj|BAB62327.1| peptide transporter [Oryza sativa
  misc_feature (44)..(579): Homolog of NCBI NO: 15232435 NR Description: peptide transport - like protein; protein id: supported by cDNA: 117581., supported by cDNA: gi_13430485,
  misc_feature (32)..(462): Homolog of NCBI NO: 30685529 NR Description: peptide transporter - like protein [Arabidopsis
  misc_feature (32)..(462): Homolog of NCBI NO: 26451333 NR Description: putative peptide transporter [Arabidopsis
  misc_feature (57)..(425): Homolog of NCBI NO: 25513683 NR Description: F5D14.23 protein - Arabidopsis thaliana Contains similarity to a peptide transport protein homolog gi|7488004 from Arabidopsis thaliana BAC F17L22 gb|AL035527. It
  misc_feature (57)..(425): Homolog of NCBI NO: 30692706 NR Description: peptide transporter PTR2-B -related [Arabidopsis
  misc_feature (29)..(579): Homolog of NCBI NO: 4102839 NR Description: LeOPT1 [Lycopersicon esculentum]
  misc_feature (29)..(579): Homolog of NCBI NO: 31088360 NR Description: peptide transporter 1 [Vicia faba]
MDPRNNGNVAPLNERERAENLEVREVVEVQDDQSVVSLMSNDSDLQKKMMKKEEKKNGGWTNAIILLVNQGLATLAFFGVGVNLVLFLTRVMGQGNAEAANNVSKWTGTVYMFSLVGAFLSDSYWGRYLTCTIFQVIFVIGVGLLSFVSWFFLIKPRGCGDGDLECNPPSSLGVAIFYLSVYLVAFGYGGHQPTLATFGADQLDDDKNSKAAFFSYFYFALNVGALFSNTILVYFEDKGLWTEGFLVSLGSAIVALVAFLAPTRQYRYVKPCGNPLPRVAQVFVATARKWSVVRPGDPHELYELEGPESAIKGSRKIFHSTKFLFLDRAAVITENDRNGTRSNAWRLCSVTQVEEAKCVMKLLPIWLCTIIYSVIFTQMASLFVEQGDVMNAYVGKFHIPAASMSVFDIFSVFVSTGIYRHIIFPYVRPTELMRMGIGLIIGIMAMVAAGLTEIQRLKRVVPGQKESELTILWQIPQYVLVGASEVFMYVGQLEFFNGQAPDGLKNLGSSLCMASMALGNYVSSLMVNIVMAITKRGENSPGWIPENLNEGHMDRFYFLIAALAAIDFVVYLIFAKWYQPISHDEDSIKGGSGGSLKKTVSELEQV

SEQ ID NO: 82925 - protein, 568 aa, Arabidopsis thaliana
  peptide (1)..(568): Ceres Seq. ID no. 12667904
  misc_feature (90)..(478): Pfam Name: POT family Pfam Description: POT family
  misc_feature (1)..(540): Homolog of NCBI NO: 34895718 NR Description: putative peptide transport protein [Oryza sativa
  misc_feature (16)..(554): Homolog of NCBI NO: 7489404 NR Description: peptide transport protein - barley
  misc_feature (1)..(541): Homolog of NCBI NO: 15076661 NR Description: peptide transporter [Oryza sativa (japonica >gi|15076663|dbj|BAB62327.1| peptide transporter [Oryza sativa
  misc_feature (6)..(541): Homolog of NCBI NO: 15232435 NR Description: peptide transport - like protein; protein id: supported by cDNA: 117581., supported by cDNA: gi_13430485,
  misc_feature (1)..(424): Homolog of NCBI NO: 30685529 NR Description: peptide transporter - like protein [Arabidopsis
  misc_feature (1)..(424): Homolog of NCBI NO: 26451333 NR Description: putative peptide transporter [Arabidopsis
  misc_feature (19)..(387): Homolog of NCBI NO: 25513683 NR Description: F5D14.23 protein - Arabidopsis thaliana Contains similarity to a peptide transport protein homolog gi|7488004 from Arabidopsis thaliana BAC F17L22 gb|AL035527. It
  misc_feature (19)..(387): Homolog of NCBI NO: 30692706 NR Description: peptide transporter PTR2-B -related [Arabidopsis
  misc_feature (1)..(541): Homolog of NCBI NO: 4102839 NR Description: LeOPT1 [Lycopersicon esculentum]
  misc_feature (1)..(541): Homolog of NCBI NO: 31088360 NR Description: peptide transporter 1 [Vicia faba]
MSNDSDLQKKMMKKEEKKNGGWTNAIILLVNQGLATLAFFGVGVNLVLFLTRVMGQGNAEAANNVSKWTGTVYMFSLVGAFLSDSYWGRYLTCTIFQVIFVIGVGLLSFVSWFFLIKPRGCGDGDLECNPPSSLGVAIFYLSVYLVAFGYGGHQPTLATFGADQLDDDKNSKAAFFSYFYFALNVGALFSNTILVYFEDKGLWTEGFLVSLGSAIVALVAFLAPTRQYRYVKPCGNPLPRVAQVFVATARKWSVVRPGDPHELYELEGPESAIKGSRKIFHSTKFLFLDRAAVITENDRNGTRSNAWRLCSVTQVEEAKCVMKLLPIWLCTIIYSVIFTQMASLFVEQGDVMNAYVGKFHIPAASMSVFDIFSVFVSTGIYRHIIFPYVRPTELMRMGIGLIIGIMAMVAAGLTEIQRLKRVVPGQKESELTILWQIPQYVLVGASEVFMYVGQLEFFNGQAPDGLKNLGSSLCMASMALGNYVSSLMVNIVMAITKRGENSPGWIPENLNEGHMDRFYFLIAALAAIDFVVYLIFAKWYQPISHDEDSIKGGSGGSLKKTVSELEQV

SEQ ID NO: 82926 - DNA, 1527 bp, Arabidopsis thaliana
  misc_feature (1)..(1527): Ceres Seq. ID no. 12667912
atggaaaccccaaacatcatcagccacacaaatcttctatcgaagatagacctggaaaaacaaaaccctgcccccattttcccgacaatcactgagcttaaaagtgaggctaggtctctcttctccttagccttcccgacaatcctcgcggccctcatcctctacgctcgctccgccatctcgatgctcttcctcgggcatatcggtgaactagagctagctggtggctccctggccattgccttcgctaacatcactggctactccgttctagcaggtcttgcactcggcatggacccactctgttcgcaagcctttggagccggcagaccaaaactcctctctttaacgcttcaacgaaccgtacttttcttactcacaagttcggtagtaatcgtcgctctatggctcaacctggggaagatcatgatttatcttcatcaagatccaagtatctcatcgttggcccaaacatatatcctctgctctattcctgatctgctcaccaattcctttcttcaccctcttcgtatataccttcgagcacaaggtatcacaagccctttaactctcgcaacactcgctggcaccatcttccacatacccatgaactttttcctcgtttcttacctcggatggggtttcatgggcgtttcaatggccgcagccgcttcaaatcttcttgttgtcattttccttgtggcccatgtttggatcgcaggtctacaccagccaacgtggacccgccccagctcggaatgtttcaaagattggggaccagtcgtaaccctagccatacctagctgcatcggggtatgcctagagtggtggtggtacgagataatgaccgttctatgtggtttactcatagaccctagtactccagtggcatcaatgggcattcttatccaaacgacgtctttgctttacattttcccatcgtctctagggttagcagtctccacccgagttggtaacgaacttggctcaaaccgcccaaacaaggctaggttatcagccatagtggcggtttcctttgctggggtaatgggtctgacggcgtctgcgtttgcttggggcgtaagcgatgtctggggatggatcttcacaaacgacgttgctatcatcaaattaaccgcagccgcgttgccgattctcgggctttgcgagctcgggaactgcccgcaaacagtaggttgcggggttgttagaggcactgcacggccgtccatggcagcgaacataaacctaggagcgttttacctcgttggaacgcctgtagccgttgggctaacgttttgggccgcatatggattttgcggactttgggtaggtcttttagctgctcagatatgttgtgctgccatgatgctatatgtcgtggctactacggactgggagaaagaagcaattagagccagaaagctaacgtgtactgaaggcgttgatgtggtaataacaacaacgcaaaccaacggagacttatcggaaccattaatttacgttgtcactgtcgctactgactga

SEQ ID NO: 82927 - protein, 508 aa, Arabidopsis thaliana
  peptide (1)..(508): Ceres Seq. ID no. 12667913
  misc_feature (1)..(508): Homolog of NCBI NO: 15241158 NR Description: putative protein; protein id: At5g19700.1
  misc_feature (28)..(505): Homolog of NCBI NO: 15233459 NR Description: putative protein; protein id: At4g29140.1
  misc_feature (25)..(477): Homolog of NCBI NO: 38567909 NR Description: OSJNBa0088I22.5 [Oryza sativa (japonica
  misc_feature (20)..(476): Homolog of NCBI NO: 15235905 NR Description: putative protein; protein id: At4g23030.1
  misc_feature (27)..(477): Homolog of NCBI NO: 18406257 NR Description: expressed protein; protein id: At1g58340.1, by cDNA: gi_6520160 [Arabidopsis thaliana]
  misc_feature (36)..(476): Homolog of NCBI NO: 37536202 NR Description: putative membrane protein [Oryza sativa (japonica group)] >gi|27311284|gb|AAO00710.1| putative membrane protein
  misc_feature (259)..(480): Homolog of NCBI NO: 15217599 NR Description: hypothetical protein; protein id: At1g71870.1
  misc_feature (28)..(244): Homolog of NCBI NO: 15217599 NR Description: hypothetical protein; protein id: At1g71870.1
  misc_feature (35)..(477): Homolog of NCBI NO: 15242265 NR Description: integral membrane protein-like; protein id:
  misc_feature (35)..(477): Homolog of NCBI NO: 39104576 NR Description: putative integral membrane protein [Arabidopsis
METPNIISHTNLLSKIDLEKQNPAPIFPTITELKSEARSLFSLAFPTILAALILYARSAISMLFLGHIGELELAGGSLAIAFANITGYSVLAGLALGMDPLCSQAFGAGRPKLLSLTLQRTVLFLLTSSVVIVALWLNLGKIMIYLHQDPSISSLAQTYILCSIPDLLTNSFLHPLRIYLRAQGITSPLTLATLAGTIFHIPMNFFLVSYLGWGFMGVSMAAAASNLLVVIFLVAHVWIAGLHQPTWTRPSSECFKDWGPVVTLAIPSCIGVCLEWWWYEIMTVLCGLLIDPSTPVASMGILIQTTSLLYIFPSSLGLAVSTRVGNELGSNRPNKARLSAIVAVSFAGVMGLTASAFAWGVSDVWGWIFTNDVAIIKLTAAALPILGLCELGNCPQTVGCGVVRGTARPSMAANINLGAFYLVGTPVAVGLTFWAAYGFCGLWVGLLAAQICCAAMMLYVVATTDWEKEAIRARKLTCTEGVDVVITTTQTNGDLSEPLIYVVTVATD

SEQ ID NO: 82928 - protein, 447 aa, Arabidopsis thaliana
  peptide (1)..(447): Ceres Seq. ID no. 12667914
  misc_feature (1)..(447): Homolog of NCBI NO: 15241158 NR Description: putative protein; protein id: At5g19700.1
  misc_feature (1)..(444): Homolog of NCBI NO: 15233459 NR Description: putative protein; protein id: At4g29140.1
  misc_feature (1)..(416): Homolog of NCBI NO: 38567909 NR Description: OSJNBa0088I22.5 [Oryza sativa (japonica
  misc_feature (1)..(415): Homolog of NCBI NO: 15235905 NR Description: putative protein; protein id: At4g23030.1
  misc_feature (1)..(416): Homolog of NCBI NO: 18406257 NR Description: expressed protein; protein id: At1g58340.1, by cDNA: gi_6520160 [Arabidopsis thaliana]
  misc_feature (1)..(415): Homolog of NCBI NO: 37536202 NR Description: putative membrane protein [Oryza sativa (japonica group)] >gi|27311284|gb|AAO00710.1| putative membrane protein
  misc_feature (198)..(419): Homolog of NCBI NO: 15217599 NR Description: hypothetical protein; protein id: At1g71870.1
  misc_feature (1)..(183): Homolog of NCBI NO: 15217599 NR Description: hypothetical protein; protein id: At1g71870.1
  misc_feature (1)..(416): Homolog of NCBI NO: 15242265 NR Description: integral membrane protein-like; protein id:
  misc_feature (1)..(416): Homolog of NCBI NO: 39104576 NR Description: putative integral membrane protein [Arabidopsis
MLFLGHIGELELAGGSLAIAFANITGYSVLAGLALGMDPLCSQAFGAGRPKLLSLTLQRTVLFLLTSSVVIVALWLNLGKIMIYLHQDPSISSLAQTYILCSIPDLLTNSFLHPLRIYLRAQGITSPLTLATLAGTIFHIPMNFFLVSYLGWGFMGVSMAAAASNLLVVIFLVAHVWIAGLHQPTWTRPSSECFKDWGPVVTLAIPSCIGVCLEWWWYEIMTVLCGLLIDPSTPVASMGILIQTTSLLYIFPSSLGLAVSTRVGNELGSNRPNKARLSAIVAVSFAGVMGLTASAFAWGVSDVWGWIFTNDVAIIKLTAAALPILGLCELGNCPQTVGCGVVRGTARPSMAANINLGAFYLVGTPVAVGLTFWAAYGFCGLWVGLLAAQICCAAMMLYVVATTDWEKEAIRARKLTCTEGVDVVITTTQTNGDLSEPLIYVVTVATD

SEQ ID NO: 82929 - protein, 411 aa, Arabidopsis thaliana
  peptide (1)..(411): Ceres Seq. ID no. 12667915
  misc_feature (1)..(411): Homolog of NCBI NO: 15241158 NR Description: putative protein; protein id: At5g19700.1
  misc_feature (1)..(408): Homolog of NCBI NO: 15233459 NR Description: putative protein; protein id: At4g29140.1
  misc_feature (1)..(380): Homolog of NCBI NO: 38567909 NR Description: OSJNBa0088I22.5 [Oryza sativa (japonica
  misc_feature (1)..(379): Homolog of NCBI NO: 15235905 NR Description: putative protein; protein id: At4g23030.1
  misc_feature (1)..(380): Homolog of NCBI NO: 18406257 NR Description: expressed protein; protein id: At1g58340.1, by cDNA: gi_6520160 [Arabidopsis thaliana]
  misc_feature (1)..(379): Homolog of NCBI NO: 37536202 NR Description: putative membrane protein [Oryza sativa (japonica group)] >gi|27311284|gb|AAO00710.1| putative membrane protein
  misc_feature (162)..(383): Homolog of NCBI NO: 15217599 NR Description: hypothetical protein; protein id: At1g71870.1
  misc_feature (1)..(147): Homolog of NCBI NO: 15217599 NR Description: hypothetical protein; protein id: At1g71870.1
  misc_feature (1)..(380): Homolog of NCBI NO: 15242265 NR Description: integral membrane protein-like; protein id:
  misc_feature (1)..(380): Homolog of NCBI NO: 39104576 NR Description: putative integral membrane protein [Arabidopsis
MDPLCSQAFGAGRPKLLSLTLQRTVLFLLTSSVVIVALWLNLGKIMIYLHQDPSISSLAQTYILCSIPDLLTNSFLHPLRIYLRAQGITSPLTLATLAGTIFHIPMNFFLVSYLGWGFMGVSMAAAASNLLVVIFLVAHVWIAGLHQPTWTRPSSECFKDWGPVVTLAIPSCIGVCLEWWWYEIMTVLCGLLIDPSTPVASMGILIQTTSLLYIFPSSLGLAVSTRVGNELGSNRPNKARLSAIVAVSFAGVMGLTASAFAWGVSDVWGWIFTNDVAIIKLTAAALPILGLCELGNCPQTVGCGVVRGTARPSMAANINLGAFYLVGTPVAVGLTFWAAYGFCGLWVGLLAAQICCAAMMLYVVATTDWEKEAIRARKLTCTEGVDVVITTTQTNGDLSEPLIYVVTVATD

SEQ ID NO: 82930 - DNA, 1740 bp, Arabidopsis thaliana
  misc_feature (1)..(1740): Ceres Seq. ID no. 12667940
  misc_feature: MA Experiment ID: 20000314 Result: Down-regulated in Transcription
  misc_feature: MA Experiment 20000314 PARAMETER Experiment Name: At_14day_Shoots-Roots_Sub_P Parameter: Age (day) Value: 14
  misc_feature: MA Experiment 20000314 PARAMETER Experiment Name: At_14day_Shoots-Roots_Sub_P Parameter: Organism Value: A. thaliana
  misc_feature: MA Experiment 20000314 PARAMETER Experiment Name: At_14day_Shoots-Roots_Sub_P Parameter: Plant Line Value: WS
  misc_feature: MA Experiment 20000314 PARAMETER Experiment Name: At_14day_Shoots-Roots_Sub_P Parameter: Tissue Value: Roots vs. Whole Plant
  misc_feature: MA Experiment ID: 20000327 Result: Down-regulated in Transcription
  misc_feature: MA Experiment 20000327 PARAMETER Experiment Name: At_42deg_Heat_Sub_P Parameter: Age (day) Value: 14
  misc_feature: MA Experiment 20000327 PARAMETER Experiment Name: At_42deg_Heat_Sub_P Parameter: Organism Value: A. thaliana
  misc_feature: MA Experiment 20000327 PARAMETER Experiment Name: At_42deg_Heat_Sub_P Parameter: Plant Line Value: WS
  misc_feature: MA Experiment 20000327 PARAMETER Experiment Name: At_42deg_Heat_Sub_P Parameter: Temperature (deg C) Value: 42 vs. 22
  misc_feature: MA Experiment 20000327 PARAMETER Experiment Name: At_42deg_Heat_Sub_P Parameter: Timepoint (hr) Value: 1
  misc_feature: MA Experiment 20000327 PARAMETER Experiment Name: At_42deg_Heat_Sub_P Parameter: Tissue Value: Aerial
  misc_feature: MA Experiment ID: 20000348 Result: Down-regulated in Transcription
  misc_feature: MA Experiment 20000348 PARAMETER Experiment Name: At_100uM_ABA_Sub_P Parameter: Age (day) Value: 14
  misc_feature: MA Experiment 20000348 PARAMETER Experiment Name: At_100uM_ABA_Sub_P Parameter: Organism Value: A. thaliana
  misc_feature: MA Experiment 20000348 PARAMETER Experiment Name: At_100uM_ABA_Sub_P Parameter: Plant Line Value: WS
  misc_feature: MA Experiment 20000348 PARAMETER Experiment Name: At_100uM_ABA_Sub_P Parameter: Timepoint (hr) Value: 1
  misc_feature: MA Experiment 20000348 PARAMETER Experiment Name: At_100uM_ABA_Sub_P Parameter: Tissue Value: Aerial
  misc_feature: MA Experiment 20000348 PARAMETER Experiment Name: At_100uM_ABA_Sub_P Parameter: Treatment Value: 100uM ABA vs. No Treatment
  misc_feature: MA Experiment ID: 20000355 Result: Down-regulated in Transcription
  misc_feature: MA Experiment 20000355 PARAMETER Experiment Name: At_Siliques_Sub_P Parameter: Age (day) Value: 21
  misc_feature: MA Experiment 20000355 PARAMETER Experiment Name: At_Siliques_Sub_P Parameter: Organism Value: A. thaliana
  misc_feature: MA Experiment 20000355 PARAMETER Experiment Name: At_Siliques_Sub_P Parameter: Plant Line Value: WS
  misc_feature: MA Experiment 20000355 PARAMETER Experiment Name: At_Siliques_Sub_P Parameter: Tissue Value: Less Than 5mm Siliques vs. Whole Plant
  misc_feature: MA Experiment ID: 20000440 Result: Down-regulated in Transcription
  misc_feature: MA Experiment 20000440 PARAMETER Experiment Name: At_Closed-Flower__Sub_P Parameter: Tissue Value: Closed Flower vs. Whole Plant
  misc_feature: MA Experiment ID: 20001807 Result: Up-regulated in Transcription
  misc_feature: MA Experiment 20001807 PARAMETER Experiment Name: At_50mM_NH4NO3_L-to-H_Sub_P Parameter: Timepoint (hr) Value: 6
  misc_feature: MA Experiment 20001807 PARAMETER Experiment Name: At_50mM_NH4NO3_L-to-H_Sub_P Parameter: Tissue Value: Leaf
  misc_feature: MA Experiment 20001807 PARAMETER Experiment Name: At_50mM_NH4NO3_L-to-H_Sub_P Parameter: Treatment Value: 50mM NH4NO3 vs 100mM Mannitol
atggcgtcgactacacgagaaaagtttgtatctttcataaacaacagatggctcgtcttcgtggctgccatgtggatacagtcttgtgctggcatcggttatttgttcggaagcatttctccggttatcaaaagctccttaaactataatcagaaggagctttccagacttggagtcgccaaggatctcggtgatagtgtcggattcatcgccggtactctctctgagatcttgcctctttgggccgctcttcttgttggcgccgttcagaacctcatcggttacggatgggtttggcttatcgtcaccggtcgagccccgattcttcctctatgggctatgtgtgttctcatattcgttgggaacaatggcgagacctacttcaatactggagcattagtctctggtgttcaaaactttcccaagagcagaggtccagtggtgggtattctcaagggttttgctgggctaggtggtgcgatcatctctcagatatatacaatgatccactcatctaacccggcttctctcattctcatggtagctgttacgcctgcagttgtcgttgtttgcctcatgttcttcatcagacctgttggtggtcacaagcagatccgtcccactgatggagccagctttactttcatctacggtgtctgtcttctacttgctgcctatctcatgtccgttatgcttattcaagatctggtcgttgttagccacaacgtaatcactgtgttcaccattgtgttgtttgtcattcttgttgtcccaatcttggttccaatcatgacaagtttcttcacggagacaaacgagcctgatgacacaatagaagaacctcttgtcccaaaacgagaagaccaagaaccaggactgcaaacacctgatctaatcttgagtgaagtggaagatgagaagccaaaagatgtagatttgcttcctgcctcagagagacataagagaattgcgcatttgcaagcacagctaatgcaggcagctgcagaaggggcggttcgggtgaatagacggagagggccgcatagaggggaagatttcactctaacgcaggcactggtgaaagccgacttctggctcattttcttctccttgctgcttggttctggttcgggtttgacagtaattgacaatcttggtcagatgagtcagtctcttggttatgataacactcacgtgcttgtgtctatgattagcatttggaactttcttggacggatcggtggcggttatttctccgagctcgttgtcagggactacgcgtatccaagaccagtagcaatggctgtggctcagctaataatgtctgtgggacacatattctttgcgtacggatggcccggagcgatgtacattggcacgctgttgattggactcggatacggtgcacactgggctattgtcccagctactgcctctgagctctttggtctaaagaagtttggagcgttatacaatttcctgacattggcaaacccggctggatccctcgtgttctcgggtatgatcgcgagtagcatatacgaccgggaagcagaaaggcaagctcacggctccgtgtttgatccagatgacgcccttagatgcaatggttctatctgtttcttcttgacatcactcataatgtctggattctgcatcatcgcttgcatgttgagtatgattcttgtgcgtcgtaccaagtctgtctacactcatctctatggcaagacccgcacctaa

SEQ ID NO: 82931 - protein, 579 aa, Arabidopsis thaliana
  peptide (1)..(579): Ceres Seq. ID no. 12667941
  misc_feature (354)..(527): Pfam Name: Sugar (and other) transporter Pfam Description: Sugar (and other) transporter
  misc_feature (1)..(579): Homolog of NCBI NO: 15241312 NR Description: nodulin-like protein; protein id: At5g14120.1
  misc_feature (1)..(578): Homolog of NCBI NO: 18395988 NR Description: unknown protein; protein id: At3g01930.1 thaliana] >gi|6091732|gb|AAF03444.1|AC010797_20 unknown protein thaliana] >gi|6513938|gb|AAF14842.1|AC011664_24 unknown protein
  misc_feature (1)..(554): Homolog of NCBI NO: 11358583 NR Description: nodulin-like protein [imported] - Arabidopsis
  misc_feature (114)..(578): Homolog of NCBI NO: 30678455 NR Description: expressed protein [Arabidopsis thaliana]
  misc_feature (1)..(424): Homolog of NCBI NO: 1532169 NR Description: similar to a E. coli hypothetical protein F402
  misc_feature (1)..(272): Homolog of NCBI NO: 18423161 NR Description: nodulin-like protein; protein id: At5g50520.1,
  misc_feature (343)..(574): Homolog of NCBI NO: 18423161 NR Description: nodulin-like protein; protein id: At5g50520.1,
  misc_feature (16)..(309): Homolog of NCBI NO: 15227274 NR Description: nodulin-like protein; protein id: At2g16660.1, by cDNA: gi_17979282, supported by cDNA: gi_20465249 [Arabidopsis
  misc_feature (323)..(579): Homolog of NCBI NO: 15227274 NR Description: nodulin-like protein; protein id: At2g16660.1, by cDNA: gi_17979282, supported by cDNA: gi_20465249 [Arabidopsis
  misc_feature (17)..(574): Homolog of NCBI NO: 38345150 NR Description: OSJNBa0014K14.4 [Oryza sativa (japonica
MASTTREKFVSFINNRWLVFVAAMWIQSCAGIGYLFGSISPVIKSSLNYNQKELSRLGVAKDLGDSVGFIAGTLSEILPLWAALLVGAVQNLIGYGWVWLIVTGRAPILPLWAMCVLIFVGNNGETYFNTGALVSGVQNFPKSRGPVVGILKGFAGLGGAIISQIYTMIHSSNPASLILMVAVTPAVVVVCLMFFIRPVGGHKQIRPTDGASFTFIYGVCLLLAAYLMSVMLIQDLVVVSHNVITVFTIVLFVILVVPILVPIMTSFFTETNEPDDTIEEPLVPKREDQEPGLQTPDLILSEVEDEKPKDVDLLPASERHKRIAHLQAQLMQAAAEGAVRVNRRRGPHRGEDFTLTQALVKADFWLIFFSLLLGSGSGLTVIDNLGQMSQSLGYDNTHVLVSMISIWNFLGRIGGGYFSELVVRDYAYPRPVAMAVAQLIMSVGHIFFAYGWPGAMYIGTLLIGLGYGAHWAIVPATASELFGLKKFGALYNFLTLANPAGSLVFSGMIASSIYDREAERQAHGSVFDPDDALRCNGSICFFLTSLIMSGFCIIACMLSMILVRRTKSVYTHLYGKTRT

SEQ ID NO: 82932 - protein, 556 aa, Arabidopsis thaliana
  peptide (1)..(556): Ceres Seq. ID no. 12667942
  misc_feature (331)..(504): Pfam Name: Sugar (and other) transporter Pfam Description: Sugar (and other) transporter
  misc_feature (1)..(556): Homolog of NCBI NO: 15241312 NR Description: nodulin-like protein; protein id: At5g14120.1
  misc_feature (1)..(555): Homolog of NCBI NO: 18395988 NR Description: unknown protein; protein id: At3g01930.1 thaliana] >gi|6091732|gb|AAF03444.1|AC010797_20 unknown protein thaliana] >gi|6513938|gb|AAF14842.1|AC011664_24 unknown protein
  misc_feature (1)..(531): Homolog of NCBI NO: 11358583 NR Description: nodulin-like protein [imported] - Arabidopsis
  misc_feature (91)..(555): Homolog of NCBI NO: 30678455 NR Description: expressed protein [Arabidopsis thaliana]
  misc_feature (1)..(401): Homolog of NCBI NO: 1532169 NR Description: similar to a E. coli hypothetical protein F402
  misc_feature (1)..(249): Homolog of NCBI NO: 18423161 NR Description: nodulin-like protein; protein id: At5g50520.1,
  misc_feature (320)..(551): Homolog of NCBI NO: 18423161 NR Description: nodulin-like protein; protein id: At5g50520.1,
  misc_feature (1)..(286): Homolog of NCBI NO: 15227274 NR Description: nodulin-like protein; protein id: At2g16660.1, by cDNA: gi_17979282, supported by cDNA: gi_20465249 [Arabidopsis
  misc_feature (300)..(556): Homolog of NCBI NO: 15227274 NR Description: nodulin-like protein; protein id: At2g16660.1, by cDNA: gi_17979282, supported by cDNA: gi_20465249 [Arabidopsis
  misc_feature (1)..(551): Homolog of NCBI NO: 38345150 NR Description: OSJNBa0014K14.4 [Oryza sativa (japonica
MWIQSCAGIGYLFGSISPVIKSSLNYNQKELSRLGVAKDLGDSVGFIAGTLSEILPLWAALLVGAVQNLIGYGWVWLIVTGRAPILPLWAMCVLIFVGNNGETYFNTGALVSGVQNFPKSRGPVVGILKGFAGLGGAIISQIYTMIHSSNPASLILMVAVTPAVVVVCLMFFIRPVGGHKQIRPTDGASFTFIYGVCLLLAAYLMSVMLIQDLVVVSHNVITVFTIVLFVILVVPILVPIMTSFFTETNEPDDTIEEPLVPKREDQEPGLQTPDLILSEVEDEKPKDVDLLPASERHKRIAHLQAQLMQAAAEGAVRVNRRRGPHRGEDFTLTQALVKADFWLIFFSLLLGSGSGLTVIDNLGQMSQSLGYDNTHVLVSMISIWNFLGRIGGGYFSELVVRDYAYPRPVAMAVAQLIMSVGHIFFAYGWPGAMYIGTLLIGLGYGAHWAIVPATASELFGLKKFGALYNFLTLANPAGSLVFSGMIASSIYDREAERQAHGSVFDPDDALRCNGSICFFLTSLIMSGFCIIACMLSMILVRRTKSVYTHLYGKTRT

SEQ ID NO: 82933 - protein, 466 aa, Arabidopsis thaliana
  peptide (1)..(466): Ceres Seq. ID no. 12667943
  misc_feature (241)..(414): Pfam Name: Sugar (and other) transporter Pfam Description: Sugar (and other) transporter
  misc_feature (1)..(466): Homolog of NCBI NO: 15241312 NR Description: nodulin-like protein; protein id: At5g14120.1
  misc_feature (1)..(465): Homolog of NCBI NO: 18395988 NR Description: unknown protein; protein id: At3g01930.1 thaliana] >gi|6091732|gb|AAF03444.1|AC010797_20 unknown protein thaliana] >gi|6513938|gb|AAF14842.1|AC011664_24 unknown protein
  misc_feature (1)..(441): Homolog of NCBI NO: 11358583 NR Description: nodulin-like protein [imported] - Arabidopsis
  misc_feature (1)..(465): Homolog of NCBI NO: 30678455 NR Description: expressed protein [Arabidopsis thaliana]
  misc_feature (1)..(311): Homolog of NCBI NO: 1532169 NR Description: similar to a E. coli hypothetical protein F402
  misc_feature (1)..(159): Homolog of NCBI NO: 18423161 NR Description: nodulin-like protein; protein id: At5g50520.1,
  misc_feature (230)..(461): Homolog of NCBI NO: 18423161 NR Description: nodulin-like protein; protein id: At5g50520.1,
  misc_feature (1)..(196): Homolog of NCBI NO: 15227274 NR Description: nodulin-like protein; protein id: At2g16660.1, by cDNA: gi_17979282, supported by cDNA: gi_20465249 [Arabidopsis
  misc_feature (210)..(466): Homolog of NCBI NO: 15227274 NR Description: nodulin-like protein; protein id: At2g16660.1, by cDNA: gi_17979282, supported by cDNA: gi_20465249 [Arabidopsis
  misc_feature (1)..(461): Homolog of NCBI NO: 38345150 NR Description: OSJNBa0014K14.4 [Oryza sativa (japonica
MCVLIFVGNNGETYFNTGALVSGVQNFPKSRGPVVGILKGFAGLGGAIISQIYTMIHSSNPASLILMVAVTPAVVVVCLMFFIRPVGGHKQIRPTDGASFTFIYGVCLLLAAYLMSVMLIQDLVVVSHNVITVFTIVLFVILVVPILVPIMTSFFTETNEPDDTIEEPLVPKREDQEPGLQTPDLILSEVEDEKPKDVDLLPASERHKRIAHLQAQLMQAAAEGAVRVNRRRGPHRGEDFTLTQALVKADFWLIFFSLLLGSGSGLTVIDNLGQMSQSLGYDNTHVLVSMISIWNFLGRIGGGYFSELVVRDYAYPRPVAMAVAQLIMSVGHIFFAYGWPGAMYIGTLLIGLGYGAHWAIVPATASELFGLKKFGALYNFLTLANPAGSLVFSGMIASSIYDREAERQAHGSVFDPDDALRCNGSICFFLTSLIMSGFCIIACMLSMILVRRTKSVYTHLYGKTRT

SEQ ID NO: 82934 - DNA, 1188 bp, Arabidopsis thaliana
  misc_feature (1)..(1188): Ceres Seq. ID no. 12667944
  misc_feature: MA Experiment ID: 20000184 Result: Up-regulated in Transcription
  misc_feature: MA Experiment 20000184 PARAMETER Experiment Name: At_Shoots__P Parameter: Age (day) Value: 7
  misc_feature: MA Experiment 20000184 PARAMETER Experiment Name: At_Shoots__P Parameter: Tissue Value: Shoots vs. Whole Plant
  misc_feature: MA Experiment ID: 20000185 Result: Up-regulated in Transcription
  misc_feature: MA Experiment 20000185 PARAMETER Experiment Name: At_Roots__P Parameter: Age (day) Value: 7 vs. 21
  misc_feature: MA Experiment 20000185 PARAMETER Experiment Name: At_Roots__P Parameter: Organism Value: A. thaliana
  misc_feature: MA Experiment 20000185 PARAMETER Experiment Name: At_Roots__P Parameter: Tissue Value: Roots vs. Whole Plant
  misc_feature: MA Experiment ID: 20000227 Result: Down-regulated in Transcription
  misc_feature: MA Experiment 20000227 PARAMETER Experiment Name: At_Root-Tips-vs-Tops_P Parameter: Tissue Value: Root Tips vs. Root Tops
  misc_feature: MA Experiment ID: 20000234 Result: Up-regulated in Transcription
  misc_feature: MA Experiment 20000234 PARAMETER Experiment Name: At_Siliques_P Parameter: Age (day) Value: 21
  misc_feature: MA Experiment 20000234 PARAMETER Experiment Name: At_Siliques_P Parameter: Organism Value: A. thaliana
  misc_feature: MA Experiment 20000234 PARAMETER Experiment Name: At_Siliques_P Parameter: Plant Line Value: WS
  misc_feature: MA Experiment 20000234 PARAMETER Experiment Name: At_Siliques_P Parameter: Tissue Value: Less Than 5mm Siliques vs. Whole Plant
  misc_feature: MA Experiment ID: 20000264 Result: Up-regulated in Transcription
  misc_feature: MA Experiment 20000264 PARAMETER Experiment Name: At_Open_Flower_P Parameter: Age (day) Value: 21
  misc_feature: MA Experiment 20000264 PARAMETER Experiment Name: At_Open_Flower_P Parameter: Plant Line Value: WS
  misc_feature: MA Experiment 20000264 PARAMETER Experiment Name: At_Open_Flower_P Parameter: Tissue Value: Open Flower vs. Whole Plant
  misc_feature: MA Experiment ID: 20000439 Result: Up-regulated in Transcription
  misc_feature: MA Experiment 20000439 PARAMETER Experiment Name: At_Roots__P Parameter: Age (day) Value: 14 vs. 21
  misc_feature: MA Experiment 20000439 PARAMETER Experiment Name: At_Roots__P Parameter: Organism Value: A. thaliana
  misc_feature: MA Experiment 20000439 PARAMETER Experiment Name: At_Roots__P Parameter: Tissue Value: Roots vs. Whole Plant
  misc_feature: MA Experiment ID: 20000453 Result: Up-regulated in Transcription
  misc_feature: MA Experiment 20000453 PARAMETER Experiment Name: At_100uM_ABA_P Parameter: Age (day) Value: 15
  misc_feature: MA Experiment 20000453 PARAMETER Experiment Name: At_100uM_ABA_P Parameter: Organism Value: A. thaliana
  misc_feature: MA Experiment 20000453 PARAMETER Experiment Name: At_100uM_ABA_P Parameter: Plant Line Value: WS
  misc_feature: MA Experiment 20000453 PARAMETER Experiment Name: At_100uM_ABA_P Parameter: Timepoint (hr) Value: 24
  misc_feature: MA Experiment 20000453 PARAMETER Experiment Name: At_100uM_ABA_P Parameter: Tissue Value: Aerial
  misc_feature: MA Experiment 20000453 PARAMETER Experiment Name: At_100uM_ABA_P Parameter: Treatment Value: 100uM ABA vs. No Treatment
  misc_feature: MA Experiment ID: 20000527 Result: Down-regulated in Transcription
  misc_feature: MA Experiment 20000527 PARAMETER Experiment Name: At_10percent_PEG_P Parameter: Age (day) Value: 20
  misc_feature: MA Experiment 20000527 PARAMETER Experiment Name: At_10percent_PEG_P Parameter: Organism Value: A. thaliana
  misc_feature: MA Experiment 20000527 PARAMETER Experiment Name: At_10percent_PEG_P Parameter: Plant Line Value: WS
  misc_feature: MA Experiment 20000527 PARAMETER Experiment Name: At_10percent_PEG_P Parameter: Timepoint (day) Value: 20
  misc_feature: MA Experiment 20000527 PARAMETER Experiment Name: At_10percent_PEG_P Parameter: Tissue Value: Whole Plant
  misc_feature: MA Experiment 20000527 PARAMETER Experiment Name: At_10percent_PEG_P Parameter: Treatment Value: 10percent PEG vs. No Treatment
  misc_feature: MA Experiment ID: 20001904 Result: Up-regulated in Transcription
  misc_feature: MA Experiment 20001904 PARAMETER Experiment Name: At_Drought_Reproduction_P Parameter: Age (day) Value: 37
  misc_feature: MA Experiment 20001904 PARAMETER Experiment Name: At_Drought_Reproduction_P Parameter: Organism Value: A. thaliana
  misc_feature: MA Experiment 20001904 PARAMETER Experiment Name: At_Drought_Reproduction_P Parameter: Plant Line Value: WS
  misc_feature: MA Experiment 20001904 PARAMETER Experiment Name: At_Drought_Reproduction_P Parameter: Timepoint (day) Value: 7
  misc_feature: MA Experiment 20001904 PARAMETER Experiment Name: At_Drought_Reproduction_P Parameter: Tissue Value: Rosettes
  misc_feature: MA Experiment 20001904 PARAMETER Experiment Name: At_Drought_Reproduction_P Parameter: Treatment Value: Drought vs. No Drought
  misc_feature: MA Experiment ID: 20001911 Result: Up-regulated in Transcription
  misc_feature: MA Experiment 20001911 PARAMETER Experiment Name: At_Drought_Reproduction_P Parameter: Age (day) Value: 40
  misc_feature: MA Experiment 20001911 PARAMETER Experiment Name: At_Drought_Reproduction_P Parameter: Organism Value: A. thaliana
  misc_feature: MA Experiment 20001911 PARAMETER Experiment Name: At_Drought_Reproduction_P Parameter: Plant Line Value: WS
  misc_feature: MA Experiment 20001911 PARAMETER Experiment Name: At_Drought_Reproduction_P Parameter: Timepoint (day) Value: 10
  misc_feature: MA Experiment 20001911 PARAMETER Experiment Name: At_Drought_Reproduction_P Parameter: Tissue Value: Flowers
  misc_feature: MA Experiment 20001911 PARAMETER Experiment Name: At_Drought_Reproduction_P Parameter: Treatment Value: Drought vs. No Drought
aaagaagacaaagaaattaaaggagaaaaatcgatcacgatggatattcgtagtgatgatgcaaaaaaacctatgatgatgtggttcttagggatgctgttgttttccatggtggccgagtcaaatgctcaactgtcagagaattactacgcctcgacatgtcctagcgtagagctcatcgttaagcaggcggttactacaaaattcaaacaaactgtcacaacggctcctgcaacgttgcggatgttctttcacgactgcttcgtcgagggatgtgatgcgtctgtgtttatagcatctgagaatgaagacgcagagaaagacgcagatgacaataaatctctcgccggagacggatttgacaccgtgattaaagctaaaaccgctgtagaatctcaatgtcccggagttgtgtcatgtgccgatatactagctctcgccgctagagacgtcgtcgtgctcgttggagggccagagtttaaggtggagctagggagacgagacgggctcgtgtcgaaagcgtctagagtgaccggcaagttacctgaaccagggcttgacgtgagaggtctagtccagatcttcgctagtaacgggctttcattgaccgacatgatcgctctttcaggcgcacatacaattggatcctctcactgcaaccgtttcgccaaccgtctccacaatttctcgacgttcatgccagtggaccctacgatggacccggtctacgctcagcagctgatacaagcctgctctgaccccaacccagatgctgtagtagacattgacctaacgtccagagataccttcgacaatagctactaccagaacctcgtggctcggaaaggacttttcacctccgatcaagctctgtttaacgatctctcgtctcaggctacggtggtcaggtttgctaacaacgctgaagaattctacagcgcttttagctctgctatgaggaatcttggccgcgttggggttaaggttgggaatcaaggcgagattcgaagggactgctctgcttttaactagctttattgaacaaatgtctataacctaaaacatataaattatgaagcttttgatttaagcttttgctatactaaaatgtcataatccacaatggaacttctcaaattgtaggggttgacctatttttcaggattattcagattccaaaacattatt

SEQ ID NO: 82935 - protein, 343 aa, Arabidopsis thaliana
  peptide (1)..(343): Ceres Seq. ID no. 12667945
  misc_feature (61)..(307): Pfam Name: Peroxidase Pfam Description: Peroxidase
  misc_feature (14)..(343): Homolog of NCBI NO: 15241315 NR Description: peroxidase, putative; protein id: At5g14130.1, by cDNA: gi_16209688 [Arabidopsis thaliana] Peroxidase 55 precursor (Atperox P55) (ATP20a)
  misc_feature (25)..(340): Homolog of NCBI NO: 4138647 NR Description: peroxidase [Trifolium repens]
  misc_feature (32)..(343): Homolog of NCBI NO: 28629828 NR Description: peroxidase 1 [Artemisia annua]
  misc_feature (34)..(343): Homolog of NCBI NO: 15235600 NR Description: peroxidase, putative; protein id: At4g37530.1, by cDNA: gi_18874553 [Arabidopsis thaliana] Peroxidase 51 precursor (Atperox P51) (ATP37)
  misc_feature (34)..(343): Homolog of NCBI NO: 17979440 NR Description: putative peroxidase [Arabidopsis thaliana]
  misc_feature (25)..(340): Homolog of NCBI NO: 2117624 NR Description: peroxidase (EC 1.11.1.7) 2 precursor - alfalfa
  misc_feature (25)..(340): Homolog of NCBI NO: 13992528 NR Description: peroxidase2 [Medicago sativa]
  misc_feature (43)..(343): Homolog of NCBI NO: 14485511 NR Description: putative peroxidase [Solanum tuberosum]
  misc_feature (41)..(343): Homolog of NCBI NO: 1546708 NR Description: peroxidase ATP9a [Arabidopsis thaliana]
  misc_feature (41)..(343): Homolog of NCBI NO: 15235597 NR Description: peroxidase, putative; protein id: At4g37520.1, by cDNA: 2583., supported by cDNA: gi_17065479, supported by gi_20148496 [Arabidopsis thaliana]
KEDKEIKGEKSITMDIRSDDAKKPMMMWFLGMLLFSMVAESNAQLSENYYASTCPSVELIVKQAVTTKFKQTVTTAPATLRMFFHDCFVEGCDASVFIASENEDAEKDADDNKSLAGDGFDTVIKAKTAVESQCPGVVSCADILALAARDVVVLVGGPEFKVELGRRDGLVSKASRVTGKLPEPGLDVRGLVQIFASNGLSLTDMIALSGAHTIGSSHCNRFANRLHNFSTFMPVDPTMDPVYAQQLIQACSDPNPDAVVDIDLTSRDTFDNSYYQNLVARKGLFTSDQALFNDLSSQATVVRFANNAEEFYSAFSSAMRNLGRVGVKVGNQGEIRRDCSAFN

SEQ ID NO: 82936 - protein, 330 aa, Arabidopsis thaliana
  peptide (1)..(330): Ceres Seq. ID no. 12667946
  misc_feature (48)..(294): Pfam Name: Peroxidase Pfam Description: Peroxidase
  misc_feature (1)..(330): Homolog of NCBI NO: 15241315 NR Description: peroxidase, putative; protein id: At5g14130.1, by cDNA: gi_16209688 [Arabidopsis thaliana] Peroxidase 55 precursor (Atperox P55) (ATP20a)
  misc_feature (12)..(327): Homolog of NCBI NO: 4138647 NR Description: peroxidase [Trifolium repens]
  misc_feature (19)..(330): Homolog of NCBI NO: 28629828 NR Description: peroxidase 1 [Artemisia annua]
  misc_feature (21)..(330): Homolog of NCBI NO: 15235600 NR Description: peroxidase, putative; protein id: At4g37530.1, by cDNA: gi_18874553 [Arabidopsis thaliana] Peroxidase 51 precursor (Atperox P51) (ATP37)
  misc_feature (21)..(330): Homolog of NCBI NO: 17979440 NR Description: putative peroxidase [Arabidopsis thaliana]
  misc_feature (12)..(327): Homolog of NCBI NO: 2117624 NR Description: peroxidase (EC 1.11.1.7) 2 precursor - alfalfa
  misc_feature (12)..(327): Homolog of NCBI NO: 13992528 NR Description: peroxidase2 [Medicago sativa]
  misc_feature (30)..(330): Homolog of NCBI NO: 14485511 NR Description: putative peroxidase [Solanum tuberosum]
  misc_feature (28)..(330): Homolog of NCBI NO: 1546708 NR Description: peroxidase ATP9a [Arabidopsis thaliana]
  misc_feature (28)..(330): Homolog of NCBI NO: 15235597 NR Description: peroxidase, putative; protein id: At4g37520.1, by cDNA: 2583., supported by cDNA: gi_17065479, supported by gi_20148496 [Arabidopsis thaliana]
MDIRSDDAKKPMMMWFLGMLLFSMVAESNAQLSENYYASTCPSVELIVKQAVTTKFKQTVTTAPATLRMFFHDCFVEGCDASVFIASENEDAEKDADDNKSLAGDGFDTVIKAKTAVESQCPGVVSCADILALAARDVVVLVGGPEFKVELGRRDGLVSKASRVTGKLPEPGLDVRGLVQIFASNGLSLTDMIALSGAHTIGSSHCNRFANRLHNFSTFMPVDPTMDPVYAQQLIQACSDPNPDAVVDIDLTSRDTFDNSYYQNLVARKGLFTSDQALFNDLSSQATVVRFANNAEEFYSAFSSAMRNLGRVGVKVGNQGEIRRDCSAFN

SEQ ID NO: 82937 - protein, 319 aa, Arabidopsis thaliana
  peptide (1)..(319): Ceres Seq. ID no. 12667947
  misc_feature (37)..(283): Pfam Name: Peroxidase Pfam Description: Peroxidase
  misc_feature (1)..(319): Homolog of NCBI NO: 15241315 NR Description: peroxidase, putative; protein id: At5g14130.1, by cDNA: gi_16209688 [Arabidopsis thaliana] Peroxidase 55 precursor (Atperox P55) (ATP20a)
  misc_feature (1)..(316): Homolog of NCBI NO: 4138647 NR Description: peroxidase [Trifolium repens]
  misc_feature (8)..(319): Homolog of NCBI NO: 28629828 NR Description: peroxidase 1 [Artemisia annua]
  misc_feature (10)..(319): Homolog of NCBI NO: 15235600 NR Description: peroxidase, putative; protein id: At4g37530.1, by cDNA: gi_18874553 [Arabidopsis thaliana] Peroxidase 51 precursor (Atperox P51) (ATP37)
  misc_feature (10)..(319): Homolog of NCBI NO: 17979440 NR Description: putative peroxidase [Arabidopsis thaliana]
  misc_feature (1)..(316): Homolog of NCBI NO: 2117624 NR Description: peroxidase (EC 1.11.1.7) 2 precursor - alfalfa
  misc_feature (1)..(316): Homolog of NCBI NO: 13992528 NR Description: peroxidase2 [Medicago sativa]
  misc_feature (19)..(319): Homolog of NCBI NO: 14485511 NR Description: putative peroxidase [Solanum tuberosum]
  misc_feature (17)..(319): Homolog of NCBI NO: 1546708 NR Description: peroxidase ATP9a [Arabidopsis thaliana]
  misc_feature (17)..(319): Homolog of NCBI NO: 15235597 NR Description: peroxidase, putative; protein id: At4g37520.1, by cDNA: 2583., supported by cDNA: gi_17065479, supported by gi_20148496 [Arabidopsis thaliana]
MMMWFLGMLLFSMVAESNAQLSENYYASTCPSVELIVKQAVTTKFKQTVTTAPATLRMFFHDCFVEGCDASVFIASENEDAEKDADDNKSLAGDGFDTVIKAKTAVESQCPGVVSCADILALAARDVVVLVGGPEFKVELGRRDGLVSKASRVTGKLPEPGLDVRGLVQIFASNGLSLTDMIALSGAHTIGSSHCNRFANRLHNFSTFMPVDPTMDPVYAQQLIQACSDPNPDAVVDIDLTSRDTFDNSYYQNLVARKGLFTSDQALFNDLSSQATVVRFANNAEEFYSAFSSAMRNLGRVGVKVGNQGEIRRDCSAFN

SEQ ID NO: 82938 - DNA, 1320 bp, Arabidopsis thaliana
  misc_feature (1)..(1320): Ceres Seq. ID no. 12667974
  misc_feature: MA Experiment ID: 20000171 Result: Up-regulated in Transcription
  misc_feature: MA Experiment 20000171 PARAMETER Experiment Name: At_42deg_Heat_P Parameter: Age (day) Value: 14
  misc_feature: MA Experiment 20000171 PARAMETER Experiment Name: At_42deg_Heat_P Parameter: Organism Value: A. thaliana
  misc_feature: MA Experiment 20000171 PARAMETER Experiment Name: At_42deg_Heat_P Parameter: Plant Line Value: WS
  misc_feature: MA Experiment 20000171 PARAMETER Experiment Name: At_42deg_Heat_P Parameter: Temperature (deg C) Value: 42 vs. 22
  misc_feature: MA Experiment 20000171 PARAMETER Experiment Name: At_42deg_Heat_P Parameter: Timepoint (hr) Value: 1
  misc_feature: MA Experiment 20000171 PARAMETER Experiment Name: At_42deg_Heat_P Parameter: Tissue Value: Aerial
atgggatggcctttcattggagaaactatttctttcttcaaacctcatagatcagactccatcggtacattcttgcaacaacgtgtttcacggtatggaaaagtgttcaagtcaaatatatgtggtggaaaagcagtagtctcatgtgaccaagaactcaacatgttcatacttcaaaacgaagggaagttgtttacatcggattatccaaaagcgatgcatgacattctcggcaaatattcccttctattagccaccggagaaattcacaggaaactaaaaaatgttattattagcttcatcaatctcacaaagtcgaaacctgactttcttcactgcgcagagaacctctctatctcgatactaaagtcatggaaaaattgccgagaagtcgaattccataaagaagttaaaatatttactctcagtgttatggtaaaccaactcttgagcatcaagccagaagacccagcaagactttatgtattgcaagattttttatcttatatgaaagggtttatctccttaccaataccgcttccaggaacgggttatacaaacgcaattaaggctaggaagagattgtcggcgagggttatggggatgataaaagaaagagagcgcgaagaagaagacatgaataatgcaataagagaagaagattttctggattcgataatttcgaatgaagatctaaattatgaagagaaagttagcattgtgttggacattttgcttggaggctttgagacaagtgctactactctttccttagtcgtctattttctagcaaaatctccaaatcttcttcacaaactcaaggaagaacatgcagccattagagccaagaaaggggatggggaacttttgaattgggaagattatcagaagatggaattcactcaatgtgtgatttctgaggcactacgatgtggtaatatcgtcaagactgtacatagaaaagctactcatgatattaaattcaacgaatatgtgattccaaaggggtggaaggtgtttccaatcttcacagcagtacatcttgatccctctcttcatgaaaatccttttgaatttaatcccatgagatggaccgataaggctaagatgaacaagaaaacgacggcgtttggaggaggagtaagggtatgtcctggtggtgaacttggcaagctccaaattgctttcttccttcatcatcttgtcctctcctataggtggaaaataaagtcagatgaaatgccaatcgcgcacccttacgtggagtttaagagaggcatgcttttggagatagagccaacaaaattccttgaagattag

SEQ ID NO: 82939 - protein, 439 aa, Arabidopsis thaliana
  peptide (1)..(439): Ceres Seq. ID no. 12667975
  misc_feature (1)..(439): Homolog of NCBI NO: 22326806 NR Description: cytochrome p450 family; protein id: At5g14400.1
  misc_feature (1)..(240): Homolog of NCBI NO: 11357546 NR Description: hypothetical protein F18O22.190 - Arabidopsis >gi|7573465|emb|CAB87779.1| putative protein [Arabidopsis
  misc_feature (275)..(439): Homolog of NCBI NO: 11357546 NR Description: hypothetical protein F18O22.190 - Arabidopsis >gi|7573465|emb|CAB87779.1| putative protein [Arabidopsis
  misc_feature (188)..(430): Homolog of NCBI NO: 32487441 NR Description: OSJNBa0016O02.25 [Oryza sativa (japonica
  misc_feature (2)..(125): Homolog of NCBI NO: 32487441 NR Description: OSJNBa0016O02.25 [Oryza sativa (japonica
  misc_feature (203)..(431): Homolog of NCBI NO: 2935342 NR Description: steroid 22-alpha-hydroxylase; DWF4; CYP90B1
  misc_feature (2)..(231): Homolog of NCBI NO: 2935342 NR Description: steroid 22-alpha-hydroxylase; DWF4; CYP90B1
  misc_feature (203)..(431): Homolog of NCBI NO: 15229822 NR Description: steroid 22-alpha-hydroxylase (DWF4); protein id:
  misc_feature (2)..(231): Homolog of NCBI NO: 15229822 NR Description: steroid 22-alpha-hydroxylase (DWF4); protein id:
  misc_feature (2)..(431): Homolog of NCBI NO: 34902330 NR Description: Putative steroid 22-alpha-hydroxylase [Oryza
MGWPFIGETISFFKPHRSDSIGTFLQQRVSRYGKVFKSNICGGKAVVSCDQELNMFILQNEGKLFTSDYPKAMHDILGKYSLLLATGEIHRKLKNVIISFINLTKSKPDFLHCAENLSISILKSWKNCREVEFHKEVKIFTLSVMVNQLLSIKPEDPARLYVLQDFLSYMKGFISLPIPLPGTGYTNAIKARKRLSARVMGMIKEREREEEDMNNAIREEDFLDSIISNEDLNYEEKVSIVLDILLGGFETSATTLSLVVYFLAKSPNLLHKLKEEHAAIRAKKGDGELLNWEDYQKMEFTQCVISEALRCGNIVKTVHRKATHDIKFNEYVIPKGWKVFPIFTAVHLDPSLHENPFEFNPMRWTDKAKMNKKTTAFGGGVRVCPGGELGKLQIAFFLHHLVLSYRWKIKSDEMPIAHPYVEFKRGMLLEIEPTKFLED

SEQ ID NO: 82940 - protein, 385 aa, Arabidopsis thaliana
  peptide (1)..(385): Ceres Seq. ID no. 12667976
  misc_feature (1)..(385): Homolog of NCBI NO: 22326806 NR Description: cytochrome p450 family; protein id: At5g14400.1
  misc_feature (1)..(186): Homolog of NCBI NO: 11357546 NR Description: hypothetical protein F18O22.190 - Arabidopsis >gi|7573465|emb|CAB87779.1| putative protein [Arabidopsis
  misc_feature (221)..(385): Homolog of NCBI NO: 11357546 NR Description: hypothetical protein F18O22.190 - Arabidopsis >gi|7573465|emb|CAB87779.1| putative protein [Arabidopsis
  misc_feature (134)..(376): Homolog of NCBI NO: 32487441 NR Description: OSJNBa0016O02.25 [Oryza sativa (japonica
  misc_feature (1)..(71): Homolog of NCBI NO: 32487441 NR Description: OSJNBa0016O02.25 [Oryza sativa (japonica
  misc_feature (149)..(377): Homolog of NCBI NO: 2935342 NR Description: steroid 22-alpha-hydroxylase; DWF4; CYP90B1
  misc_feature (1)..(177): Homolog of NCBI NO: 2935342 NR Description: steroid 22-alpha-hydroxylase; DWF4; CYP90B1
  misc_feature (149)..(377): Homolog of NCBI NO: 15229822 NR Description: steroid 22-alpha-hydroxylase (DWF4); protein id:
  misc_feature (1)..(177): Homolog of NCBI NO: 15229822 NR Description: steroid 22-alpha-hydroxylase (DWF4); protein id:
  misc_feature (1)..(377): Homolog of NCBI NO: 34902330 NR Description: Putative steroid 22-alpha-hydroxylase [Oryza
MFILQNEGKLFTSDYPKAMHDILGKYSLLLATGEIHRKLKNVIISFINLTKSKPDFLHCAENLSISILKSWKNCREVEFHKEVKIFTLSVMVNQLLSIKPEDPARLYVLQDFLSYMKGFISLPIPLPGTGYTNAIKARKRLSARVMGMIKEREREEEDMNNAIREEDFLDSIISNEDLNYEEKVSIVLDILLGGFETSATTLSLVVYFLAKSPNLLHKLKEEHAAIRAKKGDGELLNWEDYQKMEFTQCVISEALRCGNIVKTVHRKATHDIKFNEYVIPKGWKVFPIFTAVHLDPSLHENPFEFNPMRWTDKAKMNKKTTAFGGGVRVCPGGELGKLQIAFFLHHLVLSYRWKIKSDEMPIAHPYVEFKRGMLLEIEPTKFLED

SEQ ID NO: 82941 - protein, 367 aa, Arabidopsis thaliana
  peptide (1)..(367): Ceres Seq. ID no. 12667977
  misc_feature (1)..(367): Homolog of NCBI NO: 22326806 NR Description: cytochrome p450 family; protein id: At5g14400.1
  misc_feature (1)..(168): Homolog of NCBI NO: 11357546 NR Description: hypothetical protein F18O22.190 - Arabidopsis >gi|7573465|emb|CAB87779.1| putative protein [Arabidopsis
  misc_feature (203)..(367): Homolog of NCBI NO: 11357546 NR Description: hypothetical protein F18O22.190 - Arabidopsis >gi|7573465|emb|CAB87779.1| putative protein [Arabidopsis
  misc_feature (116)..(358): Homolog of NCBI NO: 32487441 NR Description: OSJNBa0016O02.25 [Oryza sativa (japonica
  misc_feature (1)..(53): Homolog of NCBI NO: 32487441 NR Description: OSJNBa0016O02.25 [Oryza sativa (japonica
  misc_feature (131)..(359): Homolog of NCBI NO: 2935342 NR Description: steroid 22-alpha-hydroxylase; DWF4; CYP90B1
  misc_feature (1)..(159): Homolog of NCBI NO: 2935342 NR Description: steroid 22-alpha-hydroxylase; DWF4; CYP90B1
  misc_feature (131)..(359): Homolog of NCBI NO: 15229822 NR Description: steroid 22-alpha-hydroxylase (DWF4); protein id:
  misc_feature (1)..(159): Homolog of NCBI NO: 15229822 NR Description: steroid 22-alpha-hydroxylase (DWF4); protein id:
  misc_feature (1)..(359): Homolog of NCBI NO: 34902330 NR Description: Putative steroid 22-alpha-hydroxylase [Oryza
MHDILGKYSLLLATGEIHRKLKNVIISFINLTKSKPDFLHCAENLSISILKSWKNCREVEFHKEVKIFTLSVMVNQLLSIKPEDPARLYVLQDFLSYMKGFISLPIPLPGTGYTNAIKARKRLSARVMGMIKEREREEEDMNNAIREEDFLDSIISNEDLNYEEKVSIVLDILLGGFETSATTLSLVVYFLAKSPNLLHKLKEEHAAIRAKKGDGELLNWEDYQKMEFTQCVISEALRCGNIVKTVHRKATHDIKFNEYVIPKGWKVFPIFTAVHLDPSLHENPFEFNPMRWTDKAKMNKKTTAFGGGVRVCPGGELGKLQIAFFLHHLVLSYRWKIKSDEMPIAHPYVEFKRGMLLEIEPTKFLED

SEQ ID NO: 82942 - DNA, 1710 bp, Arabidopsis thaliana
  misc_feature (1)..(1710): Ceres Seq. ID no. 12668001
  misc_feature: MA Experiment ID: 20001905 Result: Up-regulated in Transcription
  misc_feature: MA Experiment 20001905 PARAMETER Experiment Name: At_Drought_Reproduction_P Parameter: Age (day) Value: 40
  misc_feature: MA Experiment 20001905 PARAMETER Experiment Name: At_Drought_Reproduction_P Parameter: Organism Value: A. thaliana
  misc_feature: MA Experiment 20001905 PARAMETER Experiment Name: At_Drought_Reproduction_P Parameter: Plant Line Value: WS
  misc_feature: MA Experiment 20001905 PARAMETER Experiment Name: At_Drought_Reproduction_P Parameter: Timepoint (day) Value: 10
  misc_feature: MA Experiment 20001905 PARAMETER Experiment Name: At_Drought_Reproduction_P Parameter: Tissue Value: Rosettes
  misc_feature: MA Experiment 20001905 PARAMETER Experiment Name: At_Drought_Reproduction_P Parameter: Treatment Value: Drought vs. No Drought
attggggtccgctctctctctctctctgccatcagaagaaaaaaccaaacaccgagacaaaacacatcacgaagaagagagagatttgccattttcggcaaggaagtgttttattctagggcttctctagttgctgcgtagacaagatggtggagtgaaattgcggcggtgacttttcagattgacaaattgaattaaagatcttgaatacatatggcttctgtgggaacattaccagcttcttctatggctacaaaacaaagcaatgcttctatatgcgctgaaaaattacctgaagggattaatgagatgaagataaaagatgataaggaaatggaagcagctgtggttgatgggaatggaactgaaacaggtcacattattgttacaactattggtggtaaaaatggtcagcctaaacagaccataagttatatggcagagcgcatcgttggacaaggttcttttggaatcgtttttcaggccaagtgtttagaaacgggggaaactgttgcaatcaagaaagttttgcaagacaagagatacaagaatcgggagctgcagacaatgcgtcttcttgatcaccctaatgttgtatccctcaagcattgttttttctcaacgactgaaaaagatgagctctatctcaatctggtccttgaatacgttcctgagactgtctatcgcgtctcaaagcactatagtcgggcaaaccagaggatgcccattatatatgttaaactctatacttatcagatttgcagagctttggcttatattcatggtggagtaggagtctgccacagagacataaaaccacagaatcttctggttaatcctcatacgcatcaggtcaaactatgcgattttggtagcgcaaaagttctggttaaaggcgagccaaacatctcatacatctgctcccgttactatcgagcacctgaacttatatttggagctacagaatatacaacaacaattgacatatggtctgcaggctgtgttcttgctgaattgcttctgggacagcctctatttccaggtgagagtggagttgaccagctagttgagataataaaggttcttggaacaccaacacgggaggaaatcaaatgcatgaatccaaactacacagaattcaaattcccgcaaataaaggctcatccttggcacaaaatattccataagcgtacacctccagaagctgtagaccttgtctcaagacttctccagtattctccaaacctcagatcaaccgctatggaggcgatagttcacccgttcttcgatgagctacgtgatcccaatacacgtcttcctaatggtcgtgccttgcctcctctcttcaactttaaacctcaagagctaaaaggagcaagtttagagttgttgtccaagcttatacctgaccacgcccgaaaacaatgttccttcctcgctctctaaatctcttcctctctctctatatatatgtgtgtgtgtgtgtatgtacacatgcatataatatgcttatcgtttctaagtaatggagatagcttctcaggattatcattagctttcatctttcatgtatctttgttgtttattgtcttatcacaacctttgtactttattacatacaatgattagtgtaatgtatgtgacggtctttgactcgccggtcgctacagttatgttggatactaaattataaaataaacttctcgctcg

SEQ ID NO: 82943 - protein, 410 aa, Arabidopsis thaliana
  peptide (1)..(410): Ceres Seq. ID no. 12668002
  misc_feature (74)..(358): Pfam Name: Protein kinase domain Pfam Description: Protein kinase domain
  misc_feature (1)..(410): Homolog of NCBI NO: 22326813 NR Description: protein kinase MSK-3 - like; protein id: supported by cDNA: gi_18086449 [Arabidopsis thaliana]
  misc_feature (1)..(410): Homolog of NCBI NO: 11259751 NR Description: protein kinase MSK-3-like - Arabidopsis thaliana
  misc_feature (1)..(406): Homolog of NCBI NO: 481018 NR Description: protein kinase MSK-3 (EC 2.7.1.-) [similarity] -
  misc_feature (1)..(406): Homolog of NCBI NO: 11182434 NR Description: GLYCOGEN SYNTHASE KINASE-3 HOMOLOG MSK-3
  misc_feature (1)..(410): Homolog of NCBI NO: 18421039 NR Description: shaggy-like kinase alpha; protein id: supported by cDNA: gi_15028148, supported by cDNA: gi_16226767
  misc_feature (1)..(410): Homolog of NCBI NO: 1076649 NR Description: shaggy protein kinase 4 (EC 2.7.1.-) - garden >gi|619894|emb|CAA58594.1| Petunia Shaggy kinase 4 [Petunia x
  misc_feature (1)..(410): Homolog of NCBI NO: 541901 NR Description: protein kinase ASK-alpha (EC 2.7.1.-) - Arabidopsis thaliana >gi|460832|emb|CAA53181.1| shaggy related [Arabidopsis thaliana] >gi|1769889|emb|CAA48538.1| serine
  misc_feature (1)..(410): Homolog of NCBI NO: 15230058 NR Description: shaggy related protein kinase, ASK-GAMMA; protein At3g05840.1, supported by cDNA: 17739., supported by cDNA:
  misc_feature (1)..(410): Homolog of NCBI NO: 11133532 NR Description: Shaggy-related protein kinase NtK-1
  misc_feature (14)..(410): Homolog of NCBI NO: 33591210 NR Description: shaggy-related protein kinase 4 [Physcomitrella
MASVGTLPASSMATKQSNASICAEKLPEGINEMKIKDDKEMEAAVVDGNGTETGHIIVTTIGGKNGQPKQTISYMAERIVGQGSFGIVFQAKCLETGETVAIKKVLQDKRYKNRELQTMRLLDHPNVVSLKHCFFSTTEKDELYLNLVLEYVPETVYRVSKHYSRANQRMPIIYVKLYTYQICRALAYIHGGVGVCHRDIKPQNLLVNPHTHQVKLCDFGSAKVLVKGEPNISYICSRYYRAPELIFGATEYTTTIDIWSAGCVLAELLLGQPLFPGESGVDQLVEIIKVLGTPTREEIKCMNPNYTEFKFPQIKAHPWHKIFHKRTPPEAVDLVSRLLQYSPNLRSTAMEAIVHPFFDELRDPNTRLPNGRALPPLFNFKPQELKGASLELLSKLIPDHARKQCSFLAL

SEQ ID NO: 82944 - protein, 399 aa, Arabidopsis thaliana
  peptide (1)..(399): Ceres Seq. ID no. 12668003
  misc_feature (63)..(347): Pfam Name: Protein kinase domain Pfam Description: Protein kinase domain
  misc_feature (1)..(399): Homolog of NCBI NO: 22326813 NR Description: protein kinase MSK-3 - like; protein id: supported by cDNA: gi_18086449 [Arabidopsis thaliana]
  misc_feature (1)..(399): Homolog of NCBI NO: 11259751 NR Description: protein kinase MSK-3-like - Arabidopsis thaliana
  misc_feature (1)..(395): Homolog of NCBI NO: 481018 NR Description: protein kinase MSK-3 (EC 2.7.1.-) [similarity] -
  misc_feature (1)..(395): Homolog of NCBI NO: 11182434 NR Description: GLYCOGEN SYNTHASE KINASE-3 HOMOLOG MSK-3
  misc_feature (1)..(399): Homolog of NCBI NO: 18421039 NR Description: shaggy-like kinase alpha; protein id: supported by cDNA: gi_15028148, supported by cDNA: gi_16226767
  misc_feature (1)..(399): Homolog of NCBI NO: 1076649 NR Description: shaggy protein kinase 4 (EC 2.7.1.-) - garden >gi|619894|emb|CAA58594.1| Petunia Shaggy kinase 4 [Petunia x
  misc_feature (1)..(399): Homolog of NCBI NO: 541901 NR Description: protein kinase ASK-alpha (EC 2.7.1.-) - Arabidopsis thaliana >gi|460832|emb|CAA53181.1| shaggy related [Arabidopsis thaliana] >gi|1769889|emb|CAA48538.1| serine
  misc_feature (1)..(399): Homolog of NCBI NO: 15230058 NR Description: shaggy related protein kinase, ASK-GAMMA; protein At3g05840.1, supported by cDNA: 17739., supported by cDNA:
  misc_feature (1)..(399): Homolog of NCBI NO: 11133532 NR Description: Shaggy-related protein kinase NtK-1
  misc_feature (3)..(399): Homolog of NCBI NO: 33591210 NR Description: shaggy-related protein kinase 4 [Physcomitrella
MATKQSNASICAEKLPEGINEMKIKDDKEMEAAVVDGNGTETGHIIVTTIGGKNGQPKQTISYMAERIVGQGSFGIVFQAKCLETGETVAIKKVLQDKRYKNRELQTMRLLDHPNVVSLKHCFFSTTEKDELYLNLVLEYVPETVYRVSKHYSRANQRMPIIYVKLYTYQICRALAYIHGGVGVCHRDIKPQNLLVNPHTHQVKLCDFGSAKVLVKGEPNISYICSRYYRAPELIFGATEYTTTIDIWSAGCVLAELLLGQPLFPGESGVDQLVEIIKVLGTPTREEIKCMNPNYTEFKFPQIKAHPWHKIFHKRTPPEAVDLVSRLLQYSPNLRSTAMEAIVHPFFDELRDPNTRLPNGRALPPLFNFKPQELKGASLELLSKLIPDHARKQCSFLAL

SEQ ID NO: 82945 - protein, 378 aa, Arabidopsis thaliana
  peptide (1)..(378): Ceres Seq. ID no. 12668004
  misc_feature (42)..(326): Pfam Name: Protein kinase domain Pfam Description: Protein kinase domain
  misc_feature (1)..(378): Homolog of NCBI NO: 22326813 NR Description: protein kinase MSK-3 - like; protein id: supported by cDNA: gi_18086449 [Arabidopsis thaliana]
  misc_feature (1)..(378): Homolog of NCBI NO: 11259751 NR Description: protein kinase MSK-3-like - Arabidopsis thaliana
  misc_feature (1)..(374): Homolog of NCBI NO: 481018 NR Description: protein kinase MSK-3 (EC 2.7.1.-) [similarity] -
  misc_feature (1)..(374): Homolog of NCBI NO: 11182434 NR Description: GLYCOGEN SYNTHASE KINASE-3 HOMOLOG MSK-3
  misc_feature (1)..(378): Homolog of NCBI NO: 18421039 NR Description: shaggy-like kinase alpha; protein id: supported by cDNA: gi_15028148, supported by cDNA: gi_16226767
  misc_feature (1)..(378): Homolog of NCBI NO: 1076649 NR Description: shaggy protein kinase 4 (EC 2.7.1.-) - garden >gi|619894|emb|CAA58594.1| Petunia Shaggy kinase 4 [Petunia x
  misc_feature (1)..(378): Homolog of NCBI NO: 541901 NR Description: protein kinase ASK-alpha (EC 2.7.1.-) - Arabidopsis thaliana >gi|460832|emb|CAA53181.1| shaggy related [Arabidopsis thaliana] >gi|1769889|emb|CAA48538.1| serine
  misc_feature (1)..(378): Homolog of NCBI NO: 15230058 NR Description: shaggy related protein kinase, ASK-GAMMA; protein At3g05840.1, supported by cDNA: 17739., supported by cDNA:
  misc_feature (1)..(378): Homolog of NCBI NO: 11133532 NR Description: Shaggy-related protein kinase NtK-1
  misc_feature (1)..(378): Homolog of NCBI NO: 33591210 NR Description: shaggy-related protein kinase 4 [Physcomitrella
MKIKDDKEMEAAVVDGNGTETGHIIVTTIGGKNGQPKQTISYMAERIVGQGSFGIVFQAKCLETGETVAIKKVLQDKRYKNRELQTMRLLDHPNVVSLKHCFFSTTEKDELYLNLVLEYVPETVYRVSKHYSRANQRMPIIYVKLYTYQICRALAYIHGGVGVCHRDIKPQNLLVNPHTHQVKLCDFGSAKVLVKGEPNISYICSRYYRAPELIFGATEYTTTIDIWSAGCVLAELLLGQPLFPGESGVDQLVEIIKVLGTPTREEIKCMNPNYTEFKFPQIKAHPWHKIFHKRTPPEAVDLVSRLLQYSPNLRSTAMEAIVHPFFDELRDPNTRLPNGRALPPLFNFKPQELKGASLELLSKLIPDHARKQCSFLAL

SEQ ID NO: 82946 - DNA, 528 bp, Arabidopsis thaliana
  misc_feature (1)..(528): Ceres Seq. ID no. 12668013
  misc_feature: MA Experiment ID: 20000180 Result: Down-regulated in Transcription
  misc_feature: MA Experiment 20000180 PARAMETER Experiment Name: At_Germinating_Seeds_P Parameter: Age (hr) Value: 24 vs. 0
  misc_feature: MA Experiment 20000180 PARAMETER Experiment Name: At_Germinating_Seeds_P Parameter: Tissue Value: Germinating Seeds
  misc_feature: MA Experiment ID: 20000184 Result: Down-regulated in Transcription
  misc_feature: MA Experiment 20000184 PARAMETER Experiment Name: At_Shoots__P Parameter: Age (day) Value: 7
  misc_feature: MA Experiment 20000184 PARAMETER Experiment Name: At_Shoots__P Parameter: Tissue Value: Shoots vs. Whole Plant
  misc_feature: MA Experiment ID: 20000496 Result: Down-regulated in Transcription
  misc_feature: MA Experiment 20000496 PARAMETER Experiment Name: At_Guard_Cells_P Parameter: Harvest Date Value: 7/19/2002
  misc_feature: MA Experiment 20000496 PARAMETER Experiment Name: At_Guard_Cells_P Parameter: Organism Value: Canola
  misc_feature: MA Experiment 20000496 PARAMETER Experiment Name: At_Guard_Cells_P Parameter: Tissue Value: Guard Cells vs. Leaves
  misc_feature: MA Experiment ID: 20001557 Result: Down-regulated in Transcription
  misc_feature: MA Experiment 20001557 PARAMETER Experiment Name: At_Drought_Soil_Dry_P Parameter: Age (day) Value: 27
  misc_feature: MA Experiment 20001557 PARAMETER Experiment Name: At_Drought_Soil_Dry_P Parameter: Organism Value: A. thaliana
  misc_feature: MA Experiment 20001557 PARAMETER Experiment Name: At_Drought_Soil_Dry_P Parameter: Plant Line Value: WS
  misc_feature: MA Experiment 20001557 PARAMETER Experiment Name: At_Drought_Soil_Dry_P Parameter: Post Timepoint (hr) Value: 3
  misc_feature: MA Experiment 20001557 PARAMETER Experiment Name: At_Drought_Soil_Dry_P Parameter: Post-Treatment Value: Re-Water vs. No Drought
  misc_feature: MA Experiment 20001557 PARAMETER Experiment Name: At_Drought_Soil_Dry_P Parameter: Timepoint (day) Value: 13
  misc_feature: MA Experiment 20001557 PARAMETER Experiment Name: At_Drought_Soil_Dry_P Parameter: Treatment Value: Drought vs. No Drought
  misc_feature: MA Experiment ID: 20001558 Result: Down-regulated in Transcription
  misc_feature: MA Experiment 20001558 PARAMETER Experiment Name: At_Drought_Soil_Dry_P Parameter: Age (day) Value: 27
  misc_feature: MA Experiment 20001558 PARAMETER Experiment Name: At_Drought_Soil_Dry_P Parameter: Organism Value: A. thaliana
  misc_feature: MA Experiment 20001558 PARAMETER Experiment Name: At_Drought_Soil_Dry_P Parameter: Plant Line Value: WS
  misc_feature: MA Experiment 20001558 PARAMETER Experiment Name: At_Drought_Soil_Dry_P Parameter: Post Timepoint (hr) Value: 6
  misc_feature: MA Experiment 20001558 PARAMETER Experiment Name: At_Drought_Soil_Dry_P Parameter: Post-Treatment Value: Re-Water vs. No Drought
  misc_feature: MA Experiment 20001558 PARAMETER Experiment Name: At_Drought_Soil_Dry_P Parameter: Timepoint (day) Value: 13
  misc_feature: MA Experiment 20001558 PARAMETER Experiment Name: At_Drought_Soil_Dry_P Parameter: Treatment Value: Drought vs. No Drought
atggagagcgagcctactcgagtgatggtggcggtgaatgaatcgactctcaaaggctatccacacgcgtcgataagtagcaaaaaagcattcgagtggacactgaagaagatcgttcggtccaatacctctggcttcaagcttctcttgctccacgttcaagttcaagacgaagacggttttgatgacatggacagtatatatgcttcccctgatgatttccgacaaatgagggagcgtaacaaggctaaaggacttcaccttcttgagtttttcgttaagaaatgtcatgatattggggttgggtgcgaggcttggatcaggaaaggtgatcccacagaattgatatgccatgaagtgaggcgagtccggccagattttctggttgtgggaagtcgtggtctcggcccattccaaaaggtatttgttggaacagtgagtgaattttgtgtgaagcatgcagaatgcccagtcatcacaatcaaacgcactgctgaagaatctccacaagatccagctgatgactaa

SEQ ID NO: 82947 - protein, 175 aa, Arabidopsis thaliana
  peptide (1)..(175): Ceres Seq. ID no. 12668014
  misc_feature (5)..(162): Pfam Name: Universal stress protein family Pfam Description: Universal stress protein family
  misc_feature (1)..(175): Homolog of NCBI NO: 15241464 NR Description: putative protein; protein id: At5g14680.1
  misc_feature (1)..(175): Homolog of NCBI NO: 6016711 NR Description: unknown protein [Arabidopsis thaliana]
  misc_feature (1)..(175): Homolog of NCBI NO: 18395845 NR Description: expressed protein; protein id: At3g01520.1, by cDNA: 102038., supported by cDNA: gi_15450656, supported by gi_17386129 [Arabidopsis thaliana] >gi|15450657|gb|AAK96600.1|
  misc_feature (9)..(175): Homolog of NCBI NO: 21536534 NR Description: putative ethylene-responsive protein [Arabidopsis
  misc_feature (3)..(175): Homolog of NCBI NO: 19387249 NR Description: putative ethylene-responsive protein [Oryza
  misc_feature (7)..(163): Homolog of NCBI NO: 34914610 NR Description: P0520B06.18 [Oryza sativa (japonica
  misc_feature (7)..(165): Homolog of NCBI NO: 18408994 NR Description: expressed protein; protein id: At1g68300.1, by cDNA: 27109. [Arabidopsis thaliana] >gi|25404724|pir||F96706
  misc_feature (7)..(168): Homolog of NCBI NO: 30694811 NR Description: expressed protein [Arabidopsis thaliana] unknown protein [Arabidopsis thaliana]
  misc_feature (7)..(168): Homolog of NCBI NO: 30694813 NR Description: expressed protein [Arabidopsis thaliana]
  misc_feature (7)..(166): Homolog of NCBI NO: 30681955 NR Description: ethylene-responsive protein -related [Arabidopsis >gi|6671949|gb|AAF23209.1|AC016795_22 unknown protein thaliana] >gi|10998131|dbj|BAB03102.1| gene_id:MEC18.3~unknown
MESEPTRVMVAVNESTLKGYPHASISSKKAFEWTLKKIVRSNTSGFKLLLLHVQVQDEDGFDDMDSIYASPDDFRQMRERNKAKGLHLLEFFVKKCHDIGVGCEAWIRKGDPTELICHEVRRVRPDFLVVGSRGLGPFQKVFVGTVSEFCVKHAECPVITIKRTAEESPQDPADD

SEQ ID NO: 82948 - protein, 167 aa, Arabidopsis thaliana
  peptide (1)..(167): Ceres Seq. ID no. 12668015
  misc_feature (1)..(154): Pfam Name: Universal stress protein family Pfam Description: Universal stress protein family
  misc_feature (1)..(167): Homolog of NCBI NO: 15241464 NR Description: putative protein; protein id: At5g14680.1
  misc_feature (1)..(167): Homolog of NCBI NO: 6016711 NR Description: unknown protein [Arabidopsis thaliana]
  misc_feature (1)..(167): Homolog of NCBI NO: 18395845 NR Description: expressed protein; protein id: At3g01520.1, by cDNA: 102038., supported by cDNA: gi_15450656, supported by gi_17386129 [Arabidopsis thaliana] >gi|15450657|gb|AAK96600.1|
  misc_feature (1)..(167): Homolog of NCBI NO: 21536534 NR Description: putative ethylene-responsive protein [Arabidopsis
  misc_feature (1)..(167): Homolog of NCBI NO: 19387249 NR Description: putative ethylene-responsive protein [Oryza
  misc_feature (1)..(155): Homolog of NCBI NO: 34914610 NR Description: P0520B06.18 [Oryza sativa (japonica
  misc_feature (1)..(157): Homolog of NCBI NO: 18408994 NR Description: expressed protein; protein id: At1g68300.1, by cDNA: 27109. [Arabidopsis thaliana] >gi|25404724|pir||F96706
  misc_feature (1)..(160): Homolog of NCBI NO: 30694811 NR Description: expressed protein [Arabidopsis thaliana] unknown protein [Arabidopsis thaliana]
  misc_feature (1)..(160): Homolog of NCBI NO: 30694813 NR Description: expressed protein [Arabidopsis thaliana]
  misc_feature (1)..(158): Homolog of NCBI NO: 30681955 NR Description: ethylene-responsive protein -related [Arabidopsis >gi|6671949|gb|AAF23209.1|AC016795_22 unknown protein thaliana] >gi|10998131|dbj|BAB03102.1| gene_id:MEC18.3~unknown
MVAVNESTLKGYPHASISSKKAFEWTLKKIVRSNTSGFKLLLLHVQVQDEDGFDDMDSIYASPDDFRQMRERNKAKGLHLLEFFVKKCHDIGVGCEAWIRKGDPTELICHEVRRVRPDFLVVGSRGLGPFQKVFVGTVSEFCVKHAECPVITIKRTAEESPQDPADD

SEQ ID NO: 82949 - protein, 112 aa, Arabidopsis thaliana
  peptide (1)..(112): Ceres Seq. ID no. 12668016
  misc_feature (1)..(99): Pfam Name: Universal stress protein family Pfam Description: Universal stress protein family
  misc_feature (1)..(112): Homolog of NCBI NO: 15241464 NR Description: putative protein; protein id: At5g14680.1
  misc_feature (1)..(112): Homolog of NCBI NO: 6016711 NR Description: unknown protein [Arabidopsis thaliana]
  misc_feature (1)..(112): Homolog of NCBI NO: 18395845 NR Description: expressed protein; protein id: At3g01520.1, by cDNA: 102038., supported by cDNA: gi_15450656, supported by gi_17386129 [Arabidopsis thaliana] >gi|15450657|gb|AAK96600.1|
  misc_feature (1)..(112): Homolog of NCBI NO: 21536534 NR Description: putative ethylene-responsive protein [Arabidopsis
  misc_feature (1)..(112): Homolog of NCBI NO: 19387249 NR Description: putative ethylene-responsive protein [Oryza
  misc_feature (1)..(100): Homolog of NCBI NO: 34914610 NR Description: P0520B06.18 [Oryza sativa (japonica
  misc_feature (1)..(102): Homolog of NCBI NO: 18408994 NR Description: expressed protein; protein id: At1g68300.1, by cDNA: 27109. [Arabidopsis thaliana] >gi|25404724|pir||F96706
  misc_feature (1)..(105): Homolog of NCBI NO: 30694811 NR Description: expressed protein [Arabidopsis thaliana] unknown protein [Arabidopsis thaliana]
  misc_feature (1)..(105): Homolog of NCBI NO: 30694813 NR Description: expressed protein [Arabidopsis thaliana]
  misc_feature (1)..(103): Homolog of NCBI NO: 30681955 NR Description: ethylene-responsive protein -related [Arabidopsis >gi|6671949|gb|AAF23209.1|AC016795_22 unknown protein thaliana] >gi|10998131|dbj|BAB03102.1| gene_id:MEC18.3~unknown
MDSIYASPDDFRQMRERNKAKGLHLLEFFVKKCHDIGVGCEAWIRKGDPTELICHEVRRVRPDFLVVGSRGLGPFQKVFVGTVSEFCVKHAECPVITIKRTAEESPQDPADD

SEQ ID NO: 82950 - DNA, 871 bp, Arabidopsis thaliana
  misc_feature (1)..(871): Ceres Seq. ID no. 12668020
  misc_feature: MA Experiment ID: 20000314 Result: Up-regulated in Transcription
  misc_feature: MA Experiment 20000314 PARAMETER Experiment Name: At_14day_Shoots-Roots_Sub_P Parameter: Age (day) Value: 14
  misc_feature: MA Experiment 20000314 PARAMETER Experiment Name: At_14day_Shoots-Roots_Sub_P Parameter: Organism Value: A. thaliana
  misc_feature: MA Experiment 20000314 PARAMETER Experiment Name: At_14day_Shoots-Roots_Sub_P Parameter: Plant Line Value: WS
  misc_feature: MA Experiment 20000314 PARAMETER Experiment Name: At_14day_Shoots-Roots_Sub_P Parameter: Tissue Value: Roots vs. Whole Plant
  misc_feature: MA Experiment ID: 20000327 Result: Up-regulated in Transcription
  misc_feature: MA Experiment 20000327 PARAMETER Experiment Name: At_42deg_Heat_Sub_P Parameter: Age (day) Value: 14
  misc_feature: MA Experiment 20000327 PARAMETER Experiment Name: At_42deg_Heat_Sub_P Parameter: Organism Value: A. thaliana
  misc_feature: MA Experiment 20000327 PARAMETER Experiment Name: At_42deg_Heat_Sub_P Parameter: Plant Line Value: WS
  misc_feature: MA Experiment 20000327 PARAMETER Experiment Name: At_42deg_Heat_Sub_P Parameter: Temperature (deg C) Value: 42 vs. 22
  misc_feature: MA Experiment 20000327 PARAMETER Experiment Name: At_42deg_Heat_Sub_P Parameter: Timepoint (hr) Value: 1
  misc_feature: MA Experiment 20000327 PARAMETER Experiment Name: At_42deg_Heat_Sub_P Parameter: Tissue Value: Aerial
atgagaaagaaagtaagtagtagtggtgacgaaggaaacaatgagtacaagaaaggtttgtggacagtagaagaagacaaaatcctcatggattatgtcaaagctcatggcaaaggtcactggaatcgtattgccaaaaagactggtttaaagagatgtggaaagagttgtagattgaggtggatgaattatctcagccctaatgtgaaaagaggcaatttcaccgagcaagaagaggatcttatcattaggctccacaagttgcttggtaataggtggtctttaattgctaaaagagtgccgggtcgaacggataatcaagtgaagaactattggaacacgcatcttagtaagaaactcggaatcaaagatcagaaaaccaaacagagcaatggtgatattgtttatcaaatcaatctcccgaatcctaccgaaacatcagaagaaacgaaaatctcgaatattgtcgataacaataatatcctcggagatgaaattcaagaagatcatcaaggaagtaactacttgagttcactttgggttcatgaggatgagtttgagcttagcacactcaccaacatgatggactttatagatggacactgtttttgatgtgttttctgcttttgttattttagtattcgtttatgttttgttattttcaaagctgatcaaacactaatacatcaacagtcttagattaaaagttgttgatgtggtagtgtatgattggctaagtctattaattaggtgaactttcttgggttaactctaatgtatatgcttaaaaactctatatgcatcgattantgttttaaaaaaaaaaaaaaaaaaaaaaaaaaaaaaaaaatcgatgtcgactcgagtcggg

SEQ ID NO: 82951 - protein, 203 aa, Arabidopsis thaliana
  peptide (1)..(203): Ceres Seq. ID no. 12668021
  misc_feature (18)..(65): Pfam Name: Myb-like DNA-binding domain Pfam Description: Myb-like DNA-binding domain
  misc_feature (1)..(203): Homolog of NCBI NO: 15241488 NR Description: myb family transcription factor; protein id: [Arabidopsis thaliana] >gi|11273997|pir||T51420 myb transcription
  misc_feature (8)..(199): Homolog of NCBI NO: 20514371 NR Description: werewolf [Cucumis sativus]
  misc_feature (76)..(203): Homolog of NCBI NO: 11358553 NR Description: myb-related transcription factor MYB66 [imported] Arabidopsis thaliana (fragment) >gi|3941492|gb|AAC83622.1|
  misc_feature (10)..(127): Homolog of NCBI NO: 15242649 NR Description: myb-related protein; protein id: At5g40330.1
  misc_feature (4)..(158): Homolog of NCBI NO: 68888 NR Description: trichome differentiation protein GL1 - thaliana >gi|166780|gb|AAC97387.1| GL1 [Arabidopsis thaliana] glabrous 1 [Arabidopsis thaliana]
  misc_feature (4)..(158): Homolog of NCBI NO: 15529344 NR Description: glabrous 1 [Arabidopsis thaliana]
  misc_feature (4)..(158): Homolog of NCBI NO: 438453 NR Description: GL1 mutant [Arabidopsis thaliana]
  misc_feature (4)..(158): Homolog of NCBI NO: 9367650 NR Description: Glabrous 1 [Arabidopsis thaliana]
  misc_feature (4)..(158): Homolog of NCBI NO: 15529304 NR Description: glabrous 1 [Arabidopsis thaliana]
  misc_feature (4)..(158): Homolog of NCBI NO: 15232860 NR Description: MYB family transcription factor (GL1); protein At3g27920.1, supported by cDNA: gi_20162512 [Arabidopsis >gi|17865662|sp|P27900|GL1_ARATH Trichome differentiation protein
MRKKVSSSGDEGNNEYKKGLWTVEEDKILMDYVKAHGKGHWNRIAKKTGLKRCGKSCRLRWMNYLSPNVKRGNFTEQEEDLIIRLHKLLGNRWSLIAKRVPGRTDNQVKNYWNTHLSKKLGIKDQKTKQSNGDIVYQINLPNPTETSEETKISNIVDNNNILGDEIQEDHQGSNYLSSLWVHEDEFELSTLTNMMDFIDGHCF

SEQ ID NO: 82952 - protein, 174 aa, Arabidopsis thaliana
  peptide (1)..(174): Ceres Seq. ID no. 12668022
  misc_feature (1)..(36): Pfam Name: Myb-like DNA-binding domain Pfam Description: Myb-like DNA-binding domain
  misc_feature (1)..(174): Homolog of NCBI NO: 15241488 NR Description: myb family transcription factor; protein id: [Arabidopsis thaliana] >gi|11273997|pir||T51420 myb transcription
  misc_feature (1)..(170): Homolog of NCBI NO: 20514371 NR Description: werewolf [Cucumis sativus]
  misc_feature (47)..(174): Homolog of NCBI NO: 11358553 NR Description: myb-related transcription factor MYB66 [imported] Arabidopsis thaliana (fragment) >gi|3941492|gb|AAC83622.1|
  misc_feature (1)..(98): Homolog of NCBI NO: 15242649 NR Description: myb-related protein; protein id: At5g40330.1
  misc_feature (1)..(129): Homolog of NCBI NO: 68888 NR Description: trichome differentiation protein GL1 - thaliana >gi|166780|gb|AAC97387.1| GL1 [Arabidopsis thaliana] glabrous 1 [Arabidopsis thaliana]
  misc_feature (1)..(129): Homolog of NCBI NO: 15529344 NR Description: glabrous 1 [Arabidopsis thaliana]
  misc_feature (1)..(129): Homolog of NCBI NO: 438453 NR Description: GL1 mutant [Arabidopsis thaliana]
  misc_feature (1)..(129): Homolog of NCBI NO: 15529304 NR Description: glabrous 1 [Arabidopsis thaliana]
  misc_feature (1)..(129): Homolog of NCBI NO: 15232860 NR Description: MYB family transcription factor (GL1); protein At3g27920.1, supported by cDNA: gi_20162512 [Arabidopsis >gi|17865662|sp|P27900|GL1_ARATH Trichome differentiation protein
  misc_feature (1)..(129): Homolog of NCBI NO: 9367650 NR Description: Glabrous 1 [Arabidopsis thaliana]
MDYVKAHGKGHWNRIAKKTGLKRCGKSCRLRWMNYLSPNVKRGNFTEQEEDLIIRLHKLLGNRWSLIAKRVPGRTDNQVKNYWNTHLSKKLGIKDQKTKQSNGDIVYQINLPNPTETSEETKISNIVDNNNILGDEIQEDHQGSNYLSSLWVHEDEFELSTLTNMMDFIDGHCF

SEQ ID NO: 82953 - protein, 142 aa, Arabidopsis thaliana
  peptide (1)..(142): Ceres Seq. ID no. 12668023
  misc_feature (1)..(142): Homolog of NCBI NO: 15241488 NR Description: myb family transcription factor; protein id: [Arabidopsis thaliana] >gi|11273997|pir||T51420 myb transcription
  misc_feature (1)..(138): Homolog of NCBI NO: 20514371 NR Description: werewolf [Cucumis sativus]
  misc_feature (15)..(142): Homolog of NCBI NO: 11358553 NR Description: myb-related transcription factor MYB66 [imported] Arabidopsis thaliana (fragment) >gi|3941492|gb|AAC83622.1|
  misc_feature (1)..(66): Homolog of NCBI NO: 15242649 NR Description: myb-related protein; protein id: At5g40330.1
  misc_feature (1)..(97): Homolog of NCBI NO: 68888 NR Description: trichome differentiation protein GL1 - thaliana >gi|166780|gb|AAC97387.1| GL1 [Arabidopsis thaliana] glabrous 1 [Arabidopsis thaliana]
  misc_feature (1)..(97): Homolog of NCBI NO: 15529344 NR Description: glabrous 1 [Arabidopsis thaliana]
  misc_feature (1)..(97): Homolog of NCBI NO: 438453 NR Description: GL1 mutant [Arabidopsis thaliana]
  misc_feature (1)..(97): Homolog of NCBI NO: 15232860 NR Description: MYB family transcription factor (GL1); protein At3g27920.1, supported by cDNA: gi_20162512 [Arabidopsis >gi|17865662|sp|P27900|GL1_ARATH Trichome differentiation protein
  misc_feature (1)..(97): Homolog of NCBI NO: 9367650 NR Description: Glabrous 1 [Arabidopsis thaliana]
  misc_feature (1)..(97): Homolog of NCBI NO: 15529304 NR Description: glabrous 1 [Arabidopsis thaliana]
MNYLSPNVKRGNFTEQEEDLIIRLHKLLGNRWSLIAKRVPGRTDNQVKNYWNTHLSKKLGIKDQKTKQSNGDIVYQINLPNPTETSEETKISNIVDNNNILGDEIQEDHQGSNYLSSLWVHEDEFELSTLTNMMDFIDGHCF

SEQ ID NO: 82954 - DNA, 1119 bp, Arabidopsis thaliana
  misc_feature (1)..(1119): Ceres Seq. ID no. 12668032
  misc_feature: MA Experiment ID: 20000437 Result: Up-regulated in Transcription
  misc_feature: MA Experiment 20000437 PARAMETER Experiment Name: At_Drought_P Parameter: Age (day) Value: 8
  misc_feature: MA Experiment 20000437 PARAMETER Experiment Name: At_Drought_P Parameter: Organism Value: A. thaliana
  misc_feature: MA Experiment 20000437 PARAMETER Experiment Name: At_Drought_P Parameter: Plant Line Value: WS
  misc_feature: MA Experiment 20000437 PARAMETER Experiment Name: At_Drought_P Parameter: Timepoint (hr) Value: 24
  misc_feature: MA Experiment 20000437 PARAMETER Experiment Name: At_Drought_P Parameter: Tissue Value: Whole Plant
  misc_feature: MA Experiment 20000437 PARAMETER Experiment Name: At_Drought_P Parameter: Treatment Value: Drought vs. No Drought
acccaccccacccaggttatggattctctcgctctcgctccccaggtttacagccgcaaggacaaatctctcggcgttcttgtcgccaatttcttgacactgtataatcgtcccgatgttgatctatttgggctcgatgatgccgccgcgaaattaggagttgaacgtcggcgtatttatgatgtggtcaatatattggagagtattgggcttgttgcaagaagtgggaagaatcagtattcgtggaaaggttttggagctgttcctcgtgctctatctgaactcaaagaagagggaatgaaagagaagtttgcgatcgtcccttttgtggccaagtcagagatggtcgtttatgagaaagaaggagaagaatctttcatgttatctcctgatgatcaagagttctcaccatctcccagacctgacaacaggaaggagagaactctctggctacttgcacagaactttgtgaagctgtttttatgctctgatgatgatctggtaacatttgatagcgctacaaaagcattgctgaatgagtctcaggatatgaatatgagaaagaaagttagacgcctttacgacattgcaaatgtgttttcctcaatgaagctaatcgagaagactcatgtcccagagactaagaagccggcatataggtggttgggatctaaaaccatatttgaaaacagattcattgatggttctgcaagcttatgtgatcgtaatgtgcctaaaaagcgggcatttgggaccgaactcacaaacgttaacgcaaagagaaacaaatcaggttgttctaaagaagacagcaagcgtaatggaaatcaaaacacaagcattgttatcaagcaagaacaatgtgatgatgtgaaaccggacgtgaagaattttgcctctggatcatccactcctgcaggcacttctgagagtaacgatatgggaaacaacattaggccaagaggtagacttggagttatcgaagccctttctactctttaccaaccatcatattgcaatcctgagttacttggtctttttgcgcattacaacgagacatttaggtcatatcaagaagagtttggtcgggagaaatgacttaatcatcaggtagattaa

SEQ ID NO: 82955 - protein, 365 aa, Arabidopsis thaliana
  peptide (1)..(365): Ceres Seq. ID no. 12668033
  misc_feature (18)..(87): Pfam Name: Transcription factor E2F/dimerisation partner (TDP) Pfam Description: Transcription factor E2F/dimerisation partner
  misc_feature (7)..(365): Homolog of NCBI NO: 15242176 NR Description: DP-E2F-like 2; protein id: At5g14960.1, supported cDNA: gi_20502503 [Arabidopsis thaliana] >gi|11289607|pir||T51441
  misc_feature (8)..(365): Homolog of NCBI NO: 22330789 NR Description: DP-E2F-like protein 3; protein id: At3g01330.1, by cDNA: gi_20260249, supported by cDNA: gi_20502505 [Arabidopsis >gi|20260250|gb|AAM13023.1| unknown protein [Arabidopsis
  misc_feature (8)..(340): Homolog of NCBI NO: 6094551 NR Description: hypothetical protein [Arabidopsis thaliana]
  misc_feature (1)..(364): Homolog of NCBI NO: 22331664 NR Description: DP-E2F-like protein 1; protein id: At3g48160.1,
  misc_feature (1)..(347): Homolog of NCBI NO: 30692988 NR Description: DP-E2F-related protein 1 [Arabidopsis thaliana]
  misc_feature (8)..(200): Homolog of NCBI NO: 19578317 NR Description: transcription factor E2Ff [Arabidopsis thaliana]
  misc_feature (42)..(347): Homolog of NCBI NO: 7487385 NR Description: hypothetical protein T24C20.40 - Arabidopsis >gi|5541722|emb|CAB51063.1| putative protein [Arabidopsis
  misc_feature (18)..(215): Homolog of NCBI NO: 29741773 NR Description: similar to Transcription factor E2F dimerisation
  misc_feature (18)..(215): Homolog of NCBI NO: 26334515 NR Description: unnamed protein product [Mus musculus]
  misc_feature (18)..(215): Homolog of NCBI NO: 40254337 NR Description: E2F transcription factor 7 [Mus musculus]
THPTQVMDSLALAPQVYSRKDKSLGVLVANFLTLYNRPDVDLFGLDDAAAKLGVERRRIYDVVNILESIGLVARSGKNQYSWKGFGAVPRALSELKEEGMKEKFAIVPFVAKSEMVVYEKEGEESFMLSPDDQEFSPSPRPDNRKERTLWLLAQNFVKLFLCSDDDLVTFDSATKALLNESQDMNMRKKVRRLYDIANVFSSMKLIEKTHVPETKKPAYRWLGSKTIFENRFIDGSASLCDRNVPKKRAFGTELTNVNAKRNKSGCSKEDSKRNGNQNTSIVIKQEQCDDVKPDVKNFASGSSTPAGTSESNDMGNNIRPRGRLGVIEALSTLYQPSYCNPELLGLFAHYNETFRSYQEEFGREK

SEQ ID NO: 82956 - protein, 359 aa, Arabidopsis thaliana
  peptide (1)..(359): Ceres Seq. ID no. 12668034
  misc_feature (12)..(81): Pfam Name: Transcription factor E2F/dimerisation partner (TDP) Pfam Description: Transcription factor E2F/dimerisation partner
  misc_feature (1)..(359): Homolog of NCBI NO: 15242176 NR Description: DP-E2F-like 2; protein id: At5g14960.1, supported cDNA: gi_20502503 [Arabidopsis thaliana] >gi|11289607|pir||T51441
  misc_feature (2)..(359): Homolog of NCBI NO: 22330789 NR Description: DP-E2F-like protein 3; protein id: At3g01330.1, by cDNA: gi_20260249, supported by cDNA: gi_20502505 [Arabidopsis >gi|20260250|gb|AAM13023.1| unknown protein [Arabidopsis
  misc_feature (2)..(334): Homolog of NCBI NO: 6094551 NR Description: hypothetical protein [Arabidopsis thaliana]
  misc_feature (1)..(358): Homolog of NCBI NO: 22331664 NR Description: DP-E2F-like protein 1; protein id: At3g48160.1,
  misc_feature (1)..(341): Homolog of NCBI NO: 30692988 NR Description: DP-E2F-related protein 1 [Arabidopsis thaliana]
  misc_feature (2)..(194): Homolog of NCBI NO: 19578317 NR Description: transcription factor E2Ff [Arabidopsis thaliana]
  misc_feature (36)..(341): Homolog of NCBI NO: 7487385 NR Description: hypothetical protein T24C20.40 - Arabidopsis >gi|5541722|emb|CAB51063.1| putative protein [Arabidopsis
  misc_feature (12)..(209): Homolog of NCBI NO: 29741773 NR Description: similar to Transcription factor E2F dimerisation
  misc_feature (12)..(209): Homolog of NCBI NO: 26334515 NR Description: unnamed protein product [Mus musculus]
  misc_feature (12)..(209): Homolog of NCBI NO: 40254337 NR Description: E2F transcription factor 7 [Mus musculus]
MDSLALAPQVYSRKDKSLGVLVANFLTLYNRPDVDLFGLDDAAAKLGVERRRIYDVVNILESIGLVARSGKNQYSWKGFGAVPRALSELKEEGMKEKFAIVPFVAKSEMVVYEKEGEESFMLSPDDQEFSPSPRPDNRKERTLWLLAQNFVKLFLCSDDDLVTFDSATKALLNESQDMNMRKKVRRLYDIANVFSSMKLIEKTHVPETKKPAYRWLGSKTIFENRFIDGSASLCDRNVPKKRAFGTELTNVNAKRNKSGCSKEDSKRNGNQNTSIVIKQEQCDDVKPDVKNFASGSSTPAGTSESNDMGNNIRPRGRLGVIEALSTLYQPSYCNPELLGLFAHYNETFRSYQEEFGREK

SEQ ID NO: 82957 - protein, 266 aa, Arabidopsis thaliana
  peptide (1)..(266): Ceres Seq. ID no. 12668035
  misc_feature (1)..(266): Homolog of NCBI NO: 15242176 NR Description: DP-E2F-like 2; protein id: At5g14960.1, supported cDNA: gi_20502503 [Arabidopsis thaliana] >gi|11289607|pir||T51441
  misc_feature (1)..(266): Homolog of NCBI NO: 22330789 NR Description: DP-E2F-like protein 3; protein id: At3g01330.1, by cDNA: gi_20260249, supported by cDNA: gi_20502505 [Arabidopsis >gi|20260250|gb|AAM13023.1| unknown protein [Arabidopsis
  misc_feature (1)..(241): Homolog of NCBI NO: 6094551 NR Description: hypothetical protein [Arabidopsis thaliana]
  misc_feature (1)..(265): Homolog of NCBI NO: 22331664 NR Description: DP-E2F-like protein 1; protein id: At3g48160.1,
  misc_feature (1)..(248): Homolog of NCBI NO: 30692988 NR Description: DP-E2F-related protein 1 [Arabidopsis thaliana]
  misc_feature (1)..(101): Homolog of NCBI NO: 19578317 NR Description: transcription factor E2Ff [Arabidopsis thaliana]
  misc_feature (1)..(248): Homolog of NCBI NO: 7487385 NR Description: hypothetical protein T24C20.40 - Arabidopsis >gi|5541722|emb|CAB51063.1| putative protein [Arabidopsis
  misc_feature (1)..(116): Homolog of NCBI NO: 29741773 NR Description: similar to Transcription factor E2F dimerisation
  misc_feature (1)..(116): Homolog of NCBI NO: 26334515 NR Description: unnamed protein product [Mus musculus]
  misc_feature (1)..(116): Homolog of NCBI NO: 40254337 NR Description: E2F transcription factor 7 [Mus musculus]
MKEKFAIVPFVAKSEMVVYEKEGEESFMLSPDDQEFSPSPRPDNRKERTLWLLAQNFVKLFLCSDDDLVTFDSATKALLNESQDMNMRKKVRRLYDIANVFSSMKLIEKTHVPETKKPAYRWLGSKTIFENRFIDGSASLCDRNVPKKRAFGTELTNVNAKRNKSGCSKEDSKRNGNQNTSIVIKQEQCDDVKPDVKNFASGSSTPAGTSESNDMGNNIRPRGRLGVIEALSTLYQPSYCNPELLGLFAHYNETFRSYQEEFGREK

SEQ ID NO: 82958 - DNA, 984 bp, Arabidopsis thaliana
  misc_feature (1)..(984): Ceres Seq. ID no. 12668036
atgggactccatccagtctcagaggccaacgcctcaagcccctttggttccctctctgcggctgaattctactcccgccactccgtcacccactcctccgcttacgtcaccaaccccaccggtctcaaactctttacccaatggtggactccactcaaccgtccaccactcggcctcattgctgttgtccacggcttcaccggcgaatccagctggttcctccaactaacatcagtcctcttcgcaaaatccggatacctcacttgcgccatcgaccaccaaggccacggcttctcagacggtttgaccgctcacatcccaaacatcaacctcattgttgacgactgcatttccttctttgacgacttccgtaaacgtcacgcttcctcctttctcccggccttcctctactctgaatcccttggtggcgcaatcgctctgtacattactctccgccagaaacaccaatggaacggtcttatcctcagcggtgcaatgtgctccatcagtcacaaatttaaacctccatggccgttacaacacctcttaaccctagctgctactctcatccccacctggcgcgtcgtcccaactcgcggctccatcgccggcgtctctttcaaggagccatggaaacggaaactcgcctatgctaacccaaacagaaccgtcggtaaaccacgagcagccacggcctatgagctcgtacgagtctgcgaggatcttcaaaacaggtttgaagaagttgaagtcccgttgatgattgtgcacggtagagacgacgtcgtctgcgatccagcctccgtcgaagagctttaccggagatgcagtagcagagacaagacgataaagatttatccagggatgtggcatcagctgattggagagtcagaggagaacgtcgacttggtgttcggtgatgttttggattggattaagacacgatctgaaatctccaccattcatggtggtaccaaagcttaa

SEQ ID NO: 82959 - protein, 327 aa, Arabidopsis thaliana
  peptide (1)..(327): Ceres Seq. ID no. 12668037
  misc_feature (91)..(305): Pfam Name: alpha/beta hydrolase fold Pfam Description: alpha/beta hydrolase fold
  misc_feature (1)..(327): Homolog of NCBI NO: 15242179 NR Description: lysophospholipase -like protein; protein id:
  misc_feature (1)..(317): Homolog of NCBI NO: 15239709 NR Description: phospholipase - like protein; protein id: supported by cDNA: 253499., supported by cDNA: gi_17380667 thaliana] >gi|17380668|gb|AAL36164.1| putative phospholipase
  misc_feature (4)..(316): Homolog of NCBI NO: 34894634 NR Description: P0028G04.16 [Oryza sativa (japonica
  misc_feature (15)..(315): Homolog of NCBI NO: 15220284 NR Description: lysophospholipase isolog; protein id: At1g11090.1
  misc_feature (21)..(315): Homolog of NCBI NO: 34899776 NR Description: putative lysophospholipase isolog [Oryza sativa
  misc_feature (29)..(317): Homolog of NCBI NO: 30687879 NR Description: hydrolase, alpha/beta fold family [Arabidopsis >gi|20197113|gb|AAC27832.2| putative phospholipase; alternative
  misc_feature (34)..(317): Homolog of NCBI NO: 7487947 NR Description: lysophospholipase homolog F12L6.7 - Arabidopsis
  misc_feature (28)..(312): Homolog of NCBI NO: 7487948 NR Description: lysophospholipase homolog F12L6.8 - Arabidopsis >gi|3355471|gb|AAC27833.1| putative phospholipase [Arabidopsis >gi|13877687|gb|AAK43921.1|AF370602_1 putative phospholipase
  misc_feature (28)..(312): Homolog of NCBI NO: 30687883 NR Description: esterase/lipase/thioesterase family [Arabidopsis >gi|19423964|gb|AAL87258.1| putative phospholipase [Arabidopsis >gi|21689759|gb|AAM67523.1| putative phospholipase [Arabidopsis
  misc_feature (31)..(316): Homolog of NCBI NO: 30695682 NR Description: esterase/lipase/thioesterase family [Arabidopsis
MGLHPVSEANASSPFGSLSAAEFYSRHSVTHSSAYVTNPTGLKLFTQWWTPLNRPPLGLIAVVHGFTGESSWFLQLTSVLFAKSGYLTCAIDHQGHGFSDGLTAHIPNINLIVDDCISFFDDFRKRHASSFLPAFLYSESLGGAIALYITLRQKHQWNGLILSGAMCSISHKFKPPWPLQHLLTLAATLIPTWRVVPTRGSIAGVSFKEPWKRKLAYANPNRTVGKPRAATAYELVRVCEDLQNRFEEVEVPLMIVHGRDDVVCDPASVEELYRRCSSRDKTIKIYPGMWHQLIGESEENVDLVFGDVLDWIKTRSEISTIHGGTKA

SEQ ID NO: 82960 - DNA, 1599 bp, Arabidopsis thaliana
  misc_feature (1)..(1599): Ceres Seq. ID no. 12668038
  misc_feature: MA Experiment ID: 20000227 Result: Up-regulated in Transcription
  misc_feature: MA Experiment 20000227 PARAMETER Experiment Name: At_Root-Tips-vs-Tops_P Parameter: Tissue Value: Root Tips vs. Root Tops
atggaacctcccgtagcttgtgtgcttcctttaggtctgtgttctatgttctctacttccatagctgattcagagcaagtgggatttactcggagtaacattgagaaagatgatgagagtgacattgatcttggttgtagtataagtgatgagcttgtttcagaggatgttggaaagatttcgaagctggtgaaagattgtgggagtgaccggaaggaactgaggaacaagcttgaggaatgtgatgtgaagccatcaaatgaattggtggtggagattctttctcgagttcgtaatgattgggaaactgctttcactttctttgtttgggcagggaagcagcaaggttatgttcgttctgttcgtgagtatcactctatgatctcgattcttggtaaaatgaggaagtttgatacagcttggactttgattgatgagatgagaaagtttagcccttctcttgtgaactcacagacacttttgatcatgattaggaagtattgtgcggtacatgatgttgggaaagccataaacacgttccatgcctacaaaagattcaaacttgaaatggggattgatgattttcagagtttgctctcggctctttgtaggtataagaatgtttcagatgctgggcatttgatcttctgtaacaaggataagtatccgtttgacgccaaaagtttcaacattgttctcaatggatggtgtaacgtgattggtagcccacgggaggctgaaagggtctggatggagatgggaaatgttggagtcaaacatgatgttgtgtcttattcaagcatgatatcttgctattcgaaaggtggtagcttgaataaggttctcaaactttttgataggatgaagaaagagtgtatagagcctgatagaaaagtgtacaacgcggtggttcacgctcttgccaaagctagctttgtctccgaggcgagaaatttaatgaagacaatggaggaggagaaagggattgagcccaatgttgttacttacaactctctcatcaaacctctatgcaaggctagaaaaaccgaagaggctaaacaggttttcgatgagatgctggagaaaggactcttcccaacaatccgtacatatcatgcgtttatgcggattctaagaacaggagaggaggtttttgagctattagctaaaatgagaaagatgggctgtgaaccaactgtggagacatacataatgctgatccgtaagttatgtaggtggcgcgatttcgataatgtgttattgttgtgggatgagatgaaggaaaagaccgttggtccagaccttagctcatacattgtgatgatacatggtctgttcttgaatggtaagatagaagaagcgtatgggtactataaagagatgaaggacaagggtatgagaccaaatgaaaatgttgaagatatgattcaaagctggttttcaggaaaacagtatgcagagcagcggataacagattcgaaaggggaggtcaataaaggagctattgtaaaaaaatctgaaagagaaaagaactttctccagcagcctgaggtgagaaaggttgttagagagcatggatattcgttttgggatgaatag

SEQ ID NO: 82961 - protein, 532 aa, Arabidopsis thaliana
  peptide (1)..(532): Ceres Seq. ID no. 12668039
  misc_feature (401)..(435): Pfam Name: PPR repeat Pfam Description: PPR repeat
  misc_feature (1)..(532): Homolog of NCBI NO: 15242190 NR Description: putative protein; protein id: At5g15010.1
  misc_feature (124)..(473): Homolog of NCBI NO: 37806221 NR Description: pentatricopeptide (PPR) repeat-containing
  misc_feature (78)..(477): Homolog of NCBI NO: 15220863 NR Description: hypothetical protein; protein id: At1g80880.1
  misc_feature (50)..(476): Homolog of NCBI NO: 15232517 NR Description: hypothetical protein; protein id: At3g15200.1 thaliana] >gi|11994509|dbj|BAB02574.1|
  misc_feature (57)..(478): Homolog of NCBI NO: 34895880 NR Description: P0009G03.20 [Oryza sativa (japonica
  misc_feature (50)..(466): Homolog of NCBI NO: 15239161 NR Description: putative protein; protein id: At5g65820.1
  misc_feature (49)..(469): Homolog of NCBI NO: 15223926 NR Description: hypothetical protein; protein id: At1g77360.1
  misc_feature (50)..(466): Homolog of NCBI NO: 15229604 NR Description: putative protein; protein id: At3g49730.1
  misc_feature (55)..(490): Homolog of NCBI NO: 15228825 NR Description: hypothetical protein; protein id: At3g22670.1 thaliana] >gi|9279685|dbj|BAB01242.1|
  misc_feature (40)..(468): Homolog of NCBI NO: 15223927 NR Description: hypothetical protein; protein id: At1g71060.1
MEPPVACVLPLGLCSMFSTSIADSEQVGFTRSNIEKDDESDIDLGCSISDELVSEDVGKISKLVKDCGSDRKELRNKLEECDVKPSNELVVEILSRVRNDWETAFTFFVWAGKQQGYVRSVREYHSMISILGKMRKFDTAWTLIDEMRKFSPSLVNSQTLLIMIRKYCAVHDVGKAINTFHAYKRFKLEMGIDDFQSLLSALCRYKNVSDAGHLIFCNKDKYPFDAKSFNIVLNGWCNVIGSPREAERVWMEMGNVGVKHDVVSYSSMISCYSKGGSLNKVLKLFDRMKKECIEPDRKVYNAVVHALAKASFVSEARNLMKTMEEEKGIEPNVVTYNSLIKPLCKARKTEEAKQVFDEMLEKGLFPTIRTYHAFMRILRTGEEVFELLAKMRKMGCEPTVETYIMLIRKLCRWRDFDNVLLLWDEMKEKTVGPDLSSYIVMIHGLFLNGKIEEAYGYYKEMKDKGMRPNENVEDMIQSWFSGKQYAEQRITDSKGEVNKGAIVKKSEREKNFLQQPEVRKVVREHGYSFWDE

SEQ ID NO: 82962 - protein, 517 aa, Arabidopsis thaliana
  peptide (1)..(517): Ceres Seq. ID no. 12668040
  misc_feature (386)..(420): Pfam Name: PPR repeat Pfam Description: PPR repeat
  misc_feature (1)..(517): Homolog of NCBI NO: 15242190 NR Description: putative protein; protein id: At5g15010.1
  misc_feature (109)..(458): Homolog of NCBI NO: 37806221 NR Description: pentatricopeptide (PPR) repeat-containing
  misc_feature (63)..(462): Homolog of NCBI NO: 15220863 NR Description: hypothetical protein; protein id: At1g80880.1
  misc_feature (35)..(461): Homolog of NCBI NO: 15232517 NR Description: hypothetical protein; protein id: At3g15200.1 thaliana] >gi|11994509|dbj|BAB02574.1|
  misc_feature (42)..(463): Homolog of NCBI NO: 34895880 NR Description: P0009G03.20 [Oryza sativa (japonica
  misc_feature (35)..(451): Homolog of NCBI NO: 15239161 NR Description: putative protein; protein id: At5g65820.1
  misc_feature (34)..(454): Homolog of NCBI NO: 15223926 NR Description: hypothetical protein; protein id: At1g77360.1
  misc_feature (35)..(451): Homolog of NCBI NO: 15229604 NR Description: putative protein; protein id: At3g49730.1
  misc_feature (40)..(475): Homolog of NCBI NO: 15228825 NR Description: hypothetical protein; protein id: At3g22670.1 thaliana] >gi|9279685|dbj|BAB01242.1|
  misc_feature (25)..(453): Homolog of NCBI NO: 15223927 NR Description: hypothetical protein; protein id: At1g71060.1
MFSTSIADSEQVGFTRSNIEKDDESDIDLGCSISDELVSEDVGKISKLVKDCGSDRKELRNKLEECDVKPSNELVVEILSRVRNDWETAFTFFVWAGKQQGYVRSVREYHSMISILGKMRKFDTAWTLIDEMRKFSPSLVNSQTLLIMIRKYCAVHDVGKAINTFHAYKRFKLEMGIDDFQSLLSALCRYKNVSDAGHLIFCNKDKYPFDAKSFNIVLNGWCNVIGSPREAERVWMEMGNVGVKHDVVSYSSMISCYSKGGSLNKVLKLFDRMKKECIEPDRKVYNAVVHALAKASFVSEARNLMKTMEEEKGIEPNVVTYNSLIKPLCKARKTEEAKQVFDEMLEKGLFPTIRTYHAFMRILRTGEEVFELLAKMRKMGCEPTVETYIMLIRKLCRWRDFDNVLLLWDEMKEKTVGPDLSSYIVMIHGLFLNGKIEEAYGYYKEMKDKGMRPNENVEDMIQSWFSGKQYAEQRITDSKGEVNKGAIVKKSEREKNFLQQPEVRKVVREHGYSFWDE

SEQ ID NO: 82963 - protein, 406 aa, Arabidopsis thaliana
  peptide (1)..(406): Ceres Seq. ID no. 12668041
  misc_feature (275)..(309): Pfam Name: PPR repeat Pfam Description: PPR repeat
  misc_feature (1)..(406): Homolog of NCBI NO: 15242190 NR Description: putative protein; protein id: At5g15010.1
  misc_feature (1)..(347): Homolog of NCBI NO: 37806221 NR Description: pentatricopeptide (PPR) repeat-containing
  misc_feature (1)..(351): Homolog of NCBI NO: 15220863 NR Description: hypothetical protein; protein id: At1g80880.1
  misc_feature (1)..(350): Homolog of NCBI NO: 15232517 NR Description: hypothetical protein; protein id: At3g15200.1 thaliana] >gi|11994509|dbj|BAB02574.1|
  misc_feature (1)..(352): Homolog of NCBI NO: 34895880 NR Description: P0009G03.20 [Oryza sativa (japonica
  misc_feature (1)..(340): Homolog of NCBI NO: 15239161 NR Description: putative protein; protein id: At5g65820.1
  misc_feature (1)..(343): Homolog of NCBI NO: 15223926 NR Description: hypothetical protein; protein id: At1g77360.1
  misc_feature (1)..(340): Homolog of NCBI NO: 15229604 NR Description: putative protein; protein id: At3g49730.1
  misc_feature (1)..(364): Homolog of NCBI NO: 15228825 NR Description: hypothetical protein; protein id: At3g22670.1 thaliana] >gi|9279685|dbj|BAB01242.1|
  misc_feature (1)..(342): Homolog of NCBI NO: 15223927 NR Description: hypothetical protein; protein id: At1g71060.1
MISILGKMRKFDTAWTLIDEMRKFSPSLVNSQTLLIMIRKYCAVHDVGKAINTFHAYKRFKLEMGIDDFQSLLSALCRYKNVSDAGHLIFCNKDKYPFDAKSFNIVLNGWCNVIGSPREAERVWMEMGNVGVKHDVVSYSSMISCYSKGGSLNKVLKLFDRMKKECIEPDRKVYNAVVHALAKASFVSEARNLMKTMEEEKGIEPNVVTYNSLIKPLCKARKTEEAKQVFDEMLEKGLFPTIRTYHAFMRILRTGEEVFELLAKMRKMGCEPTVETYIMLIRKLCRWRDFDNVLLLWDEMKEKTVGPDLSSYIVMIHGLFLNGKIEEAYGYYKEMKDKGMRPNENVEDMIQSWFSGKQYAEQRITDSKGEVNKGAIVKKSEREKNFLQQPEVRKVVREHGYSFWDE

SEQ ID NO: 82964 - DNA, 882 bp, Arabidopsis thaliana
  misc_feature (1)..(882): Ceres Seq. ID no. 12668058
  misc_feature: MA Experiment ID: 20000173 Result: Up-regulated in Transcription
  misc_feature: MA Experiment 20000173 PARAMETER Experiment Name: At_42deg_Heat_P Parameter: Age (day) Value: 14
  misc_feature: MA Experiment 20000173 PARAMETER Experiment Name: At_42deg_Heat_P Parameter: Organism Value: A. thaliana
  misc_feature: MA Experiment 20000173 PARAMETER Experiment Name: At_42deg_Heat_P Parameter: Plant Line Value: WS
  misc_feature: MA Experiment 20000173 PARAMETER Experiment Name: At_42deg_Heat_P Parameter: Temperature (deg C) Value: 42 vs. 22
  misc_feature: MA Experiment 20000173 PARAMETER Experiment Name: At_42deg_Heat_P Parameter: Timepoint (hr) Value: 6
  misc_feature: MA Experiment 20000173 PARAMETER Experiment Name: At_42deg_Heat_P Parameter: Tissue Value: Aerial
  misc_feature: MA Experiment ID: 20000234 Result: Up-regulated in Transcription
  misc_feature: MA Experiment 20000234 PARAMETER Experiment Name: At_Siliques_P Parameter: Age (day) Value: 21
  misc_feature: MA Experiment 20000234 PARAMETER Experiment Name: At_Siliques_P Parameter: Organism Value: A. thaliana
  misc_feature: MA Experiment 20000234 PARAMETER Experiment Name: At_Siliques_P Parameter: Plant Line Value: WS
  misc_feature: MA Experiment 20000234 PARAMETER Experiment Name: At_Siliques_P Parameter: Tissue Value: Less Than 5mm Siliques vs. Whole Plant
  misc_feature: MA Experiment ID: 20000264 Result: Up-regulated in Transcription
  misc_feature: MA Experiment 20000264 PARAMETER Experiment Name: At_Open_Flower_P Parameter: Age (day) Value: 21
  misc_feature: MA Experiment 20000264 PARAMETER Experiment Name: At_Open_Flower_P Parameter: Plant Line Value: WS
  misc_feature: MA Experiment 20000264 PARAMETER Experiment Name: At_Open_Flower_P Parameter: Tissue Value: Open Flower vs. Whole Plant
  misc_feature: MA Experiment ID: 20000286 Result: Up-regulated in Transcription
  misc_feature: MA Experiment 20000286 PARAMETER Experiment Name: At_Open_Flower_P Parameter: Age (day) Value: 21
  misc_feature: MA Experiment 20000286 PARAMETER Experiment Name: At_Open_Flower_P Parameter: Plant Line Value: WS
  misc_feature: MA Experiment 20000286 PARAMETER Experiment Name: At_Open_Flower_P Parameter: Tissue Value: Half Open vs. Whole Plant
  misc_feature: MA Experiment ID: 20000437 Result: Up-regulated in Transcription
  misc_feature: MA Experiment 20000437 PARAMETER Experiment Name: At_Drought_P Parameter: Age (day) Value: 8
  misc_feature: MA Experiment 20000437 PARAMETER Experiment Name: At_Drought_P Parameter: Organism Value: A. thaliana
  misc_feature: MA Experiment 20000437 PARAMETER Experiment Name: At_Drought_P Parameter: Plant Line Value: WS
  misc_feature: MA Experiment 20000437 PARAMETER Experiment Name: At_Drought_P Parameter: Timepoint (hr) Value: 24
  misc_feature: MA Experiment 20000437 PARAMETER Experiment Name: At_Drought_P Parameter: Tissue Value: Whole Plant
  misc_feature: MA Experiment 20000437 PARAMETER Experiment Name: At_Drought_P Parameter: Treatment Value: Drought vs. No Drought
  misc_feature: MA Experiment ID: 20000451 Result: Up-regulated in Transcription
  misc_feature: MA Experiment 20000451 PARAMETER Experiment Name: At_CS6879_Shoots-Roots_P Parameter: Age (day) Value: 14
  misc_feature: MA Experiment 20000451 PARAMETER Experiment Name: At_CS6879_Shoots-Roots_P Parameter: Organism Value: A. thaliana
  misc_feature: MA Experiment 20000451 PARAMETER Experiment Name: At_CS6879_Shoots-Roots_P Parameter: Plant Line Value: CS6879 vs. WS
  misc_feature: MA Experiment 20000451 PARAMETER Experiment Name: At_CS6879_Shoots-Roots_P Parameter: Tissue Value: Roots
  misc_feature: MA Experiment ID: 20000794 Result: Up-regulated in Transcription
  misc_feature: MA Experiment 20000794 PARAMETER Experiment Name: At_Petals_P Parameter: Age (day) Value: 23-25 days
  misc_feature: MA Experiment 20000794 PARAMETER Experiment Name: At_Petals_P Parameter: Plant Line Value: WS
  misc_feature: MA Experiment 20000794 PARAMETER Experiment Name: At_Petals_P Parameter: Tissue Value: Petals vs. Whole plant
  misc_feature: MA Experiment ID: 20001451 Result: Up-regulated in Transcription
  misc_feature: MA Experiment 20001451 PARAMETER Experiment Name: At_Far-red-induction_P Parameter: Age (day) Value: 7
  misc_feature: MA Experiment 20001451 PARAMETER Experiment Name: At_Far-red-induction_P Parameter: Light Value: Far-red vs. White
  misc_feature: MA Experiment 20001451 PARAMETER Experiment Name: At_Far-red-induction_P Parameter: Organism Value: A. thaliana
  misc_feature: MA Experiment 20001451 PARAMETER Experiment Name: At_Far-red-induction_P Parameter: Plant Line Value: Columbia
  misc_feature: MA Experiment 20001451 PARAMETER Experiment Name: At_Far-red-induction_P Parameter: Timepoint (hr) Value: 24
  misc_feature: MA Experiment 20001451 PARAMETER Experiment Name: At_Far-red-induction_P Parameter: Tissue Value: Whole Plant
  misc_feature: MA Experiment ID: 20001906 Result: Up-regulated in Transcription
  misc_feature: MA Experiment 20001906 PARAMETER Experiment Name: At_Drought_Reproduction_P Parameter: Age (day) Value: 35
  misc_feature: MA Experiment 20001906 PARAMETER Experiment Name: At_Drought_Reproduction_P Parameter: Organism Value: A. thaliana
  misc_feature: MA Experiment 20001906 PARAMETER Experiment Name: At_Drought_Reproduction_P Parameter: Plant Line Value: WS
  misc_feature: MA Experiment 20001906 PARAMETER Experiment Name: At_Drought_Reproduction_P Parameter: Timepoint (day) Value: 5
  misc_feature: MA Experiment 20001906 PARAMETER Experiment Name: At_Drought_Reproduction_P Parameter: Tissue Value: Siliques
  misc_feature: MA Experiment 20001906 PARAMETER Experiment Name: At_Drought_Reproduction_P Parameter: Treatment Value: Drought vs. No Drought
  misc_feature: MA Experiment ID: 20001907 Result: Up-regulated in Transcription
  misc_feature: MA Experiment 20001907 PARAMETER Experiment Name: At_Drought_Reproduction_P Parameter: Age (day) Value: 37
  misc_feature: MA Experiment 20001907 PARAMETER Experiment Name: At_Drought_Reproduction_P Parameter: Organism Value: A. thaliana
  misc_feature: MA Experiment 20001907 PARAMETER Experiment Name: At_Drought_Reproduction_P Parameter: Plant Line Value: WS
  misc_feature: MA Experiment 20001907 PARAMETER Experiment Name: At_Drought_Reproduction_P Parameter: Timepoint (day) Value: 7
  misc_feature: MA Experiment 20001907 PARAMETER Experiment Name: At_Drought_Reproduction_P Parameter: Tissue Value: Siliques
  misc_feature: MA Experiment 20001907 PARAMETER Experiment Name: At_Drought_Reproduction_P Parameter: Treatment Value: Drought vs. No Drought
  misc_feature: MA Experiment ID: 20001911 Result: Up-regulated in Transcription
  misc_feature: MA Experiment 20001911 PARAMETER Experiment Name: At_Drought_Reproduction_P Parameter: Age (day) Value: 40
  misc_feature: MA Experiment 20001911 PARAMETER Experiment Name: At_Drought_Reproduction_P Parameter: Organism Value: A. thaliana
  misc_feature: MA Experiment 20001911 PARAMETER Experiment Name: At_Drought_Reproduction_P Parameter: Plant Line Value: WS
  misc_feature: MA Experiment 20001911 PARAMETER Experiment Name: At_Drought_Reproduction_P Parameter: Timepoint (day) Value: 10
  misc_feature: MA Experiment 20001911 PARAMETER Experiment Name: At_Drought_Reproduction_P Parameter: Tissue Value: Flowers
  misc_feature: MA Experiment 20001911 PARAMETER Experiment Name: At_Drought_Reproduction_P Parameter: Treatment Value: Drought vs. No Drought
atggggtttgagatgaaaccagagaaagaggttttggaattgatttctagtaagaatcaatgcaagtctaatcccaattctgtgaagaagaagaacaaaaacaagaataagaagatgatgatgacgtggcgacggaagaagattgattccccggcggatgggatcacggcggtgcggcggttgtttaatacttgcaaggaagtgttctctaatggtggtcctggtgttattccttctgaagataaaatccaacagctacgagagattcttgacgatatgaaaccagaggatgtcggtttaactccgaccatgccgtatttccgaccaaactccggagtcgaagctcggtcttcgccaccaataacgtatctgcatctacaccagtgtgatcaattctcgattgggattttctgtttgccaccttctggtgttattcctcttcataaccatccagggatgacagtttttagtaagcttctctttggtacaatgcacatcaagtcatatgattgggtggttgatgctccaatgagagattcaaaaaccaggctagcgaaattgaaggtggattcaacattcaccgcgccatgtaacgcctcgattttgtacccggaagatggcgggaacatgcatcggttcacagctataacagcatgtgcggtgctagacgtgctaggacctccttactgcaatccagaaggcagacattgcacttatttcctagaattccctttagacaaactctcatcagaggacgacgacgttttgagcagtgaagaggagaaggaaggttatgcatggctgcaagaaagggatgataatccagaagatcatactaacgtagttggagcgttatacagaggcccaaaggttgaagattga

SEQ ID NO: 82965 - protein, 293 aa, Arabidopsis thaliana
  peptide (1)..(293): Ceres Seq. ID no. 12668059
  misc_feature (1)..(293): Homolog of NCBI NO: 15242218 NR Description: putative protein; protein id: At5g15120.1
  misc_feature (18)..(293): Homolog of NCBI NO: 10176982 NR Description: contains similarity to unknown
  misc_feature (18)..(293): Homolog of NCBI NO: 15242505 NR Description: putative protein; protein id: At5g39890.1, by cDNA: 100590. [Arabidopsis thaliana] unknown [Arabidopsis thaliana] >gi|27808558|gb|AAO24559.1|
  misc_feature (57)..(293): Homolog of NCBI NO: 34906308 NR Description: unnamed protein product [Oryza sativa (japonica group)] >gi|9558428|dbj|BAB03364.1| unnamed protein product
  misc_feature (59)..(291): Homolog of NCBI NO: 18406030 NR Description: expressed protein; protein id: At2g42670.1, by cDNA: 113423. [Arabidopsis thaliana] expressed protein [Arabidopsis thaliana]
  misc_feature (58)..(291): Homolog of NCBI NO: 15231104 NR Description: putative protein; protein id: At3g58670.1, by cDNA: 114412., supported by cDNA: gi_15293012 [Arabidopsis
  misc_feature (59)..(291): Homolog of NCBI NO: 25370572 NR Description: hypothetical protein At2g42670 [imported] -
  misc_feature (59)..(291): Homolog of NCBI NO: 21536850 NR Description: unknown [Arabidopsis thaliana]
  misc_feature (42)..(291): Homolog of NCBI NO: 29244630 NR Description: hypothetical protein [Oryza sativa (japonica
  misc_feature (58)..(291): Homolog of NCBI NO: 38345647 NR Description: OSJNBb0040D15.1 [Oryza sativa (japonica
MGFEMKPEKEVLELISSKNQCKSNPNSVKKKNKNKNKKMMMTWRRKKIDSPADGITAVRRLFNTCKEVFSNGGPGVIPSEDKIQQLREILDDMKPEDVGLTPTMPYFRPNSGVEARSSPPITYLHLHQCDQFSIGIFCLPPSGVIPLHNHPGMTVFSKLLFGTMHIKSYDWVVDAPMRDSKTRLAKLKVDSTFTAPCNASILYPEDGGNMHRFTAITACAVLDVLGPPYCNPEGRHCTYFLEFPLDKLSSEDDDVLSSEEEKEGYAWLQERDDNPEDHTNVVGALYRGPKVED

SEQ ID NO: 82966 - protein, 289 aa, Arabidopsis thaliana
  peptide (1)..(289): Ceres Seq. ID no. 12668060
  misc_feature (1)..(289): Homolog of NCBI NO: 15242218 NR Description: putative protein; protein id: At5g15120.1
  misc_feature (14)..(289): Homolog of NCBI NO: 10176982 NR Description: contains similarity to unknown
  misc_feature (14)..(289): Homolog of NCBI NO: 15242505 NR Description: putative protein; protein id: At5g39890.1, by cDNA: 100590. [Arabidopsis thaliana] unknown [Arabidopsis thaliana] >gi|27808558|gb|AAO24559.1|
  misc_feature (53)..(289): Homolog of NCBI NO: 34906308 NR Description: unnamed protein product [Oryza sativa (japonica group)] >gi|9558428|dbj|BAB03364.1| unnamed protein product
  misc_feature (55)..(287): Homolog of NCBI NO: 18406030 NR Description: expressed protein; protein id: At2g42670.1, by cDNA: 113423. [Arabidopsis thaliana] expressed protein [Arabidopsis thaliana]
  misc_feature (54)..(287): Homolog of NCBI NO: 15231104 NR Description: putative protein; protein id: At3g58670.1, by cDNA: 114412., supported by cDNA: gi_15293012 [Arabidopsis
  misc_feature (55)..(287): Homolog of NCBI NO: 25370572 NR Description: hypothetical protein At2g42670 [imported] -
  misc_feature (55)..(287): Homolog of NCBI NO: 21536850 NR Description: unknown [Arabidopsis thaliana]
  misc_feature (38)..(287): Homolog of NCBI NO: 29244630 NR Description: hypothetical protein [Oryza sativa (japonica
  misc_feature (54)..(287): Homolog of NCBI NO: 38345647 NR Description: OSJNBb0040D15.1 [Oryza sativa (japonica
MKPEKEVLELISSKNQCKSNPNSVKKKNKNKNKKMMMTWRRKKIDSPADGITAVRRLFNTCKEVFSNGGPGVIPSEDKIQQLREILDDMKPEDVGLTPTMPYFRPNSGVEARSSPPITYLHLHQCDQFSIGIFCLPPSGVIPLHNHPGMTVFSKLLFGTMHIKSYDWVVDAPMRDSKTRLAKLKVDSTFTAPCNASILYPEDGGNMHRFTAITACAVLDVLGPPYCNPEGRHCTYFLEFPLDKLSSEDDDVLSSEEEKEGYAWLQERDDNPEDHTNVVGALYRGPKVED

SEQ ID NO: 82967 - protein, 255 aa, Arabidopsis thaliana
  peptide (1)..(255): Ceres Seq. ID no. 12668061
  misc_feature (1)..(255): Homolog of NCBI NO: 15242218 NR Description: putative protein; protein id: At5g15120.1
  misc_feature (1)..(255): Homolog of NCBI NO: 10176982 NR Description: contains similarity to unknown
  misc_feature (1)..(255): Homolog of NCBI NO: 15242505 NR Description: putative protein; protein id: At5g39890.1, by cDNA: 100590. [Arabidopsis thaliana] unknown [Arabidopsis thaliana] >gi|27808558|gb|AAO24559.1|
  misc_feature (19)..(255): Homolog of NCBI NO: 34906308 NR Description: unnamed protein product [Oryza sativa (japonica group)] >gi|9558428|dbj|BAB03364.1| unnamed protein product
  misc_feature (21)..(253): Homolog of NCBI NO: 18406030 NR Description: expressed protein; protein id: At2g42670.1, by cDNA: 113423. [Arabidopsis thaliana] expressed protein [Arabidopsis thaliana]
  misc_feature (20)..(253): Homolog of NCBI NO: 15231104 NR Description: putative protein; protein id: At3g58670.1, by cDNA: 114412., supported by cDNA: gi_15293012 [Arabidopsis
  misc_feature (21)..(253): Homolog of NCBI NO: 25370572 NR Description: hypothetical protein At2g42670 [imported] -
  misc_feature (21)..(253): Homolog of NCBI NO: 21536850 NR Description: unknown [Arabidopsis thaliana]
  misc_feature (4)..(253): Homolog of NCBI NO: 29244630 NR Description: hypothetical protein [Oryza sativa (japonica
  misc_feature (20)..(253): Homolog of NCBI NO: 38345647 NR Description: OSJNBb0040D15.1 [Oryza sativa (japonica
MMMTWRRKKIDSPADGITAVRRLFNTCKEVFSNGGPGVIPSEDKIQQLREILDDMKPEDVGLTPTMPYFRPNSGVEARSSPPITYLHLHQCDQFSIGIFCLPPSGVIPLHNHPGMTVFSKLLFGTMHIKSYDWVVDAPMRDSKTRLAKLKVDSTFTAPCNASILYPEDGGNMHRFTAITACAVLDVLGPPYCNPEGRHCTYFLEFPLDKLSSEDDDVLSSEEEKEGYAWLQERDDNPEDHTNVVGALYRGPKVED

SEQ ID NO: 82968 - DNA, 1182 bp, Arabidopsis thaliana
  misc_feature (1)..(1182): Ceres Seq. ID no. 12668070
  misc_feature: MA Experiment ID: 20001760 Result: Up-regulated in Transcription
  misc_feature: MA Experiment 20001760 PARAMETER Experiment Name: At_50mM_NH4NO3_L-to-H_P Parameter: Timepoint (hr) Value: 2
  misc_feature: MA Experiment 20001760 PARAMETER Experiment Name: At_50mM_NH4NO3_L-to-H_P Parameter: Tissue Value: Siliques
  misc_feature: MA Experiment 20001760 PARAMETER Experiment Name: At_50mM_NH4NO3_L-to-H_P Parameter: Treatment Value: 50mM NH4NO3 vs 100mM Mannitol
atggagccaactaacgatgctgagacattggaaactcaaggagaggttacaaccgctatttggccgtcatctcaaatcctcaagacgactatcgatattccggggactctcagccatgacggcagatacatccagtacaatctatttgggcatatctttgaactccccgcaaagtataagccaccgattaggcctattggcagaggtgcttgtggcatcgtttgttcggctgtggactccgagaccaatgagaaggtagcaataaagaaaataacgcaagtatttgataacactatcgaagcaaagagaactcttcgtgaaatcaagcttcttcgtcacttcgatcatgagaatattgttgcaatcagagacgtaatcttgcctcctcagagagattcattcgaagatgtttacattgtgaatgaattgatggagtttgacctttatcgaaccttaaaatcagatcaagaactaaccaaagatcatggcatgtatttcatgtaccaaatcctgcgcggattaaagtacattcattcagccaatgtgctacacagagatctaaaaccaagcaatctcctcttgagtacacaatgtgacttaaagatttgtgatttcgggctcgctcgtgcaactcctgagagtaatttaatgactgagtatgttgtcacaagatggtaccgtgcacctgagcttctgttgggctcttctgactataccgcagcaatagatgtttggtctgttggctgtattttcatggaaataatgaaccgtgaaccgctcttcccggggaaagatcaagttaatcagcttcgtttgcttctggagctcattggcactccatctgaagaagagcttggatcgttgagtgaatacgctaagcgatacataaggcagcttcctacgcttcctcgccaatctttcactgagaaattcccgaacgtgcctcccttagcaatagacttggtggagaagatgctaacatttgatcctaaacagagaatctcagttaaagaagcacttgctcatccataccttagctcgtttcacgacattaccgatgaaccagagtgctcagagcccttcaatttcgatttagatgaacatccattctctgaggagcagtttagagagttaatctactgtgaagccctagctttcaaccctgaaaccagcaatgattga

SEQ ID NO: 82969 - protein, 393 aa, Arabidopsis thaliana
  peptide (1)..(393): Ceres Seq. ID no. 12668071
  misc_feature (63)..(345): Pfam Name: Protein kinase domain Pfam Description: Protein kinase domain
  misc_feature (1)..(393): Homolog of NCBI NO: 15231753 NR Description: mitogen-activated protein kinase-like protein;
  misc_feature (2)..(389): Homolog of NCBI NO: 15224359 NR Description: MAP kinase (ATMPK6); protein id: At2g43790.1,
  misc_feature (22)..(389): Homolog of NCBI NO: 2499615 NR Description: MITOGEN-ACTIVATED PROTEIN KINASE HOMOLOG NTF4
  misc_feature (22)..(389): Homolog of NCBI NO: 30962145 NR Description: Mitogen-activated protein kinase [Lycopersicon
  misc_feature (22)..(389): Homolog of NCBI NO: 21165523 NR Description: mitogen-activated protein kinase [Solanum
  misc_feature (22)..(389): Homolog of NCBI NO: 30171839 NR Description: mitogen-activated protein kinase 1 [Lycopersicon
  misc_feature (32)..(389): Homolog of NCBI NO: 7649153 NR Description: mitogen-activated protein kinase [Euphorbia esula]
  misc_feature (22)..(389): Homolog of NCBI NO: 25052802 NR Description: mitogen-activated protein kinase 6 [Petroselinum
  misc_feature (22)..(389): Homolog of NCBI NO: 585454 NR Description: MITOGEN-ACTIVATED PROTEIN KINASE HOMOLOG D5
  misc_feature (32)..(389): Homolog of NCBI NO: 585519 NR Description: MITOGEN-ACTIVATED PROTEIN KINASE HOMOLOG MMK1
MEPTNDAETLETQGEVTTAIWPSSQILKTTIDIPGTLSHDGRYIQYNLFGHIFELPAKYKPPIRPIGRGACGIVCSAVDSETNEKVAIKKITQVFDNTIEAKRTLREIKLLRHFDHENIVAIRDVILPPQRDSFEDVYIVNELMEFDLYRTLKSDQELTKDHGMYFMYQILRGLKYIHSANVLHRDLKPSNLLLSTQCDLKICDFGLARATPESNLMTEYVVTRWYRAPELLLGSSDYTAAIDVWSVGCIFMEIMNREPLFPGKDQVNQLRLLLELIGTPSEEELGSLSEYAKRYIRQLPTLPRQSFTEKFPNVPPLAIDLVEKMLTFDPKQRISVKEALAHPYLSSFHDITDEPECSEPFNFDLDEHPFSEEQFRELIYCEALAFNPETSND

SEQ ID NO: 82970 - protein, 250 aa, Arabidopsis thaliana
  peptide (1)..(250): Ceres Seq. ID no. 12668072
  misc_feature (1)..(202): Pfam Name: Protein kinase domain Pfam Description: Protein kinase domain
  misc_feature (1)..(250): Homolog of NCBI NO: 15231753 NR Description: mitogen-activated protein kinase-like protein;
  misc_feature (1)..(246): Homolog of NCBI NO: 15224359 NR Description: MAP kinase (ATMPK6); protein id: At2g43790.1,
  misc_feature (1)..(246): Homolog of NCBI NO: 2499615 NR Description: MITOGEN-ACTIVATED PROTEIN KINASE HOMOLOG NTF4
  misc_feature (1)..(246): Homolog of NCBI NO: 30962145 NR Description: Mitogen-activated protein kinase [Lycopersicon
  misc_feature (1)..(246): Homolog of NCBI NO: 21165523 NR Description: mitogen-activated protein kinase [Solanum
  misc_feature (1)..(246): Homolog of NCBI NO: 30171839 NR Description: mitogen-activated protein kinase 1 [Lycopersicon
  misc_feature (1)..(246): Homolog of NCBI NO: 7649153 NR Description: mitogen-activated protein kinase [Euphorbia esula]
  misc_feature (1)..(246): Homolog of NCBI NO: 25052802 NR Description: mitogen-activated protein kinase 6 [Petroselinum
  misc_feature (1)..(246): Homolog of NCBI NO: 585454 NR Description: MITOGEN-ACTIVATED PROTEIN KINASE HOMOLOG D5
  misc_feature (1)..(246): Homolog of NCBI NO: 585519 NR Description: MITOGEN-ACTIVATED PROTEIN KINASE HOMOLOG MMK1
MEFDLYRTLKSDQELTKDHGMYFMYQILRGLKYIHSANVLHRDLKPSNLLLSTQCDLKICDFGLARATPESNLMTEYVVTRWYRAPELLLGSSDYTAAIDVWSVGCIFMEIMNREPLFPGKDQVNQLRLLLELIGTPSEEELGSLSEYAKRYIRQLPTLPRQSFTEKFPNVPPLAIDLVEKMLTFDPKQRISVKEALAHPYLSSFHDITDEPECSEPFNFDLDEHPFSEEQFRELIYCEALAFNPETSND

SEQ ID NO: 82971 - protein, 230 aa, Arabidopsis thaliana
  peptide (1)..(230): Ceres Seq. ID no. 12668073
  misc_feature (1)..(182): Pfam Name: Protein kinase domain Pfam Description: Protein kinase domain
  misc_feature (1)..(230): Homolog of NCBI NO: 15231753 NR Description: mitogen-activated protein kinase-like protein;
  misc_feature (1)..(226): Homolog of NCBI NO: 15224359 NR Description: MAP kinase (ATMPK6); protein id: At2g43790.1,
  misc_feature (1)..(226): Homolog of NCBI NO: 2499615 NR Description: MITOGEN-ACTIVATED PROTEIN KINASE HOMOLOG NTF4
  misc_feature (1)..(226): Homolog of NCBI NO: 30962145 NR Description: Mitogen-activated protein kinase [Lycopersicon
  misc_feature (1)..(226): Homolog of NCBI NO: 21165523 NR Description: mitogen-activated protein kinase [Solanum
  misc_feature (1)..(226): Homolog of NCBI NO: 30171839 NR Description: mitogen-activated protein kinase 1 [Lycopersicon
  misc_feature (1)..(226): Homolog of NCBI NO: 7649153 NR Description: mitogen-activated protein kinase [Euphorbia esula]
  misc_feature (1)..(226): Homolog of NCBI NO: 25052802 NR Description: mitogen-activated protein kinase 6 [Petroselinum
  misc_feature (1)..(226): Homolog of NCBI NO: 585454 NR Description: MITOGEN-ACTIVATED PROTEIN KINASE HOMOLOG D5
  misc_feature (1)..(226): Homolog of NCBI NO: 585519 NR Description: MITOGEN-ACTIVATED PROTEIN KINASE HOMOLOG MMK1
MYFMYQILRGLKYIHSANVLHRDLKPSNLLLSTQCDLKICDFGLARATPESNLMTEYVVTRWYRAPELLLGSSDYTAAIDVWSVGCIFMEIMNREPLFPGKDQVNQLRLLLELIGTPSEEELGSLSEYAKRYIRQLPTLPRQSFTEKFPNVPPLAIDLVEKMLTFDPKQRISVKEALAHPYLSSFHDITDEPECSEPFNFDLDEHPFSEEQFRELIYCEALAFNPETSND

SEQ ID NO: 82972 - DNA, 1431 bp, Arabidopsis thaliana
  misc_feature (1)..(1431): Ceres Seq. ID no. 12668078
  misc_feature: MA Experiment ID: 20000440 Result: Up-regulated in Transcription
  misc_feature: MA Experiment 20000440 PARAMETER Experiment Name: At_Closed-Flower__Sub_P Parameter: Tissue Value: Closed Flower vs. Whole Plant
atggacaacattgccgcgcagttgaagcgtgggatatcgagacaattctcgacaggatcaatgagacgaacattaagccgacaattcacgcgccaaaattctctcgatccacggcgtaacaacatgagattcagcttcggtcgtcaatcttcgcttgatccgatcagacgtagtcctgagtctcttagctgcgagccgcatatgtctgtccccgagaatcttgattcgacgatgcagcttctctttatggcgagtaaaggtgatgttaatggcgttgaggagctgcttaatgaaggaatagatgtgaatagcattgatcttgatggtcgtactgctcttcacattgcttcctgtgaaggtcattatgatgttgttaaggttcttcttagccggagagctaatatcgatgctcgtgatcgttggggtagtacggcggctgttgatgcaaagtattatgggaatgttgaagtttataatctcttgaaagctcgaggcgctaaagctccgaaaactagaaagactccaatgacggtagggaatccaaaagaagttcctgagtatgagcttaatccactcgagctgcaagtccgaaaagttgatggcatttcaaagggaacttatcaagttgctaaatggaatggcacgcgagtctcagtaaaaatattcgataaagatagctattcagatcctgaacgagtaaatgctttcacaaacgaattgactttgctagcaaaagctcggcatccaaatattgttcaatttgttggagccgtcactcaaaatctaccgatgatgattgtagttgagtgtaatccaaaaggtgatctaagtgtctatcttcaaaagaaaggtcgtctttctccttcaaaagctctgagatttgctcttgatattgctagaggaatgaactacctccatgaatgtaaaccagatccgatcatccactgcgagttaatgccaaaaaatattttgctagatagaggagggcaattgaagatctctggttttggtttgataaagttgtcaaagattggagaagacagtgcaaaagtagtgaaccacgaagctcaaatcgataagtcaaattactatatagcacccgaaatttacaaagatgaagtcttcgataaaagggctgatgtgcattcgtttggtgtcattttgtacgagttgaccgagggagtatctttattccatcctaaaccacctgaagaggttgcagaatcgatttgtatagaaggtaaaagaccaacaatcagaacaaagtcaaagagttaccctccggaattgaaagagttgattgaggaatgctggcatccagaaatcagtgtgaggccaatattctctgagattattattcggctcgacaagatagttacaaactgttccaagcagggttggtggaaagacacatttaagttcccttggtaa

SEQ ID NO: 82973 - protein, 476 aa, Arabidopsis thaliana
  peptide (1)..(476): Ceres Seq. ID no. 12668079
  misc_feature (1)..(476): Homolog of NCBI NO: 15232181 NR Description: putative protein; protein id: At3g59830.1
  misc_feature (1)..(476): Homolog of NCBI NO: 30689517 NR Description: protein kinase -related [Arabidopsis thaliana]
  misc_feature (1)..(476): Homolog of NCBI NO: 18700701 NR Description: ankyrin-kinase [Medicago truncatula]
  misc_feature (1)..(476): Homolog of NCBI NO: 25408910 NR Description: probable protein kinase [imported] - Arabidopsis >gi|6598341|gb|AAF18591.1| putative protein kinase [Arabidopsis
  misc_feature (1)..(476): Homolog of NCBI NO: 18700703 NR Description: putative ankyrin-kinase [Medicago sativa]
  misc_feature (1)..(476): Homolog of NCBI NO: 15225139 NR Description: putative protein kinase; protein id: At2g31800.1
  misc_feature (8)..(450): Homolog of NCBI NO: 34907560 NR Description: ankyrin-kinase -like protein [Oryza sativa
  misc_feature (216)..(476): Homolog of NCBI NO: 22652536 NR Description: ankyrin-kinase protein [Arabidopsis thaliana]
  misc_feature (195)..(476): Homolog of NCBI NO: 22652534 NR Description: ankyrin-kinase protein [Arabidopsis thaliana]
  misc_feature (43)..(469): Homolog of NCBI NO: 18415205 NR Description: protein kinase - like protein; protein id: supported by cDNA: 38712., supported by cDNA: gi_16648823 thaliana] >gi|16648824|gb|AAL25602.1| AT4g18950/F13C5_120
MDNIAAQLKRGISRQFSTGSMRRTLSRQFTRQNSLDPRRNNMRFSFGRQSSLDPIRRSPESLSCEPHMSVPENLDSTMQLLFMASKGDVNGVEELLNEGIDVNSIDLDGRTALHIASCEGHYDVVKVLLSRRANIDARDRWGSTAAVDAKYYGNVEVYNLLKARGAKAPKTRKTPMTVGNPKEVPEYELNPLELQVRKVDGISKGTYQVAKWNGTRVSVKIFDKDSYSDPERVNAFTNELTLLAKARHPNIVQFVGAVTQNLPMMIVVECNPKGDLSVYLQKKGRLSPSKALRFALDIARGMNYLHECKPDPIIHCELMPKNILLDRGGQLKISGFGLIKLSKIGEDSAKVVNHEAQIDKSNYYIAPEIYKDEVFDKRADVHSFGVILYELTEGVSLFHPKPPEEVAESICIEGKRPTIRTKSKSYPPELKELIEECWHPEISVRPIFSEIIIRLDKIVTNCSKQGWWKDTFKFPW

SEQ ID NO: 82974 - protein, 456 aa, Arabidopsis thaliana
  peptide (1)..(456): Ceres Seq. ID no. 12668080
  misc_feature (1)..(456): Homolog of NCBI NO: 15232181 NR Description: putative protein; protein id: At3g59830.1
  misc_feature (1)..(456): Homolog of NCBI NO: 30689517 NR Description: protein kinase -related [Arabidopsis thaliana]
  misc_feature (1)..(456): Homolog of NCBI NO: 18700701 NR Description: ankyrin-kinase [Medicago truncatula]
  misc_feature (1)..(456): Homolog of NCBI NO: 25408910 NR Description: probable protein kinase [imported] - Arabidopsis >gi|6598341|gb|AAF18591.1| putative protein kinase [Arabidopsis
  misc_feature (1)..(456): Homolog of NCBI NO: 18700703 NR Description: putative ankyrin-kinase [Medicago sativa]
  misc_feature (1)..(456): Homolog of NCBI NO: 15225139 NR Description: putative protein kinase; protein id: At2g31800.1
  misc_feature (1)..(430): Homolog of NCBI NO: 34907560 NR Description: ankyrin-kinase -like protein [Oryza sativa
  misc_feature (196)..(456): Homolog of NCBI NO: 22652536 NR Description: ankyrin-kinase protein [Arabidopsis thaliana]
  misc_feature (175)..(456): Homolog of NCBI NO: 22652534 NR Description: ankyrin-kinase protein [Arabidopsis thaliana]
  misc_feature (23)..(449): Homolog of NCBI NO: 18415205 NR Description: protein kinase - like protein; protein id: supported by cDNA: 38712., supported by cDNA: gi_16648823 thaliana] >gi|16648824|gb|AAL25602.1| AT4g18950/F13C5_120
MRRTLSRQFTRQNSLDPRRNNMRFSFGRQSSLDPIRRSPESLSCEPHMSVPENLDSTMQLLFMASKGDVNGVEELLNEGIDVNSIDLDGRTALHIASCEGHYDVVKVLLSRRANIDARDRWGSTAAVDAKYYGNVEVYNLLKARGAKAPKTRKTPMTVGNPKEVPEYELNPLELQVRKVDGISKGTYQVAKWNGTRVSVKIFDKDSYSDPERVNAFTNELTLLAKARHPNIVQFVGAVTQNLPMMIVVECNPKGDLSVYLQKKGRLSPSKALRFALDIARGMNYLHECKPDPIIHCELMPKNILLDRGGQLKISGFGLIKLSKIGEDSAKVVNHEAQIDKSNYYIAPEIYKDEVFDKRADVHSFGVILYELTEGVSLFHPKPPEEVAESICIEGKRPTIRTKSKSYPPELKELIEECWHPEISVRPIFSEIIIRLDKIVTNCSKQGWWKDTFKFPW

SEQ ID NO: 82975 - protein, 435 aa, Arabidopsis thaliana
  peptide (1)..(435): Ceres Seq. ID no. 12668081
  misc_feature (1)..(435): Homolog of NCBI NO: 15232181 NR Description: putative protein; protein id: At3g59830.1
  misc_feature (1)..(435): Homolog of NCBI NO: 30689517 NR Description: protein kinase -related [Arabidopsis thaliana]
  misc_feature (1)..(435): Homolog of NCBI NO: 18700701 NR Description: ankyrin-kinase [Medicago truncatula]
  misc_feature (1)..(435): Homolog of NCBI NO: 25408910 NR Description: probable protein kinase [imported] - Arabidopsis >gi|6598341|gb|AAF18591.1| putative protein kinase [Arabidopsis
  misc_feature (1)..(435): Homolog of NCBI NO: 18700703 NR Description: putative ankyrin-kinase [Medicago sativa]
  misc_feature (1)..(435): Homolog of NCBI NO: 15225139 NR Description: putative protein kinase; protein id: At2g31800.1
  misc_feature (1)..(409): Homolog of NCBI NO: 34907560 NR Description: ankyrin-kinase -like protein [Oryza sativa
  misc_feature (175)..(435): Homolog of NCBI NO: 22652536 NR Description: ankyrin-kinase protein [Arabidopsis thaliana]
  misc_feature (154)..(435): Homolog of NCBI NO: 22652534 NR Description: ankyrin-kinase protein [Arabidopsis thaliana]
  misc_feature (2)..(428): Homolog of NCBI NO: 18415205 NR Description: protein kinase - like protein; protein id: supported by cDNA: 38712., supported by cDNA: gi_16648823 thaliana] >gi|16648824|gb|AAL25602.1| AT4g18950/F13C5_120
MRFSFGRQSSLDPIRRSPESLSCEPHMSVPENLDSTMQLLFMASKGDVNGVEELLNEGIDVNSIDLDGRTALHIASCEGHYDVVKVLLSRRANIDARDRWGSTAAVDAKYYGNVEVYNLLKARGAKAPKTRKTPMTVGNPKEVPEYELNPLELQVRKVDGISKGTYQVAKWNGTRVSVKIFDKDSYSDPERVNAFTNELTLLAKARHPNIVQFVGAVTQNLPMMIVVECNPKGDLSVYLQKKGRLSPSKALRFALDIARGMNYLHECKPDPIIHCELMPKNILLDRGGQLKISGFGLIKLSKIGEDSAKVVNHEAQIDKSNYYIAPEIYKDEVFDKRADVHSFGVILYELTEGVSLFHPKPPEEVAESICIEGKRPTIRTKSKSYPPELKELIEECWHPEISVRPIFSEIIIRLDKIVTNCSKQGWWKDTFKFPW

SEQ ID NO: 82976 - DNA, 1335 bp, Arabidopsis thaliana
  misc_feature (1)..(1335): Ceres Seq. ID no. 12668082
  misc_feature: MA Experiment ID: 108434 Result: Up-regulated in Transcription
  misc_feature: MA Experiment 108434 PARAMETER Experiment Name: At_Root_Tips_cDNA_P Parameter: Tissue Value: Root Tips
  misc_feature: MA Experiment ID: 108461 Result: Up-regulated in Transcription
  misc_feature: MA Experiment 108461 PARAMETER Experiment Name: At_Germinating_Seeds_cDNA_P Parameter: Age (day) Value: 1 vs. 0
  misc_feature: MA Experiment 108461 PARAMETER Experiment Name: At_Germinating_Seeds_cDNA_P Parameter: Tissue Value: Germinating Seeds
  misc_feature: MA Experiment ID: 108463 Result: Up-regulated in Transcription
  misc_feature: MA Experiment 108463 PARAMETER Experiment Name: At_Germinating_Seeds_cDNA_P Parameter: Age (day) Value: 3 vs. 0
  misc_feature: MA Experiment 108463 PARAMETER Experiment Name: At_Germinating_Seeds_cDNA_P Parameter: Tissue Value: Germinating Seeds
  misc_feature: MA Experiment ID: 108464 Result: Up-regulated in Transcription
  misc_feature: MA Experiment 108464 PARAMETER Experiment Name: At_Germinating_Seeds_cDNA_P Parameter: Age (day) Value: 4 vs. 0
  misc_feature: MA Experiment 108464 PARAMETER Experiment Name: At_Germinating_Seeds_cDNA_P Parameter: Tissue Value: Germinating Seeds
  misc_feature: MA Experiment ID: 108569 Result: Up-regulated in Transcription
  misc_feature: MA Experiment 108569 PARAMETER Experiment Name: At_0.001%_MeJA__cDNA_P Parameter: Timepoint (hr) Value: 6
  misc_feature: MA Experiment 108569 PARAMETER Experiment Name: At_0.001%_MeJA__cDNA_P Parameter: Tissue Value: Aerial
  misc_feature: MA Experiment 108569 PARAMETER Experiment Name: At_0.001%_MeJA__cDNA_P Parameter: Treatment Value: 0.001% MeJA vs. No Treatment
  misc_feature: MA Experiment ID: 108573 Result: Up-regulated in Transcription
  misc_feature: MA Experiment 108573 PARAMETER Experiment Name: At_Drought_cDNA_P Parameter: Timepoint (hr) Value: 6
  misc_feature: MA Experiment 108573 PARAMETER Experiment Name: At_Drought_cDNA_P Parameter: Tissue Value: Aerial
  misc_feature: MA Experiment 108573 PARAMETER Experiment Name: At_Drought_cDNA_P Parameter: Treatment Value: Drought vs. No Drought
  misc_feature: MA Experiment ID: 108595 Result: Down-regulated in Transcription
  misc_feature: MA Experiment 108595 PARAMETER Experiment Name: At_Ler-pi_Ovule_cDNA_P Parameter: Plant Line Value: null
  misc_feature: MA Experiment ID: 20000087 Result: Down-regulated in Transcription
  misc_feature: MA Experiment 20000087 PARAMETER Experiment Name: At_100uM_ABA_Mutants_cDNA_P Parameter: Plant Line Value: WS
  misc_feature: MA Experiment 20000087 PARAMETER Experiment Name: At_100uM_ABA_Mutants_cDNA_P Parameter: Timepoint (hr) Value: 6
  misc_feature: MA Experiment 20000087 PARAMETER Experiment Name: At_100uM_ABA_Mutants_cDNA_P Parameter: Tissue Value: Aerial
  misc_feature: MA Experiment 20000087 PARAMETER Experiment Name: At_100uM_ABA_Mutants_cDNA_P Parameter: Treatment Value: 100uM ABA vs. No Treatment
  misc_feature: MA Experiment ID: 20000113 Result: Down-regulated in Transcription
  misc_feature: MA Experiment 20000113 PARAMETER Experiment Name: At_42deg_Heat_cDNA_P Parameter: Temperature (deg C) Value: 42 vs. 22
  misc_feature: MA Experiment 20000113 PARAMETER Experiment Name: At_42deg_Heat_cDNA_P Parameter: Timepoint (hr) Value: 8
  misc_feature: MA Experiment 20000113 PARAMETER Experiment Name: At_42deg_Heat_cDNA_P Parameter: Tissue Value: Aerial
  misc_feature: MA Experiment ID: 20000306 Result: Up-regulated in Transcription
  misc_feature: MA Experiment 20000306 PARAMETER Experiment Name: At_Germinating_Seeds_Sub_P Parameter: Age (hr) Value: 6 vs. 0
  misc_feature: MA Experiment 20000306 PARAMETER Experiment Name: At_Germinating_Seeds_Sub_P Parameter: Organism Value: A. thaliana
  misc_feature: MA Experiment 20000306 PARAMETER Experiment Name: At_Germinating_Seeds_Sub_P Parameter: Plant Line Value: WS
  misc_feature: MA Experiment 20000306 PARAMETER Experiment Name: At_Germinating_Seeds_Sub_P Parameter: Tissue Value: Germinating Seeds
  misc_feature: MA Experiment ID: 20000307 Result: Up-regulated in Transcription
  misc_feature: MA Experiment 20000307 PARAMETER Experiment Name: At_Germinating_Seeds_Sub_P Parameter: Age (hr) Value: 24 vs. 0
  misc_feature: MA Experiment 20000307 PARAMETER Experiment Name: At_Germinating_Seeds_Sub_P Parameter: Organism Value: A. thaliana
  misc_feature: MA Experiment 20000307 PARAMETER Experiment Name: At_Germinating_Seeds_Sub_P Parameter: Plant Line Value: WS
  misc_feature: MA Experiment 20000307 PARAMETER Experiment Name: At_Germinating_Seeds_Sub_P Parameter: Tissue Value: Germinating Seeds
atggatgaagagtacgaggttattgttctcggcaccggtctcaaggagtgtatcctcagcggtctcctttccgtcgatggtgtcaaggtgcttcacatggacaggaatgactactatggtggagaatcaacttcccttaatctcaatcagctttggaagaagttcaggggagaagagaaggctcctgagcatttaggcgctagccgggattacaatgttgacatgatgcctaagtttatgatgggaaatggcaagcttgttcgtacccttattcatacagatgttacaaagtatttgtccttcaaagctgttgatggaagctatgttttcgtcaaaggaaaggttcaaaaggtgccagctactcctatggaggccctgaaatcttctctcatgggcatatttgagaaacgtcgagccggcaagtttttcagttttgttcaagaatacgatgagaaggacccaaaaacacacgatggaatggatttgaccagagttacaacaaaggaactgattgcgaaatatggtcttgatggcaacactattgactttattggtcacgcagtggcacttcacacgaatgaccaacatctcgaccaacccgcctttgatactgtaatgagaatgaagctctatgcggaatctcttgcacgtttccaaggaacatctccatatatttatcctctctatgggttgggagaactaccccaggcatttgcacgacttagtgctgtctatggtggcacatatatgttgaacaaacctgagtgcaaggtagagtttgacgagggaggtaaggttattggtgtaacatctgagggagagactgctaaatgcaaaaagattgtgtgtgacccttcatacctgccgaacaaggttaggaagattggcagggttgctcgggccatcgccattatgagccacccgattccgaacaccaatgattctcactcagtgcaggtcatcataccccagaaacagttggcccgcaaatcggatatgtatgtcttctgttgttcgtactcccacaacgttgctcccaagggaaaattcattgcatttgtgtctacagatgcagagactgataaccctcaaaccgaactaaagcctggaactgatcttttgggtcctgttgatgagatattcttcgacatgtatgatagatacgagcctgtcaacgagccagagttggacaactgctttatttcaacgagctatgatgctacaacacactttgagacaactgttgcggatgtgttgaacatgtataccctaatcaccggaaagcaactggacctaagtgttgacctgagtgccgcaagtgctgcagaggaatga

SEQ ID NO: 82977 - protein, 444 aa, Arabidopsis thaliana; identical to SEQ ID NO: 26953
  peptide (1)..(444): Ceres Seq. ID no. 12668083
  misc_feature (1)..(438): Pfam Name: GDP dissociation inhibitor Pfam Description: GDP dissociation inhibitor
  misc_feature (1)..(444): Homolog of NCBI NO: 15232210 NR Description: Rab GDP dissociation inhibitor; protein id: supported by cDNA: gi_19698844, supported by cDNA: gi_2446980
  misc_feature (1)..(444): Homolog of NCBI NO: 15224814 NR Description: GDP dissociation inhibitor; protein id: supported by cDNA: 29536., supported by cDNA: gi_13605640, by cDNA: gi_15215777, supported by cDNA: gi_1655423, supported by
  misc_feature (1)..(444): Homolog of NCBI NO: 1550740 NR Description: GDP-associated inhibitor [Arabidopsis thaliana]
  misc_feature (1)..(444): Homolog of NCBI NO: 17473582 NR Description: GDP dissociation inhibitor [Arabidopsis thaliana]
  misc_feature (1)..(444): Homolog of NCBI NO: 21592535 NR Description: GDP dissociation inhibitor [Arabidopsis thaliana]
  misc_feature (1)..(444): Homolog of NCBI NO: 3175990 NR Description: GDP dissociation inhibitor [Cicer arietinum]
  misc_feature (1)..(444): Homolog of NCBI NO: 7489133 NR Description: GDP dissociation inhibitor - common tobacco
  misc_feature (1)..(444): Homolog of NCBI NO: 7489478 NR Description: GDP dissociation inhibitor protein - rice
  misc_feature (1)..(444): Homolog of NCBI NO: 7489479 NR Description: GDP dissociation inhibitor protein - rice
  misc_feature (1)..(444): Homolog of NCBI NO: 33146460 NR Description: putative GDP dissociation inhibitor [Oryza sativa

SEQ ID NO: 82978 - protein, 412 aa, Arabidopsis thaliana; identical to SEQ ID NO: 26954
  peptide (1)..(412): Ceres Seq. ID no. 12668084
  misc_feature (1)..(406): Pfam Name: GDP dissociation inhibitor Pfam Description: GDP dissociation inhibitor
  misc_feature (1)..(412): Homolog of NCBI NO: 15232210 NR Description: Rab GDP dissociation inhibitor; protein id: supported by cDNA: gi_19698844, supported by cDNA: gi_2446980
  misc_feature (1)..(412): Homolog of NCBI NO: 15224814 NR Description: GDP dissociation inhibitor; protein id: supported by cDNA: 29536., supported by cDNA: gi_13605640, by cDNA: gi_15215777, supported by cDNA: gi_1655423, supported by
  misc_feature (1)..(412): Homolog of NCBI NO: 1550740 NR Description: GDP-associated inhibitor [Arabidopsis thaliana]
  misc_feature (1)..(412): Homolog of NCBI NO: 17473582 NR Description: GDP dissociation inhibitor [Arabidopsis thaliana]
  misc_feature (1)..(412): Homolog of NCBI NO: 21592535 NR Description: GDP dissociation inhibitor [Arabidopsis thaliana]
  misc_feature (1)..(412): Homolog of NCBI NO: 3175990 NR Description: GDP dissociation inhibitor [Cicer arietinum]
  misc_feature (1)..(412): Homolog of NCBI NO: 7489133 NR Description: GDP dissociation inhibitor - common tobacco
  misc_feature (1)..(412): Homolog of NCBI NO: 7489478 NR Description: GDP dissociation inhibitor protein - rice
  misc_feature (1)..(412): Homolog of NCBI NO: 7489479 NR Description: GDP dissociation inhibitor protein - rice
  misc_feature (1)..(412): Homolog of NCBI NO: 33146460 NR Description: putative GDP dissociation inhibitor [Oryza sativa

SEQ ID NO: 82979 - protein, 370 aa, Arabidopsis thaliana; identical to SEQ ID NO: 26955
  peptide (1)..(370): Ceres Seq. ID no. 12668085
  misc_feature (1)..(364): Pfam Name: GDP dissociation inhibitor Pfam Description: GDP dissociation inhibitor
  misc_feature (1)..(370): Homolog of NCBI NO: 15232210 NR Description: Rab GDP dissociation inhibitor; protein id: supported by cDNA: gi_19698844, supported by cDNA: gi_2446980
  misc_feature (1)..(370): Homolog of NCBI NO: 15224814 NR Description: GDP dissociation inhibitor; protein id: supported by cDNA: 29536., supported by cDNA: gi_13605640, by cDNA: gi_15215777, supported by cDNA: gi_1655423, supported by
  misc_feature (1)..(370): Homolog of NCBI NO: 1550740 NR Description: GDP-associated inhibitor [Arabidopsis thaliana]
  misc_feature (1)..(370): Homolog of NCBI NO: 17473582 NR Description: GDP dissociation inhibitor [Arabidopsis thaliana]
  misc_feature (1)..(370): Homolog of NCBI NO: 21592535 NR Description: GDP dissociation inhibitor [Arabidopsis thaliana]
  misc_feature (1)..(370): Homolog of NCBI NO: 3175990 NR Description: GDP dissociation inhibitor [Cicer arietinum]
  misc_feature (1)..(370): Homolog of NCBI NO: 7489133 NR Description: GDP dissociation inhibitor - common tobacco
  misc_feature (1)..(370): Homolog of NCBI NO: 7489478 NR Description: GDP dissociation inhibitor protein - rice
  misc_feature (1)..(370): Homolog of NCBI NO: 7489479 NR Description: GDP dissociation inhibitor protein - rice
  misc_feature (1)..(370): Homolog of NCBI NO: 33146460 NR Description: putative GDP dissociation inhibitor [Oryza sativa

SEQ ID NO: 82980 - DNA, 1747 bp, Arabidopsis thaliana
  misc_feature (1)..(1747): Ceres Seq. ID no. 12668112
  misc_feature: MA Experiment ID: 20000214 Result: Down-regulated in Transcription
  misc_feature: MA Experiment 20000214 PARAMETER Experiment Name: At_4deg_Cold_P Parameter: Timepoint (hr) Value: 6
  misc_feature: MA Experiment ID: 20000527 Result: Down-regulated in Transcription
  misc_feature: MA Experiment 20000527 PARAMETER Experiment Name: At_10percent_PEG_P Parameter: Age (day) Value: 20
  misc_feature: MA Experiment 20000527 PARAMETER Experiment Name: At_10percent_PEG_P Parameter: Organism Value: A. thaliana
  misc_feature: MA Experiment 20000527 PARAMETER Experiment Name: At_10percent_PEG_P Parameter: Plant Line Value: WS
  misc_feature: MA Experiment 20000527 PARAMETER Experiment Name: At_10percent_PEG_P Parameter: Timepoint (day) Value: 20
  misc_feature: MA Experiment 20000527 PARAMETER Experiment Name: At_10percent_PEG_P Parameter: Tissue Value: Whole Plant
  misc_feature: MA Experiment 20000527 PARAMETER Experiment Name: At_10percent_PEG_P Parameter: Treatment Value: 10percent PEG vs. No Treatment
  misc_feature: MA Experiment ID: 20001554 Result: Down-regulated in Transcription
  misc_feature: MA Experiment 20001554 PARAMETER Experiment Name: At_Drought_Soil_Dry_P Parameter: Age (day) Value: 21
  misc_feature: MA Experiment 20001554 PARAMETER Experiment Name: At_Drought_Soil_Dry_P Parameter: Organism Value: A. thaliana
  misc_feature: MA Experiment 20001554 PARAMETER Experiment Name: At_Drought_Soil_Dry_P Parameter: Plant Line Value: WS
  misc_feature: MA Experiment 20001554 PARAMETER Experiment Name: At_Drought_Soil_Dry_P Parameter: Post Timepoint (hr) Value: None
  misc_feature: MA Experiment 20001554 PARAMETER Experiment Name: At_Drought_Soil_Dry_P Parameter: Post-Treatment Value: None
  misc_feature: MA Experiment 20001554 PARAMETER Experiment Name: At_Drought_Soil_Dry_P Parameter: Timepoint (day) Value: 7
  misc_feature: MA Experiment 20001554 PARAMETER Experiment Name: At_Drought_Soil_Dry_P Parameter: Treatment Value: Drought vs. No Drought
  misc_feature: MA Experiment ID: 20001555 Result: Down-regulated in Transcription
  misc_feature: MA Experiment 20001555 PARAMETER Experiment Name: At_Drought_Soil_Dry_P Parameter: Age (day) Value: 24
  misc_feature: MA Experiment 20001555 PARAMETER Experiment Name: At_Drought_Soil_Dry_P Parameter: Organism Value: A. thaliana
  misc_feature: MA Experiment 20001555 PARAMETER Experiment Name: At_Drought_Soil_Dry_P Parameter: Plant Line Value: WS
  misc_feature: MA Experiment 20001555 PARAMETER Experiment Name: At_Drought_Soil_Dry_P Parameter: Post Timepoint (hr) Value: None
  misc_feature: MA Experiment 20001555 PARAMETER Experiment Name: At_Drought_Soil_Dry_P Parameter: Post-Treatment Value: None
  misc_feature: MA Experiment 20001555 PARAMETER Experiment Name: At_Drought_Soil_Dry_P Parameter: Timepoint (day) Value: 10
  misc_feature: MA Experiment 20001555 PARAMETER Experiment Name: At_Drought_Soil_Dry_P Parameter: Treatment Value: Drought vs. No Drought
ataaaaacttaattagtttttacagaagaaaagaaaacaatgagaggtaaatttctaagtttactgttgctcattactttggcctgcattggagtttccgccaagaagcattccacaaggcctagattaagaagaaatgatttcccacaagatttcgtttttggatctgctacttctgcttatcagtgtgaaggagctgcacatgaagatggtagaggtccaagtatctgggactccttctctgaaaaattcccagaaaagataatggatggtagtaatgggtccattgcagatgattcttacaatctttacaaggaagatgtgaatttgctgcatcaaattggcttcgatgcttaccgattttcgatctcatggtcacggattttgcctcgtgggactctaaagggaggaatcaaccaggctggaattgaatattataacaacttgattaatcaacttatatctaaaggagtgaagccatttgtcacactctttcactgggacttaccagatgcactcgaaaatgcttacggtggcctccttggagatgaatttgtgaacgatttccgagactatgcagaactttgtttccagaagtttggagatagagtgaagcagtggacgacactaaacgagccatatacaatggtacatgaaggttatataacaggtcaaaaggcacctggaagatgttccaatttctataaacctgattgcttaggtggcgatgcagccacggagccttacatcgtcggccataacctcctccttgctcatggagttgccgtaaaagtatatagagaaaagtaccaggcaactcagaaaggtgaaattggtattgccttaaacacagcatggcactacccttattcagattcatatgctgaccggttagctgcgactcgagcgactgccttcaccttcgactacttcatggagccaatcgtgtacggtagatatccaattgaaatggtcagccacgttaaagacggtcgtcttcctaccttcacaccagaagagtccgaaatgctcaaaggatcatatgatttcataggcgttaactattactcatctctttacgcaaaagacgtgccgtgtgcaactgaaaacatcaccatgaccaccgattcttgcgtcagcctcgtaggtgaacgaaatggagtgcctatcggtccagcggctggatcggattggcttttgatatatcccaagggtattcgtgatctcctactacatgcaaaattcagatacaatgatcccgtcttgtacattacagagaatggagtggatgaagcaaatattggcaaaatatttcttaacgacgatttgagaattgattactatgctcatcacctcaagatggttagcgatgctatctcgatcggggtgaatgtgaagggatatttcgcgtggtcattgatggataatttcgagtggtcggaaggatacacggtccggttcgggctagtgtttgtggactttgaagatggacgtaagaggtatctgaagaaatcagctaagtggtttaggagattgttgaagggagcgcatggtgggacgaatgagcaggtggctgttatttaataaaccacgagtcattggtcaatttagtctactgtttcttttgctctatgtacagaaagaaaataaactttccaaaataagaggtggctttgtttggactttggatgttactatatatattggtaattcttggcgtttgttagtttccaaaccaaacattaat

SEQ ID NO: 82981 - protein, 514 aa, Arabidopsis thaliana
  peptide (1)..(514): Ceres Seq. ID no. 12668113
  misc_feature (1)..(514): Homolog of NCBI NO: 15232261 NR Description: glycosyl hydrolase family 1; protein id: supported by cDNA: gi_15028300, supported by cDNA: gi_21281078
  misc_feature (1)..(500): Homolog of NCBI NO: 15241543 NR Description: glycosyl hydrolase family 1; protein id:
  misc_feature (1)..(500): Homolog of NCBI NO: 15238331 NR Description: glycosyl hydrolase family 1; protein id:
  misc_feature (1)..(500): Homolog of NCBI NO: 15224879 NR Description: glycosyl hydrolase family 1; protein id:
  misc_feature (1)..(374): Homolog of NCBI NO: 30682835 NR Description: glycosyl hydrolase family 1 [Arabidopsis thaliana]
  misc_feature (392)..(502): Homolog of NCBI NO: 30682835 NR Description: glycosyl hydrolase family 1 [Arabidopsis thaliana]
  misc_feature (1)..(384): Homolog of NCBI NO: 25289508 NR Description: probable beta-glucosidase [imported] -
  misc_feature (35)..(501): Homolog of NCBI NO: 1155255 NR Description: beta-glucosidase
  misc_feature (4)..(501): Homolog of NCBI NO: 17432550 NR Description: prunasin hydrolase isoform PH B precursor [Prunus
  misc_feature (35)..(501): Homolog of NCBI NO: 15723332 NR Description: prunasin hydrolase isoform PH B precursor [Prunus
MRGKFLSLLLLITLACIGVSAKKHSTRPRLRRNDFPQDFVFGSATSAYQCEGAAHEDGRGPSIWDSFSEKFPEKIMDGSNGSIADDSYNLYKEDVNLLHQIGFDAYRFSISWSRILPRGTLKGGINQAGIEYYNNLINQLISKGVKPFVTLFHWDLPDALENAYGGLLGDEFVNDFRDYAELCFQKFGDRVKQWTTLNEPYTMVHEGYITGQKAPGRCSNFYKPDCLGGDAATEPYIVGHNLLLAHGVAVKVYREKYQATQKGEIGIALNTAWHYPYSDSYADRLAATRATAFTFDYFMEPIVYGRYPIEMVSHVKDGRLPTFTPEESEMLKGSYDFIGVNYYSSLYAKDVPCATENITMTTDSCVSLVGERNGVPIGPAAGSDWLLIYPKGIRDLLLHAKFRYNDPVLYITENGVDEANIGKIFLNDDLRIDYYAHHLKMVSDAISIGVNVKGYFAWSLMDNFEWSEGYTVRFGLVFVDFEDGRKRYLKKSAKWFRRLLKGAHGGTNEQVAVI

SEQ ID NO: 82982 - protein, 439 aa, Arabidopsis thaliana
  peptide (1)..(439): Ceres Seq. ID no. 12668114
  misc_feature (1)..(439): Homolog of NCBI NO: 15232261 NR Description: glycosyl hydrolase family 1; protein id: supported by cDNA: gi_15028300, supported by cDNA: gi_21281078
  misc_feature (1)..(425): Homolog of NCBI NO: 15241543 NR Description: glycosyl hydrolase family 1; protein id:
  misc_feature (1)..(425): Homolog of NCBI NO: 15238331 NR Description: glycosyl hydrolase family 1; protein id:
  misc_feature (1)..(425): Homolog of NCBI NO: 15224879 NR Description: glycosyl hydrolase family 1; protein id:
  misc_feature (1)..(299): Homolog of NCBI NO: 30682835 NR Description: glycosyl hydrolase family 1 [Arabidopsis thaliana]
  misc_feature (317)..(427): Homolog of NCBI NO: 30682835 NR Description: glycosyl hydrolase family 1 [Arabidopsis thaliana]
  misc_feature (1)..(309): Homolog of NCBI NO: 25289508 NR Description: probable beta-glucosidase [imported] -
  misc_feature (1)..(426): Homolog of NCBI NO: 1155255 NR Description: beta-glucosidase
  misc_feature (1)..(426): Homolog of NCBI NO: 17432550 NR Description: prunasin hydrolase isoform PH B precursor [Prunus
  misc_feature (1)..(426): Homolog of NCBI NO: 15723332 NR Description: prunasin hydrolase isoform PH B precursor [Prunus
MDGSNGSIADDSYNLYKEDVNLLHQIGFDAYRFSISWSRILPRGTLKGGINQAGIEYYNNLINQLISKGVKPFVTLFHWDLPDALENAYGGLLGDEFVNDFRDYAELCFQKFGDRVKQWTTLNEPYTMVHEGYITGQKAPGRCSNFYKPDCLGGDAATEPYIVGHNLLLAHGVAVKVYREKYQATQKGEIGIALNTAWHYPYSDSYADRLAATRATAFTFDYFMEPIVYGRYPIEMVSHVKDGRLPTFTPEESEMLKGSYDFIGVNYYSSLYAKDVPCATENITMTTDSCVSLVGERNGVPIGPAAGSDWLLIYPKGIRDLLLHAKFRYNDPVLYITENGVDEANIGKIFLNDDLRIDYYAHHLKMVSDAISIGVNVKGYFAWSLMDNFEWSEGYTVRFGLVFVDFEDGRKRYLKKSAKWFRRLLKGAHGGTNEQVAVI

SEQ ID NO: 82983 - protein, 312 aa, Arabidopsis thaliana
  peptide (1)..(312): Ceres Seq. ID no. 12668115
  misc_feature (1)..(312): Homolog of NCBI NO: 15232261 NR Description: glycosyl hydrolase family 1; protein id: supported by cDNA: gi_15028300, supported by cDNA: gi_21281078
  misc_feature (1)..(298): Homolog of NCBI NO: 15241543 NR Description: glycosyl hydrolase family 1; protein id:
  misc_feature (1)..(298): Homolog of NCBI NO: 15238331 NR Description: glycosyl hydrolase family 1; protein id:
  misc_feature (1)..(298): Homolog of NCBI NO: 15224879 NR Description: glycosyl hydrolase family 1; protein id:
  misc_feature (1)..(172): Homolog of NCBI NO: 30682835 NR Description: glycosyl hydrolase family 1 [Arabidopsis thaliana]
  misc_feature (190)..(300): Homolog of NCBI NO: 30682835 NR Description: glycosyl hydrolase family 1 [Arabidopsis thaliana]
  misc_feature (1)..(182): Homolog of NCBI NO: 25289508 NR Description: probable beta-glucosidase [imported] -
  misc_feature (1)..(299): Homolog of NCBI NO: 1155255 NR Description: beta-glucosidase
  misc_feature (1)..(299): Homolog of NCBI NO: 17432550 NR Description: prunasin hydrolase isoform PH B precursor [Prunus
  misc_feature (1)..(299): Homolog of NCBI NO: 15723332 NR Description: prunasin hydrolase isoform PH B precursor [Prunus
MVHEGYITGQKAPGRCSNFYKPDCLGGDAATEPYIVGHNLLLAHGVAVKVYREKYQATQKGEIGIALNTAWHYPYSDSYADRLAATRATAFTFDYFMEPIVYGRYPIEMVSHVKDGRLPTFTPEESEMLKGSYDFIGVNYYSSLYAKDVPCATENITMTTDSCVSLVGERNGVPIGPAAGSDWLLIYPKGIRDLLLHAKFRYNDPVLYITENGVDEANIGKIFLNDDLRIDYYAHHLKMVSDAISIGVNVKGYFAWSLMDNFEWSEGYTVRFGLVFVDFEDGRKRYLKKSAKWFRRLLKGAHGGTNEQVAVI

SEQ ID NO: 82984 - DNA, 1872 bp, Arabidopsis thaliana
  misc_feature (1)..(1872): Ceres Seq. ID no. 12668116
  misc_feature: MA Experiment ID: 20000180 Result: Down-regulated in Transcription
  misc_feature: MA Experiment 20000180 PARAMETER Experiment Name: At_Germinating_Seeds_P Parameter: Age (hr) Value: 24 vs. 0
  misc_feature: MA Experiment 20000180 PARAMETER Experiment Name: At_Germinating_Seeds_P Parameter: Tissue Value: Germinating Seeds
  misc_feature: MA Experiment ID: 20000182 Result: Up-regulated in Transcription
  misc_feature: MA Experiment 20000182 PARAMETER Experiment Name: At_2mM_SA_P Parameter: Age (day) Value: 14
  misc_feature: MA Experiment 20000182 PARAMETER Experiment Name: At_2mM_SA_P Parameter: Organism Value: A. thaliana
  misc_feature: MA Experiment 20000182 PARAMETER Experiment Name: At_2mM_SA_P Parameter: Plant Line Value: WS
  misc_feature: MA Experiment 20000182 PARAMETER Experiment Name: At_2mM_SA_P Parameter: Timepoint (hr) Value: 6
  misc_feature: MA Experiment 20000182 PARAMETER Experiment Name: At_2mM_SA_P Parameter: Tissue Value: Aerial
  misc_feature: MA Experiment 20000182 PARAMETER Experiment Name: At_2mM_SA_P Parameter: Treatment Value: 2mM SA vs. No Treatment
  misc_feature: MA Experiment ID: 20000184 Result: Down-regulated in Transcription
  misc_feature: MA Experiment 20000184 PARAMETER Experiment Name: At_Shoots__P Parameter: Age (day) Value: 7
  misc_feature: MA Experiment 20000184 PARAMETER Experiment Name: At_Shoots__P Parameter: Tissue Value: Shoots vs. Whole Plant
  misc_feature: MA Experiment ID: 20000185 Result: Down-regulated in Transcription
  misc_feature: MA Experiment 20000185 PARAMETER Experiment Name: At_Roots__P Parameter: Age (day) Value: 7 vs. 21
  misc_feature: MA Experiment 20000185 PARAMETER Experiment Name: At_Roots__P Parameter: Organism Value: A. thaliana
  misc_feature: MA Experiment 20000185 PARAMETER Experiment Name: At_Roots__P Parameter: Tissue Value: Roots vs. Whole Plant
  misc_feature: MA Experiment ID: 20000234 Result: Down-regulated in Transcription
  misc_feature: MA Experiment 20000234 PARAMETER Experiment Name: At_Siliques_P Parameter: Age (day) Value: 21
  misc_feature: MA Experiment 20000234 PARAMETER Experiment Name: At_Siliques_P Parameter: Organism Value: A. thaliana
  misc_feature: MA Experiment 20000234 PARAMETER Experiment Name: At_Siliques_P Parameter: Plant Line Value: WS
  misc_feature: MA Experiment 20000234 PARAMETER Experiment Name: At_Siliques_P Parameter: Tissue Value: Less Than 5mm Siliques vs. Whole Plant
  misc_feature: MA Experiment ID: 20000235 Result: Down-regulated in Transcription
  misc_feature: MA Experiment 20000235 PARAMETER Experiment Name: At_Siliques_P Parameter: Age (day) Value: 21
  misc_feature: MA Experiment 20000235 PARAMETER Experiment Name: At_Siliques_P Parameter: Organism Value: A. thaliana
  misc_feature: MA Experiment 20000235 PARAMETER Experiment Name: At_Siliques_P Parameter: Plant Line Value: WS
  misc_feature: MA Experiment 20000235 PARAMETER Experiment Name: At_Siliques_P Parameter: Tissue Value: 5-10mm Siliques vs. Whole Plant
  misc_feature: MA Experiment ID: 20000264 Result: Down-regulated in Transcription
  misc_feature: MA Experiment 20000264 PARAMETER Experiment Name: At_Open_Flower_P Parameter: Age (day) Value: 21
  misc_feature: MA Experiment 20000264 PARAMETER Experiment Name: At_Open_Flower_P Parameter: Plant Line Value: WS
  misc_feature: MA Experiment 20000264 PARAMETER Experiment Name: At_Open_Flower_P Parameter: Tissue Value: Open Flower vs. Whole Plant
  misc_feature: MA Experiment ID: 20000265 Result: Down-regulated in Transcription
  misc_feature: MA Experiment 20000265 PARAMETER Experiment Name: At_Open_Flower_P Parameter: Age (day) Value: 21
  misc_feature: MA Experiment 20000265 PARAMETER Experiment Name: At_Open_Flower_P Parameter: Plant Line Value: WS
  misc_feature: MA Experiment 20000265 PARAMETER Experiment Name: At_Open_Flower_P Parameter: Tissue Value: Closed Flower vs. Whole Plant
  misc_feature: MA Experiment ID: 20000286 Result: Down-regulated in Transcription
  misc_feature: MA Experiment 20000286 PARAMETER Experiment Name: At_Open_Flower_P Parameter: Age (day) Value: 21
  misc_feature: MA Experiment 20000286 PARAMETER Experiment Name: At_Open_Flower_P Parameter: Plant Line Value: WS
  misc_feature: MA Experiment 20000286 PARAMETER Experiment Name: At_Open_Flower_P Parameter: Tissue Value: Half Open vs. Whole Plant
  misc_feature: MA Experiment ID: 20000436 Result: Up-regulated in Transcription
  misc_feature: MA Experiment 20000436 PARAMETER Experiment Name: At_Drought_P Parameter: Age (day) Value: 7
  misc_feature: MA Experiment 20000436 PARAMETER Experiment Name: At_Drought_P Parameter: Organism Value: A. thaliana
  misc_feature: MA Experiment 20000436 PARAMETER Experiment Name: At_Drought_P Parameter: Plant Line Value: WS
  misc_feature: MA Experiment 20000436 PARAMETER Experiment Name: At_Drought_P Parameter: Timepoint (hr) Value: 12
  misc_feature: MA Experiment 20000436 PARAMETER Experiment Name: At_Drought_P Parameter: Tissue Value: Whole Plant
  misc_feature: MA Experiment 20000436 PARAMETER Experiment Name: At_Drought_P Parameter: Treatment Value: Drought vs. No Drought
  misc_feature: MA Experiment ID: 20000437 Result: Up-regulated in Transcription
  misc_feature: MA Experiment 20000437 PARAMETER Experiment Name: At_Drought_P Parameter: Age (day) Value: 8
  misc_feature: MA Experiment 20000437 PARAMETER Experiment Name: At_Drought_P Parameter: Organism Value: A. thaliana
  misc_feature: MA Experiment 20000437 PARAMETER Experiment Name: At_Drought_P Parameter: Plant Line Value: WS
  misc_feature: MA Experiment 20000437 PARAMETER Experiment Name: At_Drought_P Parameter: Timepoint (hr) Value: 24
  misc_feature: MA Experiment 20000437 PARAMETER Experiment Name: At_Drought_P Parameter: Tissue Value: Whole Plant
  misc_feature: MA Experiment 20000437 PARAMETER Experiment Name: At_Drought_P Parameter: Treatment Value: Drought vs. No Drought
  misc_feature: MA Experiment ID: 20000438 Result: Down-regulated in Transcription
  misc_feature: MA Experiment 20000438 PARAMETER Experiment Name: At_Shoots__P Parameter: Age (day) Value: 14
  misc_feature: MA Experiment 20000438 PARAMETER Experiment Name: At_Shoots__P Parameter: Tissue Value: Shoots vs. Whole Plant
  misc_feature: MA Experiment ID: 20000439 Result: Down-regulated in Transcription
  misc_feature: MA Experiment 20000439 PARAMETER Experiment Name: At_Roots__P Parameter: Age (day) Value: 14 vs. 21
  misc_feature: MA Experiment 20000439 PARAMETER Experiment Name: At_Roots__P Parameter: Organism Value: A. thaliana
  misc_feature: MA Experiment 20000439 PARAMETER Experiment Name: At_Roots__P Parameter: Tissue Value: Roots vs. Whole Plant
  misc_feature: MA Experiment ID: 20000453 Result: Up-regulated in Transcription
  misc_feature: MA Experiment 20000453 PARAMETER Experiment Name: At_100uM_ABA_P Parameter: Age (day) Value: 15
  misc_feature: MA Experiment 20000453 PARAMETER Experiment Name: At_100uM_ABA_P Parameter: Organism Value: A. thaliana
  misc_feature: MA Experiment 20000453 PARAMETER Experiment Name: At_100uM_ABA_P Parameter: Plant Line Value: WS
  misc_feature: MA Experiment 20000453 PARAMETER Experiment Name: At_100uM_ABA_P Parameter: Timepoint (hr) Value: 24
  misc_feature: MA Experiment 20000453 PARAMETER Experiment Name: At_100uM_ABA_P Parameter: Tissue Value: Aerial
  misc_feature: MA Experiment 20000453 PARAMETER Experiment Name: At_100uM_ABA_P Parameter: Treatment Value: 100uM ABA vs. No Treatment
  misc_feature: MA Experiment ID: 20000455 Result: Up-regulated in Transcription
  misc_feature: MA Experiment 20000455 PARAMETER Experiment Name: At_100uM_ABA_P Parameter: Age (day) Value: 16
  misc_feature: MA Experiment 20000455 PARAMETER Experiment Name: At_100uM_ABA_P Parameter: Organism Value: A. thaliana
  misc_feature: MA Experiment 20000455 PARAMETER Experiment Name: At_100uM_ABA_P Parameter: Plant Line Value: WS
  misc_feature: MA Experiment 20000455 PARAMETER Experiment Name: At_100uM_ABA_P Parameter: Timepoint (hr) Value: 48
  misc_feature: MA Experiment 20000455 PARAMETER Experiment Name: At_100uM_ABA_P Parameter: Tissue Value: Aerial
  misc_feature: MA Experiment 20000455 PARAMETER Experiment Name: At_100uM_ABA_P Parameter: Treatment Value: 100uM ABA vs. No Treatment
  misc_feature: MA Experiment ID: 20000527 Result: Down-regulated in Transcription
  misc_feature: MA Experiment 20000527 PARAMETER Experiment Name: At_10percent_PEG_P Parameter: Age (day) Value: 20
  misc_feature: MA Experiment 20000527 PARAMETER Experiment Name: At_10percent_PEG_P Parameter: Organism Value: A. thaliana
  misc_feature: MA Experiment 20000527 PARAMETER Experiment Name: At_10percent_PEG_P Parameter: Plant Line Value: WS
  misc_feature: MA Experiment 20000527 PARAMETER Experiment Name: At_10percent_PEG_P Parameter: Timepoint (day) Value: 20
  misc_feature: MA Experiment 20000527 PARAMETER Experiment Name: At_10percent_PEG_P Parameter: Tissue Value: Whole Plant
  misc_feature: MA Experiment 20000527 PARAMETER Experiment Name: At_10percent_PEG_P Parameter: Treatment Value: 10percent PEG vs. No Treatment
  misc_feature: MA Experiment ID: 20000794 Result: Down-regulated in Transcription
  misc_feature: MA Experiment 20000794 PARAMETER Experiment Name: At_Petals_P Parameter: Age (day) Value: 23-25 days
  misc_feature: MA Experiment 20000794 PARAMETER Experiment Name: At_Petals_P Parameter: Plant Line Value: WS
  misc_feature: MA Experiment 20000794 PARAMETER Experiment Name: At_Petals_P Parameter: Tissue Value: Petals vs. Whole plant
  misc_feature: MA Experiment ID: 20001248 Result: Up-regulated in Transcription
  misc_feature: MA Experiment 20001248 PARAMETER Experiment Name: At_Far-red-induction_P Parameter: Age (day) Value: 7
  misc_feature: MA Experiment 20001248 PARAMETER Experiment Name: At_Far-red-induction_P Parameter: Light Value: Far-red vs. White
  misc_feature: MA Experiment 20001248 PARAMETER Experiment Name: At_Far-red-induction_P Parameter: Organism Value: A. thaliana
  misc_feature: MA Experiment 20001248 PARAMETER Experiment Name: At_Far-red-induction_P Parameter: Plant Line Value: Columbia
  misc_feature: MA Experiment 20001248 PARAMETER Experiment Name: At_Far-red-induction_P Parameter: Timepoint (hr) Value: 4
  misc_feature: MA Experiment 20001248 PARAMETER Experiment Name: At_Far-red-induction_P Parameter: Tissue Value: Whole Plant
  misc_feature: MA Experiment ID: 20001450 Result: Up-regulated in Transcription
  misc_feature: MA Experiment 20001450 PARAMETER Experiment Name: At_Far-red-induction_P Parameter: Age (day) Value: 7
  misc_feature: MA Experiment 20001450 PARAMETER Experiment Name: At_Far-red-induction_P Parameter: Light Value: Far-red vs. White
  misc_feature: MA Experiment 20001450 PARAMETER Experiment Name: At_Far-red-induction_P Parameter: Organism Value: A. thaliana
  misc_feature: MA Experiment 20001450 PARAMETER Experiment Name: At_Far-red-induction_P Parameter: Plant Line Value: Columbia
  misc_feature: MA Experiment 20001450 PARAMETER Experiment Name: At_Far-red-induction_P Parameter: Timepoint (hr) Value: 8
  misc_feature: MA Experiment 20001450 PARAMETER Experiment Name: At_Far-red-induction_P Parameter: Tissue Value: Whole Plant
  misc_feature: MA Experiment ID: 20001451 Result: Up-regulated in Transcription
  misc_feature: MA Experiment 20001451 PARAMETER Experiment Name: At_Far-red-induction_P Parameter: Age (day) Value: 7
  misc_feature: MA Experiment 20001451 PARAMETER Experiment Name: At_Far-red-induction_P Parameter: Light Value: Far-red vs. White
  misc_feature: MA Experiment 20001451 PARAMETER Experiment Name: At_Far-red-induction_P Parameter: Organism Value: A. thaliana
  misc_feature: MA Experiment 20001451 PARAMETER Experiment Name: At_Far-red-induction_P Parameter: Plant Line Value: Columbia
  misc_feature: MA Experiment 20001451 PARAMETER Experiment Name: At_Far-red-induction_P Parameter: Timepoint (hr) Value: 24
  misc_feature: MA Experiment 20001451 PARAMETER Experiment Name: At_Far-red-induction_P Parameter: Tissue Value: Whole Plant
  misc_feature: MA Experiment ID: 20001556 Result: Up-regulated in Transcription
  misc_feature: MA Experiment 20001556 PARAMETER Experiment Name: At_Drought_Soil_Dry_P Parameter: Age (day) Value: 26
  misc_feature: MA Experiment 20001556 PARAMETER Experiment Name: At_Drought_Soil_Dry_P Parameter: Organism Value: A. thaliana
  misc_feature: MA Experiment 20001556 PARAMETER Experiment Name: At_Drought_Soil_Dry_P Parameter: Plant Line Value: WS
  misc_feature: MA Experiment 20001556 PARAMETER Experiment Name: At_Drought_Soil_Dry_P Parameter: Post Timepoint (hr) Value: None
  misc_feature: MA Experiment 20001556 PARAMETER Experiment Name: At_Drought_Soil_Dry_P Parameter: Post-Treatment Value: None
  misc_feature: MA Experiment 20001556 PARAMETER Experiment Name: At_Drought_Soil_Dry_P Parameter: Timepoint (day) Value: 12
  misc_feature: MA Experiment 20001556 PARAMETER Experiment Name: At_Drought_Soil_Dry_P Parameter: Treatment Value: Drought vs. No Drought
  misc_feature: MA Experiment ID: 20001557 Result: Up-regulated in Transcription
  misc_feature: MA Experiment 20001557 PARAMETER Experiment Name: At_Drought_Soil_Dry_P Parameter: Age (day) Value: 27
  misc_feature: MA Experiment 20001557 PARAMETER Experiment Name: At_Drought_Soil_Dry_P Parameter: Organism Value: A. thaliana
  misc_feature: MA Experiment 20001557 PARAMETER Experiment Name: At_Drought_Soil_Dry_P Parameter: Plant Line Value: WS
  misc_feature: MA Experiment 20001557 PARAMETER Experiment Name: At_Drought_Soil_Dry_P Parameter: Post Timepoint (hr) Value: 3
  misc_feature: MA Experiment 20001557 PARAMETER Experiment Name: At_Drought_Soil_Dry_P Parameter: Post-Treatment Value: Re-Water vs. No Drought
  misc_feature: MA Experiment 20001557 PARAMETER Experiment Name: At_Drought_Soil_Dry_P Parameter: Timepoint (day) Value: 13
  misc_feature: MA Experiment 20001557 PARAMETER Experiment Name: At_Drought_Soil_Dry_P Parameter: Treatment Value: Drought vs. No Drought
  misc_feature: MA Experiment ID: 20001558 Result: Up-regulated in Transcription
  misc_feature: MA Experiment 20001558 PARAMETER Experiment Name: At_Drought_Soil_Dry_P Parameter: Age (day) Value: 27
  misc_feature: MA Experiment 20001558 PARAMETER Experiment Name: At_Drought_Soil_Dry_P Parameter: Organism Value: A. thaliana
  misc_feature: MA Experiment 20001558 PARAMETER Experiment Name: At_Drought_Soil_Dry_P Parameter: Plant Line Value: WS
  misc_feature: MA Experiment 20001558 PARAMETER Experiment Name: At_Drought_Soil_Dry_P Parameter: Post Timepoint (hr) Value: 6
  misc_feature: MA Experiment 20001558 PARAMETER Experiment Name: At_Drought_Soil_Dry_P Parameter: Post-Treatment Value: Re-Water vs. No Drought
  misc_feature: MA Experiment 20001558 PARAMETER Experiment Name: At_Drought_Soil_Dry_P Parameter: Timepoint (day) Value: 13
  misc_feature: MA Experiment 20001558 PARAMETER Experiment Name: At_Drought_Soil_Dry_P Parameter: Treatment Value: Drought vs. No Drought
  misc_feature: MA Experiment ID: 20001559 Result: Up-regulated in Transcription
  misc_feature: MA Experiment 20001559 PARAMETER Experiment Name: At_Drought_Soil_Dry_P Parameter: Age (day) Value: 28
  misc_feature: MA Experiment 20001559 PARAMETER Experiment Name: At_Drought_Soil_Dry_P Parameter: Organism Value: A. thaliana
  misc_feature: MA Experiment 20001559 PARAMETER Experiment Name: At_Drought_Soil_Dry_P Parameter: Plant Line Value: WS
  misc_feature: MA Experiment 20001559 PARAMETER Experiment Name: At_Drought_Soil_Dry_P Parameter: Post Timepoint (hr) Value: 29
  misc_feature: MA Experiment 20001559 PARAMETER Experiment Name: At_Drought_Soil_Dry_P Parameter: Post-Treatment Value: Re-Water vs. No Drought
  misc_feature: MA Experiment 20001559 PARAMETER Experiment Name: At_Drought_Soil_Dry_P Parameter: Timepoint (day) Value: 14
  misc_feature: MA Experiment 20001559 PARAMETER Experiment Name: At_Drought_Soil_Dry_P Parameter: Treatment Value: Drought vs. No Drought
  misc_feature: MA Experiment ID: 20001560 Result: Up-regulated in Transcription
  misc_feature: MA Experiment 20001560 PARAMETER Experiment Name: At_Drought_Soil_Dry_P Parameter: Age (day) Value: 28
  misc_feature: MA Experiment 20001560 PARAMETER Experiment Name: At_Drought_Soil_Dry_P Parameter: Organism Value: A. thaliana
  misc_feature: MA Experiment 20001560 PARAMETER Experiment Name: At_Drought_Soil_Dry_P Parameter: Plant Line Value: WS
  misc_feature: MA Experiment 20001560 PARAMETER Experiment Name: At_Drought_Soil_Dry_P Parameter: Post Timepoint (hr) Value: None
  misc_feature: MA Experiment 20001560 PARAMETER Experiment Name: At_Drought_Soil_Dry_P Parameter: Post-Treatment Value: None
  misc_feature: MA Experiment 20001560 PARAMETER Experiment Name: At_Drought_Soil_Dry_P Parameter: Timepoint (day) Value: 14
  misc_feature: MA Experiment 20001560 PARAMETER Experiment Name: At_Drought_Soil_Dry_P Parameter: Treatment Value: Drought vs. No Drought
  misc_feature: MA Experiment ID: 20001773 Result: Down-regulated in Transcription
  misc_feature: MA Experiment 20001773 PARAMETER Experiment Name: At_Far-red-enriched-adult_P Parameter: Age (day) Value: 30
  misc_feature: MA Experiment 20001773 PARAMETER Experiment Name: At_Far-red-enriched-adult_P Parameter: Light Value: Far-red enriched vs. White
  misc_feature: MA Experiment 20001773 PARAMETER Experiment Name: At_Far-red-enriched-adult_P Parameter: Organism Value: A. thaliana
  misc_feature: MA Experiment 20001773 PARAMETER Experiment Name: At_Far-red-enriched-adult_P Parameter: Plant Line Value: Columbia
  misc_feature: MA Experiment 20001773 PARAMETER Experiment Name: At_Far-red-enriched-adult_P Parameter: Timepoint (hr) Value: 48
  misc_feature: MA Experiment 20001773 PARAMETER Experiment Name: At_Far-red-enriched-adult_P Parameter: Tissue Value: Aerial
  misc_feature: MA Experiment ID: 20001904 Result: Up-regulated in Transcription
  misc_feature: MA Experiment 20001904 PARAMETER Experiment Name: At_Drought_Reproduction_P Parameter: Age (day) Value: 37
  misc_feature: MA Experiment 20001904 PARAMETER Experiment Name: At_Drought_Reproduction_P Parameter: Organism Value: A. thaliana
  misc_feature: MA Experiment 20001904 PARAMETER Experiment Name: At_Drought_Reproduction_P Parameter: Plant Line Value: WS
  misc_feature: MA Experiment 20001904 PARAMETER Experiment Name: At_Drought_Reproduction_P Parameter: Timepoint (day) Value: 7
  misc_feature: MA Experiment 20001904 PARAMETER Experiment Name: At_Drought_Reproduction_P Parameter: Tissue Value: Rosettes
  misc_feature: MA Experiment 20001904 PARAMETER Experiment Name: At_Drought_Reproduction_P Parameter: Treatment Value: Drought vs. No Drought
  misc_feature: MA Experiment ID: 20001906 Result: Up-regulated in Transcription
  misc_feature: MA Experiment 20001906 PARAMETER Experiment Name: At_Drought_Reproduction_P Parameter: Age (day) Value: 35
  misc_feature: MA Experiment 20001906 PARAMETER Experiment Name: At_Drought_Reproduction_P Parameter: Organism Value: A. thaliana
  misc_feature: MA Experiment 20001906 PARAMETER Experiment Name: At_Drought_Reproduction_P Parameter: Plant Line Value: WS
  misc_feature: MA Experiment 20001906 PARAMETER Experiment Name: At_Drought_Reproduction_P Parameter: Timepoint (day) Value: 5
  misc_feature: MA Experiment 20001906 PARAMETER Experiment Name: At_Drought_Reproduction_P Parameter: Tissue Value: Siliques
  misc_feature: MA Experiment 20001906 PARAMETER Experiment Name: At_Drought_Reproduction_P Parameter: Treatment Value: Drought vs. No Drought
aaaaaaaaaagagagagagagagagagaaaaatggctaagggatcgtggttcttcattatcctttttatcatctcaatgttagaaaatatgatcaattctctagaattagatcggcatagttttcctgatgatttcatctttgggacagctgcctcggcgtttcagtacgaaggtgcaacaagtgaaggtggcaagtctccaactatatgggatcacttcagcctcacgtatccagaaaggaccaaaatgcataatgcagatgtagcaattgatttttatcatcgttacaaggatgacataaaattgatgaaggagctaaacatggacgctttccgattttcaatctcgtggtcaagattaatacccagtggaaagctaaaggatggagtaaacaaagaaggtgtacaattctacaaggatctcatagacgaacttcttgctaatgacatacaaccttcgatgacgctctatcattgggaccacccacaatctttggaggacgaatatggtggctttctaagccctaaaatcgtagaagattttcgagattttgcaagaatttgttttgaagagtttggagataaagttaagatgtggacaacaatcaacgaaccttatataatgactgttgcgggttatgatcaaggtaacaaggcggctggacgatgctcaaaatgggtaaacgaaaagtgtcaggctggagattcgagtaccgagccttacattgtttcacatcacactcttcttgcccatgccgctgcagtggaagaatttcgaaaatgtgaaaaaacttcgcatgatggccaaattgggatagtactatcaccaagatggttcgagccttatcattccgattcaactgacgataaagaagcagctgaacgagctcttgcctttgaaattggatggcatcttgatccagtcattcacggagattatccagagattgtaaaaaagtacgcgggaaataaattaccttcatttactgttgaacaatcaaagatgttacaaaattcatcagatttcgttggaattaattactacacggctcgcttcgctgctcatcttcctcacatagaccctgaaaaacctcgtttcaaaactgaccaccatgtggaatggaaactgactaatcacagtggtcacatcatcggacctggggaagaaaggggcttcttattttcacacccggaaggcttacgaaaagttcttaactatattaaagagagatacaataacatgccagtctacatcaaagaaaatggaattaatgacaacgacgacggtacaaaaccaagagaagaaattgtgaaggacacatttaggattgaataccataagacacatttcgaagaacttcacaaagctatagtggaagatgggtgtgacgtaagaggatattacgcatggtcattgatggacaattttgaatgggagcatggatacactgcaagatttggtctatactatgttgattttgtcaatggtctcaaacgttatccaaaagattcggtcaaatggtttaagcggttccttaagaaatcggtcgtcggagagagtaacaaagaggaggtagaggagatgtcacgcgcggaagggaataagacttttaagggtttcgaagaatcggcgggtttctttgcatctttcatggcaatgaaccaatcgaggagagatgaggagaataatcgttgctcctttgattttcctcatactcattttggtgttttgcaaggcatagagaacccatcttcattttattgatttcaaatcccttatgtttttaaattccttatggttggacatgtagttaattagaatttagctcatgttaatatatgaacattttcatggtaatattttcttcttgg

SEQ ID NO: 82985 - protein, 587 aa, Arabidopsis thaliana
  peptide (1)..(587): Ceres Seq. ID no. 12668117
  misc_feature (17)..(586): Homolog of NCBI NO: 30689721 NR Description: glycosyl hydrolase family 1 [Arabidopsis thaliana]
  misc_feature (17)..(586): Homolog of NCBI NO: 7435453 NR Description: probable beta-glucosidase At2g44460 [imported] -
  misc_feature (18)..(586): Homolog of NCBI NO: 7435454 NR Description: beta-glucosidase homolog At2g44470 [imported] -
  misc_feature (26)..(395): Homolog of NCBI NO: 22137182 NR Description: AT3g60140/T2O9_120 [Arabidopsis thaliana]
  misc_feature (26)..(395): Homolog of NCBI NO: 13605843 NR Description: AT3g60140/T2O9_120 [Arabidopsis thaliana]
  misc_feature (36)..(515): Homolog of NCBI NO: 22327030 NR Description: glycosyl hydrolase family 1; protein id:
  misc_feature (36)..(515): Homolog of NCBI NO: 15238569 NR Description: glycosyl hydrolase family 1; protein id:
  misc_feature (17)..(514): Homolog of NCBI NO: 38344468 NR Description: OSJNBa0022H21.3 [Oryza sativa (japonica
  misc_feature (259)..(514): Homolog of NCBI NO: 38344466 NR Description: OSJNBa0022H21.1 [Oryza sativa (japonica
  misc_feature (11)..(260): Homolog of NCBI NO: 38344466 NR Description: OSJNBa0022H21.1 [Oryza sativa (japonica
KKKERERERKMAKGSWFFIILFIISMLENMINSLELDRHSFPDDFIFGTAASAFQYEGATSEGGKSPTIWDHFSLTYPERTKMHNADVAIDFYHRYKDDIKLMKELNMDAFRFSISWSRLIPSGKLKDGVNKEGVQFYKDLIDELLANDIQPSMTLYHWDHPQSLEDEYGGFLSPKIVEDFRDFARICFEEFGDKVKMWTTINEPYIMTVAGYDQGNKAAGRCSKWVNEKCQAGDSSTEPYIVSHHTLLAHAAAVEEFRKCEKTSHDGQIGIVLSPRWFEPYHSDSTDDKEAAERALAFEIGWHLDPVIHGDYPEIVKKYAGNKLPSFTVEQSKMLQNSSDFVGINYYTARFAAHLPHIDPEKPRFKTDHHVEWKLTNHSGHIIGPGEERGFLFSHPEGLRKVLNYIKERYNNMPVYIKENGINDNDDGTKPREEIVKDTFRIEYHKTHFEELHKAIVEDGCDVRGYYAWSLMDNFEWEHGYTARFGLYYVDFVNGLKRYPKDSVKWFKRFLKKSVVGESNKEEVEEMSRAEGNKTFKGFEESAGFFASFMAMNQSRRDEENNRCSFDFPHTHFGVLQGIENPSSFY

SEQ ID NO: 82986 - protein, 577 aa, Arabidopsis thaliana
  peptide (1)..(577): Ceres Seq. ID no. 12668118
  misc_feature (7)..(576): Homolog of NCBI NO: 30689721 NR Description: glycosyl hydrolase family 1 [Arabidopsis thaliana]
  misc_feature (7)..(576): Homolog of NCBI NO: 7435453 NR Description: probable beta-glucosidase At2g44460 [imported] -
  misc_feature (8)..(576): Homolog of NCBI NO: 7435454 NR Description: beta-glucosidase homolog At2g44470 [imported] -
  misc_feature (16)..(385): Homolog of NCBI NO: 22137182 NR Description: AT3g60140/T2O9_120 [Arabidopsis thaliana]
  misc_feature (16)..(385): Homolog of NCBI NO: 13605843 NR Description: AT3g60140/T2O9_120 [Arabidopsis thaliana]
  misc_feature (26)..(505): Homolog of NCBI NO: 22327030 NR Description: glycosyl hydrolase family 1; protein id:
  misc_feature (26)..(505): Homolog of NCBI NO: 15238569 NR Description: glycosyl hydrolase family 1; protein id:
  misc_feature (7)..(504): Homolog of NCBI NO: 38344468 NR Description: OSJNBa0022H21.3 [Oryza sativa (japonica
  misc_feature (249)..(504): Homolog of NCBI NO: 38344466 NR Description: OSJNBa0022H21.1 [Oryza sativa (japonica
  misc_feature (1)..(250): Homolog of NCBI NO: 38344466 NR Description: OSJNBa0022H21.1 [Oryza sativa (japonica
MAKGSWFFIILFIISMLENMINSLELDRHSFPDDFIFGTAASAFQYEGATSEGGKSPTIWDHFSLTYPERTKMHNADVAIDFYHRYKDDIKLMKELNMDAFRFSISWSRLIPSGKLKDGVNKEGVQFYKDLIDELLANDIQPSMTLYHWDHPQSLEDEYGGFLSPKIVEDFRDFARICFEEFGDKVKMWTTINEPYIMTVAGYDQGNKAAGRCSKWVNEKCQAGDSSTEPYIVSHHTLLAHAAAVEEFRKCEKTSHDGQIGIVLSPRWFEPYHSDSTDDKEAAERALAFEIGWHLDPVIHGDYPEIVKKYAGNKLPSFTVEQSKMLQNSSDFVGINYYTARFAAHLPHIDPEKPRFKTDHHVEWKLTNHSGHIIGPGEERGFLFSHPEGLRKVLNYIKERYNNMPVYIKENGINDNDDGTKPREEIVKDTFRIEYHKTHFEELHKAIVEDGCDVRGYYAWSLMDNFEWEHGYTARFGLYYVDFVNGLKRYPKDSVKWFKRFLKKSVVGESNKEEVEEMSRAEGNKTFKGFEESAGFFASFMAMNQSRRDEENNRCSFDFPHTHFGVLQGIENPSSFY

SEQ ID NO: 82987 - protein, 562 aa, Arabidopsis thaliana
  peptide (1)..(562): Ceres Seq. ID no. 12668119
  misc_feature (1)..(561): Homolog of NCBI NO: 30689721 NR Description: glycosyl hydrolase family 1 [Arabidopsis thaliana]
  misc_feature (1)..(561): Homolog of NCBI NO: 7435453 NR Description: probable beta-glucosidase At2g44460 [imported] -
  misc_feature (1)..(561): Homolog of NCBI NO: 7435454 NR Description: beta-glucosidase homolog At2g44470 [imported] -
  misc_feature (1)..(370): Homolog of NCBI NO: 22137182 NR Description: AT3g60140/T2O9_120 [Arabidopsis thaliana]
  misc_feature (1)..(370): Homolog of NCBI NO: 13605843 NR Description: AT3g60140/T2O9_120 [Arabidopsis thaliana]
  misc_feature (11)..(490): Homolog of NCBI NO: 22327030 NR Description: glycosyl hydrolase family 1; protein id:
  misc_feature (11)..(490): Homolog of NCBI NO: 15238569 NR Description: glycosyl hydrolase family 1; protein id:
  misc_feature (1)..(489): Homolog of NCBI NO: 38344468 NR Description: OSJNBa0022H21.3 [Oryza sativa (japonica
  misc_feature (234)..(489): Homolog of NCBI NO: 38344466 NR Description: OSJNBa0022H21.1 [Oryza sativa (japonica
  misc_feature (1)..(235): Homolog of NCBI NO: 38344466 NR Description: OSJNBa0022H21.1 [Oryza sativa (japonica
MLENMINSLELDRHSFPDDFIFGTAASAFQYEGATSEGGKSPTIWDHFSLTYPERTKMHNADVAIDFYHRYKDDIKLMKELNMDAFRFSISWSRLIPSGKLKDGVNKEGVQFYKDLIDELLANDIQPSMTLYHWDHPQSLEDEYGGFLSPKIVEDFRDFARICFEEFGDKVKMWTTINEPYIMTVAGYDQGNKAAGRCSKWVNEKCQAGDSSTEPYIVSHHTLLAHAAAVEEFRKCEKTSHDGQIGIVLSPRWFEPYHSDSTDDKEAAERALAFEIGWHLDPVIHGDYPEIVKKYAGNKLPSFTVEQSKMLQNSSDFVGINYYTARFAAHLPHIDPEKPRFKTDHHVEWKLTNHSGHIIGPGEERGFLFSHPEGLRKVLNYIKERYNNMPVYIKENGINDNDDGTKPREEIVKDTFRIEYHKTHFEELHKAIVEDGCDVRGYYAWSLMDNFEWEHGYTARFGLYYVDFVNGLKRYPKDSVKWFKRFLKKSVVGESNKEEVEEMSRAEGNKTFKGFEESAGFFASFMAMNQSRRDEENNRCSFDFPHTHFGVLQGIENPSSFY

SEQ ID NO: 82988 - DNA, 4473 bp, Arabidopsis thaliana
  misc_feature (1)..(4473): Ceres Seq. ID no. 12668120
  misc_feature: MA Experiment ID: 20000307 Result: Down-regulated in Transcription
  misc_feature: MA Experiment 20000307 PARAMETER Experiment Name: At_Germinating_Seeds_Sub_P Parameter: Age (hr) Value: 24 vs. 0
  misc_feature: MA Experiment 20000307 PARAMETER Experiment Name: At_Germinating_Seeds_Sub_P Parameter: Organism Value: A. thaliana
  misc_feature: MA Experiment 20000307 PARAMETER Experiment Name: At_Germinating_Seeds_Sub_P Parameter: Plant Line Value: WS
  misc_feature: MA Experiment 20000307 PARAMETER Experiment Name: At_Germinating_Seeds_Sub_P Parameter: Tissue Value: Germinating Seeds
  misc_feature: MA Experiment ID: 20000355 Result: Down-regulated in Transcription
  misc_feature: MA Experiment 20000355 PARAMETER Experiment Name: At_Siliques_Sub_P Parameter: Age (day) Value: 21
  misc_feature: MA Experiment 20000355 PARAMETER Experiment Name: At_Siliques_Sub_P Parameter: Organism Value: A. thaliana
  misc_feature: MA Experiment 20000355 PARAMETER Experiment Name: At_Siliques_Sub_P Parameter: Plant Line Value: WS
  misc_feature: MA Experiment 20000355 PARAMETER Experiment Name: At_Siliques_Sub_P Parameter: Tissue Value: Less Than 5mm Siliques vs. Whole Plant
atgttcaagccctttggtttcgcagcagaaactggttctcatctcctgacgacgcaatggttgcaactaggaaactcactttgcttgaaggaacgtataagcatcgctatgcaagtgactttcctcgctttctttcttattcatttggcacttaaatggtttggtgtagtaagaaacagaggatctaatgatgtagaagaagacttgaagaagcagagcataactgtgaagcagagcttctcttacaacatatctcttctctgctctgtttctatcttagggactcattgctttatcttgcttttgctgtttcgagacagcgtggtctcacggtgtgattcctctgtttctgtcttctccgctgaggtttcgcagtctttctcgtggttgtttgtttctgttgttgtggtgaagatcagagaaaggaggcttgtcaagtttccttggatgttaaggtcatggtggctctgtagtttcatcttatccttttcctttgatgctcatttcattaccgcgaaacacgagcctctcgagtttcaagattatgccgacttgactggtcttcttgcatccttgttcctgttggctgtttcaatcagaggcaaaaccggttttcatcttcttgaatccagcggtaacacagagccattactacttggtgaccaaacagagcagaacaagaaagattcttattcttcttcttccccatatggaaacgctactctcttccaacgcatcactttctcatggatcaaccctttgttctcccttggatacaagagacctctagaaaaagatgatgtaccagatatcgatgtgaaagactccgctcgattttgctctcatgcctttgaccagaaactgaaaaccaccaaagaaaaagaaggacctggaaatgctttcttctataactcggttcttcgctatgtgtggaggaaagccgcaatcaacgcggtattcgcagttgtaaacgcgagcacagcttacatcggaccatatctcatcaatgactttgtagagtttctaagtgagaaacaatcccagagcttaaaccatggttaccttcttgcactcgggtttctaactgcgaaaatcgtcgagacagttactcaaagacaatggatctttggagctcgtcagctaggactacgtcttcgagcagctttgatatcacatatctaccagaaaggtttagttttatcaagtcaatctcggcaaagccacacgagcggagagatcatcaactacatgagtgtagatgttcagagaatcactgacttcatttggtatgtaaacaacatatggatgttaccaatacagattttctcggcgatttatatcttgcaaaaacatctgggacttggagctttagctgcattggtcacaactttaatggtgatggcttgcaactaccccctgacaaggcttcagagaaactaccaatcagatatcatgaatgccaaagatgatagaatgaaagcaacttcagagattcttaaaaacatgaagattctgaagcttcaagcatgggataaccagtttctcaacaaggttaaaacattaagaaagaaagagtatgattgtttatggaagtctttgaggttacaagctttcacaacttttatcctttggggagctccttcattgatctctgtggtgacttttgttacttgtatgttaatgggagtgaagctaacagctggagcagtcttatctgctcttgcaacgtttcaaatgttacaaagtccgattttcggtttacctgatctcctctcagcacttgttcagagcaaggtttctgcagatagaatagcttcttaccttcaacaaagtgagactcagaaagatgcagttgagtattgctcaaaggatcatacagaattaagtgttgaaatagaaaatggagcatttagttgggaacctgagtcaagcagaccgactcttgatgacatcgaactgaaagtaaaaagcggaatgaaagtggcggtttgtggagctgtaggatcaggaaaatcaagcttactctcttcaatcctaggggagattcagaagctgaagggaacagtcagagtcagtggtaaacaagcttatgttccacaatcaccatggatactaagcgggactataagagataacattttgtttggaagtatgtatgaaagtgagaagtatgagagaactgttaaagcatgtgctttgataaaggactttgagcttttctcgaatggagacttgacagagattggagagagagggataaacatgagtggaggtcagaagcaaaggatacagattgctcgagcggtttatcagaatgctgatatatatctacttgatgatccttttagcgccgttgatgctcatacaggaagagaactctttgaagattgcttaatggggatactgaaagacaaaactgtactttacgtcacacatcaagttgagtttcttccagcagcagatctaatcctggtgatgcaaaacggaagagtgatgcaagcaggcaagtttgaagagcttctaaagcaaaacataggttttgaagttcttgtaggagctcataacgaagcgctggactcaattctatcaattgaaaagtcaagcagaaacttcaaagagggatcaaaagatgacacagcatcaattgcagagagtctccagacacattgtgactcagagcataacatttcaacagagaataaaaagaaagaagcaaagctagtgcaagatgaagaaacagagaaaggagtaattggcaaagaagtttacttggcatatttaacaacggtgaaaggcggattgcttgtgccattcataatattggctcagtcttgcttccaaatgctacagattgctagcaattactggatggcatggactgctcctccaactgctgaatccataccaaagttaggaatgggtcggattttacttgtttatgcacttcttgctgcaggaagttcactttgtgttttagcacggactattctagtcgccataggtggactttcaacagcagagacgttcttctcaaggatgctctgcagcattttcagagctccaatgtcatttttcgattcaactccaacaggaagaatcttgaacagggcatccacagatcaaagtgtcctggatttggaaatggcagtcaaactaggttggtgtgctttttcgatcattcagattgttggaaccatcttcgtcatgtcgcaagttgcttggcaaagatattacacaccaacagcaagagaactgtcacgcatgtcaggagtagaaagagctccaattctccaccatttcgctgaatcgcttgctggtgcaacaacaatacgtgcttttgatcaacgagatcgcttcattagctcaaaccttgttctaatagatagccattcaaggccatggttccatgttgcatcagcaatggagtggctttccttcaggttgaatttgctgtctcatttcgtctttgctttttctttggtgttacttgtgactctccctgaaggtgtcatcaatccaagtattgctggtcttggggtcacatatggcttaagtctgaatgttctacaagccacagtgatatggaatatatgcaatgcagaaaacaagatgatttctgtagaaagaattcttcagtactccaaaatccccagtgaagcacctctagtaattgatggtcacagacctcttgataactggccaaatgtaggatcaatcgtcttcagagacctacaggtccgttatgcagaacatttcccagctgtcttgaagaacatcacttgtgagtttccaggaggaaaaaagattggagtagtaggaagaacaggaagcggcaaatcaactttaattcaggcattgtttaggattgtagagccaagtcaaggaaccatagttattgataatgtggatataaccaagataggtctacatgacctgagatcaaggcttgggattattcctcaagatcctgcactatttgatggaacaatcagattgaatctagaccctctagctcagtacactgatcacgaaatatgggaagccattgataaatgccaattgggagatgttattcgtgcaaaggatgagaggctggatgctacagtggttgaaaatggagaaaactggagcgtagggcagagacagttagtttgtcttgggagggtgttgttgaagaaaagcaacattctggtgcttgatgaagccactgcttctgttgattctgcaactgatggtgtaatacaaaagatcatcaatcaagagtttaaagatcggacagtggtgactattgcacacagaatccacacagtgatagagagtgatcttgttctggttctgagtgatggacgaatcgcagagtttgattcacctgccaaactgctacagagagaagattctttcttctccaaactcataaaagagtattcgctgagatctaatcactttgccggctcgaatgatcttctcagctaa

SEQ ID NO: 82989 - protein, 1490 aa, Arabidopsis thaliana
  peptide (1)..(1490): Ceres Seq. ID no. 12668121
  misc_feature (311)..(584): Pfam Name: ABC transporter transmembrane region Pfam Description: ABC transporter transmembrane region
  misc_feature (19)..(1074): Homolog of NCBI NO: 27368881 NR Description: MRP-like ABC transporter [Oryza sativa (japonica
  misc_feature (125)..(1475): Homolog of NCBI NO: 22331862 NR Description: ABC transporter family protein; protein id:
  misc_feature (11)..(1074): Homolog of NCBI NO: 30682473 NR Description: ABC transporter family protein [Arabidopsis
  misc_feature (1327)..(1480): Homolog of NCBI NO: 30682473 NR Description: ABC transporter family protein [Arabidopsis
  misc_feature (648)..(1481): Homolog of NCBI NO: 27368875 NR Description: MRP-like ABC transporter [Oryza sativa (japonica
  misc_feature (55)..(640): Homolog of NCBI NO: 27368875 NR Description: MRP-like ABC transporter [Oryza sativa (japonica
  misc_feature (211)..(1480): Homolog of NCBI NO: 30686160 NR Description: ABC transporter family protein [Arabidopsis
  misc_feature (188)..(1480): Homolog of NCBI NO: 27368877 NR Description: MRP-like ABC transporter [Oryza sativa (japonica
  misc_feature (148)..(1479): Homolog of NCBI NO: 27368873 NR Description: MRP-like ABC transporter [Oryza sativa (japonica
  misc_feature (236)..(1151): Homolog of NCBI NO: 15226801 NR Description: glutathione S-conjugate ABC transporter (AtMRP2); id: At2g34660.1, supported by cDNA: gi_2440014, supported by gi_2909780 [Arabidopsis thaliana] >gi|7442653|pir||T01369 ABC
MFKPFGFAAETGSHLLTTQWLQLGNSLCLKERISIAMQVTFLAFFLIHLALKWFGVVRNRGSNDVEEDLKKQSITVKQSFSYNISLLCSVSILGTHCFILLLLFRDSVVSRCDSSVSVFSAEVSQSFSWLFVSVVVVKIRERRLVKFPWMLRSWWLCSFILSFSFDAHFITAKHEPLEFQDYADLTGLLASLFLLAVSIRGKTGFHLLESSGNTEPLLLGDQTEQNKKDSYSSSSPYGNATLFQRITFSWINPLFSLGYKRPLEKDDVPDIDVKDSARFCSHAFDQKLKTTKEKEGPGNAFFYNSVLRYVWRKAAINAVFAVVNASTAYIGPYLINDFVEFLSEKQSQSLNHGYLLALGFLTAKIVETVTQRQWIFGARQLGLRLRAALISHIYQKGLVLSSQSRQSHTSGEIINYMSVDVQRITDFIWYVNNIWMLPIQIFSAIYILQKHLGLGALAALVTTLMVMACNYPLTRLQRNYQSDIMNAKDDRMKATSEILKNMKILKLQAWDNQFLNKVKTLRKKEYDCLWKSLRLQAFTTFILWGAPSLISVVTFVTCMLMGVKLTAGAVLSALATFQMLQSPIFGLPDLLSALVQSKVSADRIASYLQQSETQKDAVEYCSKDHTELSVEIENGAFSWEPESSRPTLDDIELKVKSGMKVAVCGAVGSGKSSLLSSILGEIQKLKGTVRVSGKQAYVPQSPWILSGTIRDNILFGSMYESEKYERTVKACALIKDFELFSNGDLTEIGERGINMSGGQKQRIQIARAVYQNADIYLLDDPFSAVDAHTGRELFEDCLMGILKDKTVLYVTHQVEFLPAADLILVMQNGRVMQAGKFEELLKQNIGFEVLVGAHNEALDSILSIEKSSRNFKEGSKDDTASIAESLQTHCDSEHNISTENKKKEAKLVQDEETEKGVIGKEVYLAYLTTVKGGLLVPFIILAQSCFQMLQIASNYWMAWTAPPTAESIPKLGMGRILLVYALLAAGSSLCVLARTILVAIGGLSTAETFFSRMLCSIFRAPMSFFDSTPTGRILNRASTDQSVLDLEMAVKLGWCAFSIIQIVGTIFVMSQVAWQRYYTPTARELSRMSGVERAPILHHFAESLAGATTIRAFDQRDRFISSNLVLIDSHSRPWFHVASAMEWLSFRLNLLSHFVFAFSLVLLVTLPEGVINPSIAGLGVTYGLSLNVLQATVIWNICNAENKMISVERILQYSKIPSEAPLVIDGHRPLDNWPNVGSIVFRDLQVRYAEHFPAVLKNITCEFPGGKKIGVVGRTGSGKSTLIQALFRIVEPSQGTIVIDNVDITKIGLHDLRSRLGIIPQDPALFDGTIRLNLDPLAQYTDHEIWEAIDKCQLGDVIRAKDERLDATVVENGENWSVGQRQLVCLGRVLLKKSNILVLDEATASVDSATDGVIQKIINQEFKDRTVVTIAHRIHTVIESDLVLVLSDGRIAEFDSPAKLLQREDSFFSKLIKEYSLRSNHFAGSNDLLS

SEQ ID NO: 82990 - protein, 1454 aa, Arabidopsis thaliana
  peptide (1)..(1454): Ceres Seq. ID no. 12668122
  misc_feature (275)..(548): Pfam Name: ABC transporter transmembrane region Pfam Description: ABC transporter transmembrane region
  misc_feature (1)..(1038): Homolog of NCBI NO: 27368881 NR Description: MRP-like ABC transporter [Oryza sativa (japonica
  misc_feature (89)..(1439): Homolog of NCBI NO: 22331862 NR Description: ABC transporter family protein; protein id:
  misc_feature (1)..(1038): Homolog of NCBI NO: 30682473 NR Description: ABC transporter family protein [Arabidopsis
  misc_feature (1291)..(1444): Homolog of NCBI NO: 30682473 NR Description: ABC transporter family protein [Arabidopsis
  misc_feature (612)..(1445): Homolog of NCBI NO: 27368875 NR Description: MRP-like ABC transporter [Oryza sativa (japonica
  misc_feature (19)..(604): Homolog of NCBI NO: 27368875 NR Description: MRP-like ABC transporter [Oryza sativa (japonica
  misc_feature (175)..(1444): Homolog of NCBI NO: 30686160 NR Description: ABC transporter family protein [Arabidopsis
  misc_feature (152)..(1444): Homolog of NCBI NO: 27368877 NR Description: MRP-like ABC transporter [Oryza sativa (japonica
  misc_feature (112)..(1443): Homolog of NCBI NO: 27368873 NR Description: MRP-like ABC transporter [Oryza sativa (japonica
  misc_feature (200)..(1115): Homolog of NCBI NO: 15226801 NR Description: glutathione S-conjugate ABC transporter (AtMRP2); id: At2g34660.1, supported by cDNA: gi_2440014, supported by gi_2909780 [Arabidopsis thaliana] >gi|7442653|pir||T01369 ABC
MQVTFLAFFLIHLALKWFGVVRNRGSNDVEEDLKKQSITVKQSFSYNISLLCSVSILGTHCFILLLLFRDSVVSRCDSSVSVFSAEVSQSFSWLFVSVVVVKIRERRLVKFPWMLRSWWLCSFILSFSFDAHFITAKHEPLEFQDYADLTGLLASLFLLAVSIRGKTGFHLLESSGNTEPLLLGDQTEQNKKDSYSSSSPYGNATLFQRITFSWINPLFSLGYKRPLEKDDVPDIDVKDSARFCSHAFDQKLKTTKEKEGPGNAFFYNSVLRYVWRKAAINAVFAVVNASTAYIGPYLINDFVEFLSEKQSQSLNHGYLLALGFLTAKIVETVTQRQWIFGARQLGLRLRAALISHIYQKGLVLSSQSRQSHTSGEIINYMSVDVQRITDFIWYVNNIWMLPIQIFSAIYILQKHLGLGALAALVTTLMVMACNYPLTRLQRNYQSDIMNAKDDRMKATSEILKNMKILKLQAWDNQFLNKVKTLRKKEYDCLWKSLRLQAFTTFILWGAPSLISVVTFVTCMLMGVKLTAGAVLSALATFQMLQSPIFGLPDLLSALVQSKVSADRIASYLQQSETQKDAVEYCSKDHTELSVEIENGAFSWEPESSRPTLDDIELKVKSGMKVAVCGAVGSGKSSLLSSILGEIQKLKGTVRVSGKQAYVPQSPWILSGTIRDNILFGSMYESEKYERTVKACALIKDFELFSNGDLTEIGERGINMSGGQKQRIQIARAVYQNADIYLLDDPFSAVDAHTGRELFEDCLMGILKDKTVLYVTHQVEFLPAADLILVMQNGRVMQAGKFEELLKQNIGFEVLVGAHNEALDSILSIEKSSRNFKEGSKDDTASIAESLQTHCDSEHNISTENKKKEAKLVQDEETEKGVIGKEVYLAYLTTVKGGLLVPFIILAQSCFQMLQIASNYWMAWTAPPTAESIPKLGMGRILLVYALLAAGSSLCVLARTILVAIGGLSTAETFFSRMLCSIFRAPMSFFDSTPTGRILNRASTDQSVLDLEMAVKLGWCAFSIIQIVGTIFVMSQVAWQRYYTPTARELSRMSGVERAPILHHFAESLAGATTIRAFDQRDRFISSNLVLIDSHSRPWFHVASAMEWLSFRLNLLSHFVFAFSLVLLVTLPEGVINPSIAGLGVTYGLSLNVLQATVIWNICNAENKMISVERILQYSKIPSEAPLVIDGHRPLDNWPNVGSIVFRDLQVRYAEHFPAVLKNITCEFPGGKKIGVVGRTGSGKSTLIQALFRIVEPSQGTIVIDNVDITKIGLHDLRSRLGIIPQDPALFDGTIRLNLDPLAQYTDHEIWEAIDKCQLGDVIRAKDERLDATVVENGENWSVGQRQLVCLGRVLLKKSNILVLDEATASVDSATDGVIQKIINQEFKDRTVVTIAHRIHTVIESDLVLVLSDGRIAEFDSPAKLLQREDSFFSKLIKEYSLRSNHFAGSNDLLS

SEQ ID NO: 82991 - protein, 1341 aa, Arabidopsis thaliana
  peptide (1)..(1341): Ceres Seq. ID no. 12668123
  misc_feature (162)..(435): Pfam Name: ABC transporter transmembrane region Pfam Description: ABC transporter transmembrane region
  misc_feature (1)..(925): Homolog of NCBI NO: 27368881 NR Description: MRP-like ABC transporter [Oryza sativa (japonica
  misc_feature (1)..(1326): Homolog of NCBI NO: 22331862 NR Description: ABC transporter family protein; protein id:
  misc_feature (1)..(925): Homolog of NCBI NO: 30682473 NR Description: ABC transporter family protein [Arabidopsis
  misc_feature (1178)..(1331): Homolog of NCBI NO: 30682473 NR Description: ABC transporter family protein [Arabidopsis
  misc_feature (499)..(1332): Homolog of NCBI NO: 27368875 NR Description: MRP-like ABC transporter [Oryza sativa (japonica
  misc_feature (1)..(491): Homolog of NCBI NO: 27368875 NR Description: MRP-like ABC transporter [Oryza sativa (japonica
  misc_feature (62)..(1331): Homolog of NCBI NO: 30686160 NR Description: ABC transporter family protein [Arabidopsis
  misc_feature (39)..(1331): Homolog of NCBI NO: 27368877 NR Description: MRP-like ABC transporter [Oryza sativa (japonica
  misc_feature (1)..(1330): Homolog of NCBI NO: 27368873 NR Description: MRP-like ABC transporter [Oryza sativa (japonica
  misc_feature (87)..(1002): Homolog of NCBI NO: 15226801 NR Description: glutathione S-conjugate ABC transporter (AtMRP2); id: At2g34660.1, supported by cDNA: gi_2440014, supported by gi_2909780 [Arabidopsis thaliana] >gi|7442653|pir||T01369 ABC
MLRSWWLCSFILSFSFDAHFITAKHEPLEFQDYADLTGLLASLFLLAVSIRGKTGFHLLESSGNTEPLLLGDQTEQNKKDSYSSSSPYGNATLFQRITFSWINPLFSLGYKRPLEKDDVPDIDVKDSARFCSHAFDQKLKTTKEKEGPGNAFFYNSVLRYVWRKAAINAVFAVVNASTAYIGPYLINDFVEFLSEKQSQSLNHGYLLALGFLTAKIVETVTQRQWIFGARQLGLRLRAALISHIYQKGLVLSSQSRQSHTSGEIINYMSVDVQRITDFIWYVNNIWMLPIQIFSAIYILQKHLGLGALAALVTTLMVMACNYPLTRLQRNYQSDIMNAKDDRMKATSEILKNMKILKLQAWDNQFLNKVKTLRKKEYDCLWKSLRLQAFTTFILWGAPSLISVVTFVTCMLMGVKLTAGAVLSALATFQMLQSPIFGLPDLLSALVQSKVSADRIASYLQQSETQKDAVEYCSKDHTELSVEIENGAFSWEPESSRPTLDDIELKVKSGMKVAVCGAVGSGKSSLLSSILGEIQKLKGTVRVSGKQAYVPQSPWILSGTIRDNILFGSMYESEKYERTVKACALIKDFELFSNGDLTEIGERGINMSGGQKQRIQIARAVYQNADIYLLDDPFSAVDAHTGRELFEDCLMGILKDKTVLYVTHQVEFLPAADLILVMQNGRVMQAGKFEELLKQNIGFEVLVGAHNEALDSILSIEKSSRNFKEGSKDDTASIAESLQTHCDSEHNISTENKKKEAKLVQDEETEKGVIGKEVYLAYLTTVKGGLLVPFIILAQSCFQMLQIASNYWMAWTAPPTAESIPKLGMGRILLVYALLAAGSSLCVLARTILVAIGGLSTAETFFSRMLCSIFRAPMSFFDSTPTGRILNRASTDQSVLDLEMAVKLGWCAFSIIQIVGTIFVMSQVAWQRYYTPTARELSRMSGVERAPILHHFAESLAGATTIRAFDQRDRFISSNLVLIDSHSRPWFHVASAMEWLSFRLNLLSHFVFAFSLVLLVTLPEGVINPSIAGLGVTYGLSLNVLQATVIWNICNAENKMISVERILQYSKIPSEAPLVIDGHRPLDNWPNVGSIVFRDLQVRYAEHFPAVLKNITCEFPGGKKIGVVGRTGSGKSTLIQALFRIVEPSQGTIVIDNVDITKIGLHDLRSRLGIIPQDPALFDGTIRLNLDPLAQYTDHEIWEAIDKCQLGDVIRAKDERLDATVVENGENWSVGQRQLVCLGRVLLKKSNILVLDEATASVDSATDGVIQKIINQEFKDRTVVTIAHRIHTVIESDLVLVLSDGRIAEFDSPAKLLQREDSFFSKLIKEYSLRSNHFAGSNDLLS

SEQ ID NO: 82992 - DNA, 564 bp, Arabidopsis thaliana
  misc_feature (1)..(564): Ceres Seq. ID no. 12668131
  misc_feature: MA Experiment ID: 20000327 Result: Up-regulated in Transcription
  misc_feature: MA Experiment 20000327 PARAMETER Experiment Name: At_42deg_Heat_Sub_P Parameter: Age (day) Value: 14
  misc_feature: MA Experiment 20000327 PARAMETER Experiment Name: At_42deg_Heat_Sub_P Parameter: Organism Value: A. thaliana
  misc_feature: MA Experiment 20000327 PARAMETER Experiment Name: At_42deg_Heat_Sub_P Parameter: Plant Line Value: WS
  misc_feature: MA Experiment 20000327 PARAMETER Experiment Name: At_42deg_Heat_Sub_P Parameter: Temperature (deg C) Value: 42 vs. 22
  misc_feature: MA Experiment 20000327 PARAMETER Experiment Name: At_42deg_Heat_Sub_P Parameter: Timepoint (hr) Value: 1
  misc_feature: MA Experiment 20000327 PARAMETER Experiment Name: At_42deg_Heat_Sub_P Parameter: Tissue Value: Aerial
atgggatcaaccgccgccaccgctctcctcctcctcctcctcctagtggcagtccctgccgtctttgccgtgactttccaggtgggagataatgatggttggaccattggtgtcgagtacacgagttgggttagtgaaaagactttcagagtcggtgacactctagagttcaaatatggtccttcgcactcggtggccgtggtgaataaagccgactatgatggctgcgaaactagcagaccgacgcagagtttttctgacggagacactaagatcgatcttacaaaagtaggtgctatacacttcctttgccttactcctggtcactgcagccttggcatgaaactcgccgtacaagtacttgctgccgtttcattagagcctccaccgtctccatcagctccatcgccgtctccatcagctccatcaccgtctccatcagctccatcgccgtctccatcgccgggaaacgcagaaaacttgaaaaatgcggcgtctaagggaatcatgagctatggaaagattgtggtgacgatggtgttgatgtacggtgtgcttaattag

SEQ ID NO: 82993 - protein, 187 aa, Arabidopsis thaliana
  peptide (1)..(187): Ceres Seq. ID no. 12668132
  misc_feature (34)..(114): Pfam Name: Plastocyanin-like domain Pfam Description: Plastocyanin-like domain
  misc_feature (1)..(187): Homolog of NCBI NO: 15232287 NR Description: stellacyanin (uclacyanin 3) - like protein; id: At3g60270.1 [Arabidopsis thaliana] >gi|11250058|pir||T49222
  misc_feature (1)..(155): Homolog of NCBI NO: 15232289 NR Description: uclacyanin 3; protein id: At3g60280.1, supported cDNA: gi_1518058, supported by cDNA: gi_3395769 [Arabidopsis
  misc_feature (1)..(185): Homolog of NCBI NO: 21554060 NR Description: phytocyanin [Arabidopsis thaliana]
  misc_feature (1)..(185): Homolog of NCBI NO: 25453521 NR Description: blue copper-binding protein II [imported] -
  misc_feature (1)..(185): Homolog of NCBI NO: 15224960 NR Description: phytocyanin; protein id: At2g44790.1, supported cDNA: 19760., supported by cDNA: gi_15146301, supported by cDNA: supported by cDNA: gi_20147336, supported by cDNA: gi_3399768
  misc_feature (1)..(185): Homolog of NCBI NO: 25453522 NR Description: blue copper-binding protein II [imported] -
  misc_feature (6)..(173): Homolog of NCBI NO: 14140127 NR Description: uclacyanin 3-like protein [Oryza sativa]
  misc_feature (1)..(130): Homolog of NCBI NO: 25282796 NR Description: uclacyanin II [imported] - Arabidopsis thaliana
  misc_feature (5)..(181): Homolog of NCBI NO: 38636761 NR Description: putative blue copper binding protein [Oryza
  misc_feature (5)..(180): Homolog of NCBI NO: 38636760 NR Description: putative blue copper binding protein [Oryza
MGSTAATALLLLLLLVAVPAVFAVTFQVGDNDGWTIGVEYTSWVSEKTFRVGDTLEFKYGPSHSVAVVNKADYDGCETSRPTQSFSDGDTKIDLTKVGAIHFLCLTPGHCSLGMKLAVQVLAAVSLEPPPSPSAPSPSPSAPSPSPSAPSPSPSPGNAENLKNAASKGIMSYGKIVVTMVLMYGVLN

SEQ ID NO: 82994 - DNA, 690 bp, Arabidopsis thaliana
  misc_feature (1)..(690): Ceres Seq. ID no. 12668145
  misc_feature: MA Experiment ID: 20000180 Result: Up-regulated in Transcription
  misc_feature: MA Experiment 20000180 PARAMETER Experiment Name: At_Germinating_Seeds_P Parameter: Age (hr) Value: 24 vs. 0
  misc_feature: MA Experiment 20000180 PARAMETER Experiment Name: At_Germinating_Seeds_P Parameter: Tissue Value: Germinating Seeds
  misc_feature: MA Experiment ID: 20000185 Result: Down-regulated in Transcription
  misc_feature: MA Experiment 20000185 PARAMETER Experiment Name: At_Roots__P Parameter: Age (day) Value: 7 vs. 21
  misc_feature: MA Experiment 20000185 PARAMETER Experiment Name: At_Roots__P Parameter: Organism Value: A. thaliana
  misc_feature: MA Experiment 20000185 PARAMETER Experiment Name: At_Roots__P Parameter: Tissue Value: Roots vs. Whole Plant
  misc_feature: MA Experiment ID: 20000439 Result: Down-regulated in Transcription
  misc_feature: MA Experiment 20000439 PARAMETER Experiment Name: At_Roots__P Parameter: Age (day) Value: 14 vs. 21
  misc_feature: MA Experiment 20000439 PARAMETER Experiment Name: At_Roots__P Parameter: Organism Value: A. thaliana
  misc_feature: MA Experiment 20000439 PARAMETER Experiment Name: At_Roots__P Parameter: Tissue Value: Roots vs. Whole Plant
  misc_feature: MA Experiment ID: 20000794 Result: Down-regulated in Transcription
  misc_feature: MA Experiment 20000794 PARAMETER Experiment Name: At_Petals_P Parameter: Age (day) Value: 23-25 days
  misc_feature: MA Experiment 20000794 PARAMETER Experiment Name: At_Petals_P Parameter: Plant Line Value: WS
  misc_feature: MA Experiment 20000794 PARAMETER Experiment Name: At_Petals_P Parameter: Tissue Value: Petals vs. Whole plant
  misc_feature: MA Experiment ID: 20001451 Result: Down-regulated in Transcription
  misc_feature: MA Experiment 20001451 PARAMETER Experiment Name: At_Far-red-induction_P Parameter: Age (day) Value: 7
  misc_feature: MA Experiment 20001451 PARAMETER Experiment Name: At_Far-red-induction_P Parameter: Light Value: Far-red vs. White
  misc_feature: MA Experiment 20001451 PARAMETER Experiment Name: At_Far-red-induction_P Parameter: Organism Value: A. thaliana
  misc_feature: MA Experiment 20001451 PARAMETER Experiment Name: At_Far-red-induction_P Parameter: Plant Line Value: Columbia
  misc_feature: MA Experiment 20001451 PARAMETER Experiment Name: At_Far-red-induction_P Parameter: Timepoint (hr) Value: 24
  misc_feature: MA Experiment 20001451 PARAMETER Experiment Name: At_Far-red-induction_P Parameter: Tissue Value: Whole Plant
  misc_feature: MA Experiment ID: 20001757 Result: Up-regulated in Transcription
  misc_feature: MA Experiment 20001757 PARAMETER Experiment Name: At_50mM_NH4NO3_L-to-H_P Parameter: Timepoint (hr) Value: 6
  misc_feature: MA Experiment 20001757 PARAMETER Experiment Name: At_50mM_NH4NO3_L-to-H_P Parameter: Tissue Value: Leaf
  misc_feature: MA Experiment 20001757 PARAMETER Experiment Name: At_50mM_NH4NO3_L-to-H_P Parameter: Treatment Value: 50mM NH4NO3 vs 100mM Mannitol
  misc_feature: MA Experiment ID: 20001905 Result: Down-regulated in Transcription
  misc_feature: MA Experiment 20001905 PARAMETER Experiment Name: At_Drought_Reproduction_P Parameter: Age (day) Value: 40
  misc_feature: MA Experiment 20001905 PARAMETER Experiment Name: At_Drought_Reproduction_P Parameter: Organism Value: A. thaliana
  misc_feature: MA Experiment 20001905 PARAMETER Experiment Name: At_Drought_Reproduction_P Parameter: Plant Line Value: WS
  misc_feature: MA Experiment 20001905 PARAMETER Experiment Name: At_Drought_Reproduction_P Parameter: Timepoint (day) Value: 10
  misc_feature: MA Experiment 20001905 PARAMETER Experiment Name: At_Drought_Reproduction_P Parameter: Tissue Value: Rosettes
  misc_feature: MA Experiment 20001905 PARAMETER Experiment Name: At_Drought_Reproduction_P Parameter: Treatment Value: Drought vs. No Drought
  misc_feature: MA Experiment ID: 20001906 Result: Down-regulated in Transcription
  misc_feature: MA Experiment 20001906 PARAMETER Experiment Name: At_Drought_Reproduction_P Parameter: Age (day) Value: 35
  misc_feature: MA Experiment 20001906 PARAMETER Experiment Name: At_Drought_Reproduction_P Parameter: Organism Value: A. thaliana
  misc_feature: MA Experiment 20001906 PARAMETER Experiment Name: At_Drought_Reproduction_P Parameter: Plant Line Value: WS
  misc_feature: MA Experiment 20001906 PARAMETER Experiment Name: At_Drought_Reproduction_P Parameter: Timepoint (day) Value: 5
  misc_feature: MA Experiment 20001906 PARAMETER Experiment Name: At_Drought_Reproduction_P Parameter: Tissue Value: Siliques
  misc_feature: MA Experiment 20001906 PARAMETER Experiment Name: At_Drought_Reproduction_P Parameter: Treatment Value: Drought vs. No Drought
  misc_feature: MA Experiment ID: 20001911 Result: Down-regulated in Transcription
  misc_feature: MA Experiment 20001911 PARAMETER Experiment Name: At_Drought_Reproduction_P Parameter: Age (day) Value: 40
  misc_feature: MA Experiment 20001911 PARAMETER Experiment Name: At_Drought_Reproduction_P Parameter: Organism Value: A. thaliana
  misc_feature: MA Experiment 20001911 PARAMETER Experiment Name: At_Drought_Reproduction_P Parameter: Plant Line Value: WS
  misc_feature: MA Experiment 20001911 PARAMETER Experiment Name: At_Drought_Reproduction_P Parameter: Timepoint (day) Value: 10
  misc_feature: MA Experiment 20001911 PARAMETER Experiment Name: At_Drought_Reproduction_P Parameter: Tissue Value: Flowers
  misc_feature: MA Experiment 20001911 PARAMETER Experiment Name: At_Drought_Reproduction_P Parameter: Treatment Value: Drought vs. No Drought
atggtaaaatttgcaatcttgagagataattttttttcctttttttggtttgattctggagataaagcttggtcttttaattgcagcttgagtcggagaagtcttgtttatgttttagttgcttcgccgtgtttgttgttaccagcgttgtcttcatctgcgaagactaaatcaaagagtccttatgatgagagacggttactagaacagaacaagaggatacagagagagaacaatgctcctgacgagtttcctaactttgttagagaaggttttgaggttaaggtattagcttctgataattacatcaaggctgattctggcctcatatatcgggatttcaatgttggtcaaggtgatttcccaaaagatggtcagcaggtgacttttcactacattggctacaatgagtctggaaggcgaatagatagtacttacatacaaggttctcctgctagaatccgcatgggaaccaatgcacttgttccaggatttgaaatgggaattcgtgacatgaagcccggtgggcgaagaaggattataatccctccagaattgggacctccggtgggaccttcgaccttcttcagctcgaagcaatttgaagttttcgacgtggagttgctcagtatccagaattgtgagaggaggactataataggtttctactcagatgtcacatgcagttaa

SEQ ID NO: 82995 - protein, 229 aa, Arabidopsis thaliana
  peptide (1)..(229): Ceres Seq. ID no. 12668146
  misc_feature (117)..(164): Pfam Name: FKBP-type peptidyl-prolyl cis-trans isomerase Pfam Description: FKBP-type peptidyl-prolyl cis-trans isomerase
  misc_feature (30)..(229): Homolog of NCBI NO: 30695188 NR Description: immunophilin / FKBP-type peptidyl-prolyl
  misc_feature (1)..(164): Homolog of NCBI NO: 11283515 NR Description: hypothetical protein T8B10.30 - Arabidopsis >gi|7287985|emb|CAB81823.1| hypothetical protein [Arabidopsis
  misc_feature (197)..(229): Homolog of NCBI NO: 11283515 NR Description: hypothetical protein T8B10.30 - Arabidopsis >gi|7287985|emb|CAB81823.1| hypothetical protein [Arabidopsis
  misc_feature (29)..(229): Homolog of NCBI NO: 33146997 NR Description: putative FKBP-type peptidyl-prolyl cis-trans
  misc_feature (101)..(212): Homolog of NCBI NO: 37520410 NR Description: FKBP-type peptidyl-prolyl cis-trans isomerase
  misc_feature (98)..(211): Homolog of NCBI NO: 39997372 NR Description: FKBP-type peptidyl-prolyl cis-trans isomerase
  misc_feature (96)..(212): Homolog of NCBI NO: 22298646 NR Description: FKBP-type peptidyl-prolyl cis-trans isomerase
  misc_feature (99)..(212): Homolog of NCBI NO: 23129112 NR Description: hypothetical protein [Nostoc punctiforme]
  misc_feature (96)..(213): Homolog of NCBI NO: 23042526 NR Description: hypothetical protein [Trichodesmium erythraeum
  misc_feature (103)..(209): Homolog of NCBI NO: 23053670 NR Description: hypothetical protein [Geobacter metallireducens]
MVKFAILRDNFFSFFWFDSGDKAWSFNCSLSRRSLVYVLVASPCLLLPALSSSAKTKSKSPYDERRLLEQNKRIQRENNAPDEFPNFVREGFEVKVLASDNYIKADSGLIYRDFNVGQGDFPKDGQQVTFHYIGYNESGRRIDSTYIQGSPARIRMGTNALVPGFEMGIRDMKPGGRRRIIIPPELGPPVGPSTFFSSKQFEVFDVELLSIQNCERRTIIGFYSDVTCS

SEQ ID NO: 82996 - DNA, 2431 bp, Arabidopsis thaliana
  misc_feature (1)..(2431): Ceres Seq. ID no. 12668155
  misc_feature: MA Experiment ID: 20000265 Result: Up-regulated in Transcription
  misc_feature: MA Experiment 20000265 PARAMETER Experiment Name: At_Open_Flower_P Parameter: Age (day) Value: 21
  misc_feature: MA Experiment 20000265 PARAMETER Experiment Name: At_Open_Flower_P Parameter: Plant Line Value: WS
  misc_feature: MA Experiment 20000265 PARAMETER Experiment Name: At_Open_Flower_P Parameter: Tissue Value: Closed Flower vs. Whole Plant
  misc_feature: MA Experiment ID: 20001248 Result: Down-regulated in Transcription
  misc_feature: MA Experiment 20001248 PARAMETER Experiment Name: At_Far-red-induction_P Parameter: Age (day) Value: 7
  misc_feature: MA Experiment 20001248 PARAMETER Experiment Name: At_Far-red-induction_P Parameter: Light Value: Far-red vs. White
  misc_feature: MA Experiment 20001248 PARAMETER Experiment Name: At_Far-red-induction_P Parameter: Organism Value: A. thaliana
  misc_feature: MA Experiment 20001248 PARAMETER Experiment Name: At_Far-red-induction_P Parameter: Plant Line Value: Columbia
  misc_feature: MA Experiment 20001248 PARAMETER Experiment Name: At_Far-red-induction_P Parameter: Timepoint (hr) Value: 4
  misc_feature: MA Experiment 20001248 PARAMETER Experiment Name: At_Far-red-induction_P Parameter: Tissue Value: Whole Plant
ggtgccatttgtgtgacacagaaaatcccagcaaatgtcgagagagagagaaagtataaagaatgtgaccggcaaaaaagagataaaacagtagagaaccatattatttgccatttcttagaagaatccactgcatgatattcaaaatctcaccaacaaccattggcgaagaagaaaagaaaaagaagataactctgtagattttgaaagagatgcttcggcttccttcttctatgccaatcgtttcttttcccgccaatcccaatctgctgattaatccacaaccatcttggccgtcgcgaagaggaaactccgccgttgttgtctccgctgcgtctagagatgtagatagtttcactagtaaatccggttatttgttcagtctcagtgccgatgaggctgattctttgtcggagtacaattttcccaggattgatgggatgtataagaagaaacctctgattctgcttcgtagattagctcagatcggaactacgtttagttattggtttgggcttcgcttagctgatgaggctttggaacgctctgatcaaatgttcaaggtacgagcagcggagcttaggaaattgcttgtggagctaggtccggcgtacgtcaaaatcgctcaagctgtttcatctcgtcctgatttgatacctcctatatacttggatgaactctccctgctacaagatcaaataactccgttttcaaccgaagttgctttcaatatgattgaggatgaacttggtcttcctatagatgagcttttctctgagatttctcctgagcctgttgctgcagcgtcccttggacaggtatatcaagctaggctccgtagaagtggaaaggttgttgctgtcaaagtgcagcgccctggtgtacgagctgcaattgctttggacacattaattcttcggtatatagcgggtttgattaaaaaggctggaagattcaactctgatctcgaggcagttgttgatgaatgggcaacaagtctgtttaaggtaaatcaaattgaatgcaggagatggattacttgaatgaagctcaaaacggaataaaatttaggaagttgtatggtggcatcaaagatgtcttggttccaaagatgtacacagagtacagtaccagcaaagttcttgtaatggaatgggtggagggtcagaagcttaatgaagttaatgacctttatttagttgaggttggcgtttactgttcgtttaatcaacttctggagtatggattttaccatgccgatccccaccctgggaattttcttcgcacgtatgatgggcaacttgcatacttagattttggtatgatgggggactttaggccagaattacgtgatggattcatggaagcatgtcttcatcttgtaaatcgtgacttcaaagcgctggctaaagactttgtaactctggggcttcttccaccaacagcagaaaagagcgctgtgacaaaggctttaaccgatgtttttcaagatgcaatttctagaggagttcgcaatataagcttcggtgacctgcttggcgacttgggaaaaacaatgtaccgattcaaattcagaatacccccttatttttctctagttatccgcagtcttgctgttttggagggcattgccatcggtataagcccaaactacaaggttctaggcagtacatacccttggattgctagaaagattctaaccgacagctctccacaactgaaaagctctctgcaaaatcttttatatgagtctcttaggacagagacagcattagttcagaaaccagtggtggggacagaatctaatattgccatgaagcaaatgcttgcttttactttcacggaacagggttcttttgtaagagaaatccttcttcgagaattcgctaagggtcttgatgcatatggattggcaactttggactcttttacattttctggttcaggaccatcgagttccttgacagaagaagacatgacaaaccttagaactttctatcgcctcatctcattgttctcagggatgcaaaaggctaaaagcgtaagcacgcaagtaaaagcggtgagtaaatatggtgaggcgctcacgcctctagacgaagcatcactggtcatgtatcagcttccatcagcacaagagatgcttccgattctctccatattacctgagcttccacaggaatcacaacagaggttgcttcagttgccaggtgacttggttggaagattggtgactcgggcttttgctagaaccattcgcaggatttttctttgatgtccgattacaaataaaaacttgcagattttagacaagactactgtgatttgagttatttataatttttacataaacttgaagagaatcagaggaatggctgttttgatcccacaacagcatatttataaaagaaaagcatcaacatcttcttca

SEQ ID NO: 82997 - protein, 417 aa, Arabidopsis thaliana
  peptide (1)..(417): Ceres Seq. ID no. 12668156
  misc_feature (1)..(417): Homolog of NCBI NO: 19698835 NR Description: unknown protein [Arabidopsis thaliana]
  misc_feature (1)..(284): Homolog of NCBI NO: 38344898 NR Description: OSJNBb0079B02.1 [Oryza sativa (japonica
  misc_feature (2)..(305): Homolog of NCBI NO: 17232452 NR Description: hypothetical protein [Nostoc sp. PCC 7120]
  misc_feature (212)..(417): Homolog of NCBI NO: 38344898 NR Description: OSJNBb0079B02.1 [Oryza sativa (japonica
  misc_feature (2)..(300): Homolog of NCBI NO: 23042448 NR Description: hypothetical protein [Trichodesmium erythraeum
  misc_feature (2)..(300): Homolog of NCBI NO: 22298493 NR Description: ORF_ID:tll0950~hypothetical protein
  misc_feature (2)..(299): Homolog of NCBI NO: 16331408 NR Description: ABC1-like [Synechocystis sp. PCC 6803]
  misc_feature (2)..(300): Homolog of NCBI NO: 33867054 NR Description: possible protein kinase: ABC1 family sp. WH 8102] >gi|33639655|emb|CAE09039.1| possible protein
  misc_feature (2)..(303): Homolog of NCBI NO: 18412437 NR Description: expressed protein; protein id: At1g79600.1, by cDNA: gi_14532489, supported by cDNA: gi_18086324 [Arabidopsis >gi|7715610|gb|AAF68128.1|AC010793_23 F20B17.3 [Arabidopsis
  misc_feature (2)..(302): Homolog of NCBI NO: 33862270 NR Description: possible protein kinase:ABC1 family marinus subsp. pastoris str. CCMP1378] possible protein kinase:ABC1 family [Prochlorococcus marinus
MQEMDYLNEAQNGIKFRKLYGGIKDVLVPKMYTEYSTSKVLVMEWVEGQKLNEVNDLYLVEVGVYCSFNQLLEYGFYHADPHPGNFLRTYDGQLAYLDFGMMGDFRPELRDGFMEACLHLVNRDFKALAKDFVTLGLLPPTAEKSAVTKALTDVFQDAISRGVRNISFGDLLGDLGKTMYRFKFRIPPYFSLVIRSLAVLEGIAIGISPNYKVLGSTYPWIARKILTDSSPQLKSSLQNLLYESLRTETALVQKPVVGTESNIAMKQMLAFTFTEQGSFVREILLREFAKGLDAYGLATLDSFTFSGSGPSSSLTEEDMTNLRTFYRLISLFSGMQKAKSVSTQVKAVSKYGEALTPLDEASLVMYQLPSAQEMLPILSILPELPQESQQRLLQLPGDLVGRLVTRAFARTIRRIFL

SEQ ID NO: 82998 - protein, 414 aa, Arabidopsis thaliana
  peptide (1)..(414): Ceres Seq. ID no. 12668157
  misc_feature (1)..(414): Homolog of NCBI NO: 19698835 NR Description: unknown protein [Arabidopsis thaliana]
  misc_feature (1)..(281): Homolog of NCBI NO: 38344898 NR Description: OSJNBb0079B02.1 [Oryza sativa (japonica
  misc_feature (1)..(302): Homolog of NCBI NO: 17232452 NR Description: hypothetical protein [Nostoc sp. PCC 7120]
  misc_feature (209)..(414): Homolog of NCBI NO: 38344898 NR Description: OSJNBb0079B02.1 [Oryza sativa (japonica
  misc_feature (1)..(297): Homolog of NCBI NO: 23042448 NR Description: hypothetical protein [Trichodesmium erythraeum
  misc_feature (1)..(297): Homolog of NCBI NO: 22298493 NR Description: ORF_ID:tll0950~hypothetical protein
  misc_feature (1)..(296): Homolog of NCBI NO: 16331408 NR Description: ABC1-like [Synechocystis sp. PCC 6803]
  misc_feature (1)..(297): Homolog of NCBI NO: 33867054 NR Description: possible protein kinase: ABC1 family sp. WH 8102] >gi|33639655|emb|CAE09039.1| possible protein
  misc_feature (1)..(300): Homolog of NCBI NO: 18412437 NR Description: expressed protein; protein id: At1g79600.1, by cDNA: gi_14532489, supported by cDNA: gi_18086324 [Arabidopsis >gi|7715610|gb|AAF68128.1|AC010793_23 F20B17.3 [Arabidopsis
  misc_feature (1)..(299): Homolog of NCBI NO: 33862270 NR Description: possible protein kinase:ABC1 family marinus subsp. pastoris str. CCMP1378] possible protein kinase:ABC1 family [Prochlorococcus marinus
MDYLNEAQNGIKFRKLYGGIKDVLVPKMYTEYSTSKVLVMEWVEGQKLNEVNDLYLVEVGVYCSFNQLLEYGFYHADPHPGNFLRTYDGQLAYLDFGMMGDFRPELRDGFMEACLHLVNRDFKALAKDFVTLGLLPPTAEKSAVTKALTDVFQDAISRGVRNISFGDLLGDLGKTMYRFKFRIPPYFSLVIRSLAVLEGIAIGISPNYKVLGSTYPWIARKILTDSSPQLKSSLQNLLYESLRTETALVQKPVVGTESNIAMKQMLAFTFTEQGSFVREILLREFAKGLDAYGLATLDSFTFSGSGPSSSLTEEDMTNLRTFYRLISLFSGMQKAKSVSTQVKAVSKYGEALTPLDEASLVMYQLPSAQEMLPILSILPELPQESQQRLLQLPGDLVGRLVTRAFARTIRRIFL

SEQ ID NO: 82999 - protein, 387 aa, Arabidopsis thaliana
  peptide (1)..(387): Ceres Seq. ID no. 12668158
  misc_feature (1)..(387): Homolog of NCBI NO: 19698835 NR Description: unknown protein [Arabidopsis thaliana]
  misc_feature (1)..(254): Homolog of NCBI NO: 38344898 NR Description: OSJNBb0079B02.1 [Oryza sativa (japonica
  misc_feature (1)..(275): Homolog of NCBI NO: 17232452 NR Description: hypothetical protein [Nostoc sp. PCC 7120]
  misc_feature (182)..(387): Homolog of NCBI NO: 38344898 NR Description: OSJNBb0079B02.1 [Oryza sativa (japonica
  misc_feature (1)..(270): Homolog of NCBI NO: 23042448 NR Description: hypothetical protein [Trichodesmium erythraeum
  misc_feature (1)..(270): Homolog of NCBI NO: 22298493 NR Description: ORF_ID:tll0950~hypothetical protein
  misc_feature (1)..(269): Homolog of NCBI NO: 16331408 NR Description: ABC1-like [Synechocystis sp. PCC 6803]
  misc_feature (1)..(270): Homolog of NCBI NO: 33867054 NR Description: possible protein kinase: ABC1 family sp. WH 8102] >gi|33639655|emb|CAE09039.1| possible protein
  misc_feature (1)..(273): Homolog of NCBI NO: 18412437 NR Description: expressed protein; protein id: At1g79600.1, by cDNA: gi_14532489, supported by cDNA: gi_18086324 [Arabidopsis >gi|7715610|gb|AAF68128.1|AC010793_23 F20B17.3 [Arabidopsis
  misc_feature (1)..(272): Homolog of NCBI NO: 33862270 NR Description: possible protein kinase:ABC1 family marinus subsp. pastoris str. CCMP1378] possible protein kinase:ABC1 family [Prochlorococcus marinus
MYTEYSTSKVLVMEWVEGQKLNEVNDLYLVEVGVYCSFNQLLEYGFYHADPHPGNFLRTYDGQLAYLDFGMMGDFRPELRDGFMEACLHLVNRDFKALAKDFVTLGLLPPTAEKSAVTKALTDVFQDAISRGVRNISFGDLLGDLGKTMYRFKFRIPPYFSLVIRSLAVLEGIAIGISPNYKVLGSTYPWIARKILTDSSPQLKSSLQNLLYESLRTETALVQKPVVGTESNIAMKQMLAFTFTEQGSFVREILLREFAKGLDAYGLATLDSFTFSGSGPSSSLTEEDMTNLRTFYRLISLFSGMQKAKSVSTQVKAVSKYGEALTPLDEASLVMYQLPSAQEMLPILSILPELPQESQQRLLQLPGDLVGRLVTRAFARTIRRIFL

SEQ ID NO: 83000 - DNA, 1714 bp, Arabidopsis thaliana
  misc_feature (1)..(1714): Ceres Seq. ID no. 12668176
  misc_feature: MA Experiment ID: 20000169 Result: Up-regulated in Transcription
  misc_feature: MA Experiment 20000169 PARAMETER Experiment Name: At_100uM_ABA_P Parameter: Age (day) Value: 14
  misc_feature: MA Experiment 20000169 PARAMETER Experiment Name: At_100uM_ABA_P Parameter: Organism Value: A. thaliana
  misc_feature: MA Experiment 20000169 PARAMETER Experiment Name: At_100uM_ABA_P Parameter: Plant Line Value: WS
  misc_feature: MA Experiment 20000169 PARAMETER Experiment Name: At_100uM_ABA_P Parameter: Timepoint (hr) Value: 6
  misc_feature: MA Experiment 20000169 PARAMETER Experiment Name: At_100uM_ABA_P Parameter: Tissue Value: Aerial
  misc_feature: MA Experiment 20000169 PARAMETER Experiment Name: At_100uM_ABA_P Parameter: Treatment Value: 100uM ABA vs. No Treatment
  misc_feature: MA Experiment ID: 20000180 Result: Up-regulated in Transcription
  misc_feature: MA Experiment 20000180 PARAMETER Experiment Name: At_Germinating_Seeds_P Parameter: Age (hr) Value: 24 vs. 0
  misc_feature: MA Experiment 20000180 PARAMETER Experiment Name: At_Germinating_Seeds_P Parameter: Tissue Value: Germinating Seeds
  misc_feature: MA Experiment ID: 20000182 Result: Up-regulated in Transcription
  misc_feature: MA Experiment 20000182 PARAMETER Experiment Name: At_2mM_SA_P Parameter: Age (day) Value: 14
  misc_feature: MA Experiment 20000182 PARAMETER Experiment Name: At_2mM_SA_P Parameter: Organism Value: A. thaliana
  misc_feature: MA Experiment 20000182 PARAMETER Experiment Name: At_2mM_SA_P Parameter: Plant Line Value: WS
  misc_feature: MA Experiment 20000182 PARAMETER Experiment Name: At_2mM_SA_P Parameter: Timepoint (hr) Value: 6
  misc_feature: MA Experiment 20000182 PARAMETER Experiment Name: At_2mM_SA_P Parameter: Tissue Value: Aerial
  misc_feature: MA Experiment 20000182 PARAMETER Experiment Name: At_2mM_SA_P Parameter: Treatment Value: 2mM SA vs. No Treatment
  misc_feature: MA Experiment ID: 20000438 Result: Down-regulated in Transcription
  misc_feature: MA Experiment 20000438 PARAMETER Experiment Name: At_Shoots__P Parameter: Age (day) Value: 14
  misc_feature: MA Experiment 20000438 PARAMETER Experiment Name: At_Shoots__P Parameter: Tissue Value: Shoots vs. Whole Plant
  misc_feature: MA Experiment ID: 20000439 Result: Up-regulated in Transcription
  misc_feature: MA Experiment 20000439 PARAMETER Experiment Name: At_Roots__P Parameter: Age (day) Value: 14 vs. 21
  misc_feature: MA Experiment 20000439 PARAMETER Experiment Name: At_Roots__P Parameter: Organism Value: A. thaliana
  misc_feature: MA Experiment 20000439 PARAMETER Experiment Name: At_Roots__P Parameter: Tissue Value: Roots vs. Whole Plant
  misc_feature: MA Experiment ID: 20000453 Result: Up-regulated in Transcription
  misc_feature: MA Experiment 20000453 PARAMETER Experiment Name: At_100uM_ABA_P Parameter: Age (day) Value: 15
  misc_feature: MA Experiment 20000453 PARAMETER Experiment Name: At_100uM_ABA_P Parameter: Organism Value: A. thaliana
  misc_feature: MA Experiment 20000453 PARAMETER Experiment Name: At_100uM_ABA_P Parameter: Plant Line Value: WS
  misc_feature: MA Experiment 20000453 PARAMETER Experiment Name: At_100uM_ABA_P Parameter: Timepoint (hr) Value: 24
  misc_feature: MA Experiment 20000453 PARAMETER Experiment Name: At_100uM_ABA_P Parameter: Tissue Value: Aerial
  misc_feature: MA Experiment 20000453 PARAMETER Experiment Name: At_100uM_ABA_P Parameter: Treatment Value: 100uM ABA vs. No Treatment
  misc_feature: MA Experiment ID: 20000527 Result: Down-regulated in Transcription
  misc_feature: MA Experiment 20000527 PARAMETER Experiment Name: At_10percent_PEG_P Parameter: Age (day) Value: 20
  misc_feature: MA Experiment 20000527 PARAMETER Experiment Name: At_10percent_PEG_P Parameter: Organism Value: A. thaliana
  misc_feature: MA Experiment 20000527 PARAMETER Experiment Name: At_10percent_PEG_P Parameter: Plant Line Value: WS
  misc_feature: MA Experiment 20000527 PARAMETER Experiment Name: At_10percent_PEG_P Parameter: Timepoint (day) Value: 20
  misc_feature: MA Experiment 20000527 PARAMETER Experiment Name: At_10percent_PEG_P Parameter: Tissue Value: Whole Plant
  misc_feature: MA Experiment 20000527 PARAMETER Experiment Name: At_10percent_PEG_P Parameter: Treatment Value: 10percent PEG vs. No Treatment
  misc_feature: MA Experiment ID: 20000794 Result: Up-regulated in Transcription
  misc_feature: MA Experiment 20000794 PARAMETER Experiment Name: At_Petals_P Parameter: Age (day) Value: 23-25 days
  misc_feature: MA Experiment 20000794 PARAMETER Experiment Name: At_Petals_P Parameter: Plant Line Value: WS
  misc_feature: MA Experiment 20000794 PARAMETER Experiment Name: At_Petals_P Parameter: Tissue Value: Petals vs. Whole plant
  misc_feature: MA Experiment ID: 20001904 Result: Up-regulated in Transcription
  misc_feature: MA Experiment 20001904 PARAMETER Experiment Name: At_Drought_Reproduction_P Parameter: Age (day) Value: 37
  misc_feature: MA Experiment 20001904 PARAMETER Experiment Name: At_Drought_Reproduction_P Parameter: Organism Value: A. thaliana
  misc_feature: MA Experiment 20001904 PARAMETER Experiment Name: At_Drought_Reproduction_P Parameter: Plant Line Value: WS
  misc_feature: MA Experiment 20001904 PARAMETER Experiment Name: At_Drought_Reproduction_P Parameter: Timepoint (day) Value: 7
  misc_feature: MA Experiment 20001904 PARAMETER Experiment Name: At_Drought_Reproduction_P Parameter: Tissue Value: Rosettes
  misc_feature: MA Experiment 20001904 PARAMETER Experiment Name: At_Drought_Reproduction_P Parameter: Treatment Value: Drought vs. No Drought
  misc_feature: MA Experiment ID: 20001905 Result: Up-regulated in Transcription
  misc_feature: MA Experiment 20001905 PARAMETER Experiment Name: At_Drought_Reproduction_P Parameter: Age (day) Value: 40
  misc_feature: MA Experiment 20001905 PARAMETER Experiment Name: At_Drought_Reproduction_P Parameter: Organism Value: A. thaliana
  misc_feature: MA Experiment 20001905 PARAMETER Experiment Name: At_Drought_Reproduction_P Parameter: Plant Line Value: WS
  misc_feature: MA Experiment 20001905 PARAMETER Experiment Name: At_Drought_Reproduction_P Parameter: Timepoint (day) Value: 10
  misc_feature: MA Experiment 20001905 PARAMETER Experiment Name: At_Drought_Reproduction_P Parameter: Tissue Value: Rosettes
  misc_feature: MA Experiment 20001905 PARAMETER Experiment Name: At_Drought_Reproduction_P Parameter: Treatment Value: Drought vs. No Drought
  misc_feature: MA Experiment ID: 20001906 Result: Up-regulated in Transcription
  misc_feature: MA Experiment 20001906 PARAMETER Experiment Name: At_Drought_Reproduction_P Parameter: Age (day) Value: 35
  misc_feature: MA Experiment 20001906 PARAMETER Experiment Name: At_Drought_Reproduction_P Parameter: Organism Value: A. thaliana
  misc_feature: MA Experiment 20001906 PARAMETER Experiment Name: At_Drought_Reproduction_P Parameter: Plant Line Value: WS
  misc_feature: MA Experiment 20001906 PARAMETER Experiment Name: At_Drought_Reproduction_P Parameter: Timepoint (day) Value: 5
  misc_feature: MA Experiment 20001906 PARAMETER Experiment Name: At_Drought_Reproduction_P Parameter: Tissue Value: Siliques
  misc_feature: MA Experiment 20001906 PARAMETER Experiment Name: At_Drought_Reproduction_P Parameter: Treatment Value: Drought vs. No Drought
  misc_feature: MA Experiment ID: 20001911 Result: Up-regulated in Transcription
  misc_feature: MA Experiment 20001911 PARAMETER Experiment Name: At_Drought_Reproduction_P Parameter: Age (day) Value: 40
  misc_feature: MA Experiment 20001911 PARAMETER Experiment Name: At_Drought_Reproduction_P Parameter: Organism Value: A. thaliana
  misc_feature: MA Experiment 20001911 PARAMETER Experiment Name: At_Drought_Reproduction_P Parameter: Plant Line Value: WS
  misc_feature: MA Experiment 20001911 PARAMETER Experiment Name: At_Drought_Reproduction_P Parameter: Timepoint (day) Value: 10
  misc_feature: MA Experiment 20001911 PARAMETER Experiment Name: At_Drought_Reproduction_P Parameter: Tissue Value: Flowers
  misc_feature: MA Experiment 20001911 PARAMETER Experiment Name: At_Drought_Reproduction_P Parameter: Treatment Value: Drought vs. No Drought
gtctctttcgttggagagacagaggaaaaaatgacgactacttcagaaatttctcttcaagaagaatacgtcaccgacgccgttgaccaccgtggacttgccgccagaagatccaataccggtagatggagagccgccttgttcataatcggtgtggaggtggctgagaggttcgcttactatggaatcggatcaaacttaataagctacttgactggaccacttggtgaatccacggctgtagccgccgctaatgtcaacgcgtggtcaggaattgccactcttcttcctgttcttggagcttttgtcgccgacgcatttctcggtcgttaccgaacaattatcatctcttctcttatctacgtcctgggattggcgtttctgactttatctgcgtttctgattcccaatactactgaagtgacatcttcaacttcttcttttctcaatgtactcttcttcttctctctgtatttggtggctattggacaaagtggacacaagccttgtgttcaagcttttggtgctgaccagtttgatgaaaaagactctcaagagaaatctgacagaagctccttcttcaactggtggtaccttagtctgtctgcaggaatctgctttgcgattttagttgttgtatacatccaggaagagttcagctgggcttttgggtttggaatcccatgtgtgttcatggtgatctctcttgttcttttcgtgtcagggagaaggatttataggtacagtaaaagaagacatgaagaggaaataaacccttttacgaggataggtagagtcttctttgtagcactcaagaaccaaagattgagttcatcagacttgtgcaaagttgagctagaggcaaatacatccccagagaaacagagttttttcaacaaagcattgcttgtacccaatgattcttctcaaggagaaaacgcatccaagtctagtgatgttgaagatgccacagctcttatcaggctaattccagtatggtttacgactctggcttacgcgataccctacgcgcaatacatgacatttttcactaagcaaggcgtcacaatggatagaacaattcttcctggtgttaagatcccacctgcttctcttcaggtctttatcggcatatcaatagtcctctttgtccccatctacgaccgagttttcgtccccatcgccaggttaataaccaaagaaccttgtggcatcacaaccctcaaaagaattggaactggaattgtactgtcgactatcactatggtaattgcagctctggttgagttcaagcggctcgagactgcgaaagaacacgggcttatagaccaaccggaagcaactcttccaatgtcgatatggtggttaatccctcagtacttgttgctgggattggctgacgtatatactttagtgggaatgcaagagttcttctacagccaagtccctactgagctgagaagcatcggtctcgcgctttacttaagcgcgttgggcgtgggaagcttattaagcagcttactcatctctctgatagacttggccactggaggagacgcaggaaacagctggtttaacagtaatctgaacagagctcatcttgattacttctattggttactagcgattgttagcgccgttgggttctttacgttcttgttcatttccaagtcgtacatctatcgtcgagtggatcgagtgtagtttccaaatg

SEQ ID NO: 83001 - protein, 567 aa, Arabidopsis thaliana
  peptide (1)..(567): Ceres Seq. ID no. 12668177
  misc_feature (111)..(498): Pfam Name: POT family Pfam Description: POT family
  misc_feature (11)..(567): Homolog of NCBI NO: 18086410 NR Description: At1g72120/F28P5_2 [Arabidopsis thaliana]
  misc_feature (11)..(565): Homolog of NCBI NO: 15218352 NR Description: oligopeptide transporter, putative; protein id: [Arabidopsis thaliana] >gi|25406146|pir||E96744 probable
  misc_feature (10)..(567): Homolog of NCBI NO: 15218352 NR Description: oligopeptide transporter, putative; protein id: [Arabidopsis thaliana] >gi|25406146|pir||E96744 probable
  misc_feature (16)..(567): Homolog of NCBI NO: 15219905 NR Description: peptide transporter, putative; protein id: [Arabidopsis thaliana] >gi|25402971|pir||G86358 protein Similar
  misc_feature (16)..(567): Homolog of NCBI NO: 28416707 NR Description: At1g22550 [Arabidopsis thaliana]
  misc_feature (16)..(567): Homolog of NCBI NO: 15219907 NR Description: peptide transporter, putative; protein id: [Arabidopsis thaliana] >gi|25402974|pir||B86359 protein Similar
  misc_feature (28)..(565): Homolog of NCBI NO: 30687920 NR Description: oligopeptide transporter -related [Arabidopsis
  misc_feature (28)..(565): Homolog of NCBI NO: 25402970 NR Description: Similar to peptide transporter [imported] - thaliana >gi|6587835|gb|AAF18524.1|AC006551_10 Similar to peptide
  misc_feature (19)..(561): Homolog of NCBI NO: 15218381 NR Description: peptide transporter PTR2-B, putative; protein id:
  misc_feature (301)..(563): Homolog of NCBI NO: 34908688 NR Description: P0039A07.25 [Oryza sativa (japonica
VSFVGETEEKMTTTSEISLQEEYVTDAVDHRGLAARRSNTGRWRAALFIIGVEVAERFAYYGIGSNLISYLTGPLGESTAVAAANVNAWSGIATLLPVLGAFVADAFLGRYRTIIISSLIYVLGLAFLTLSAFLIPNTTEVTSSTSSFLNVLFFFSLYLVAIGQSGHKPCVQAFGADQFDEKDSQEKSDRSSFFNWWYLSLSAGICFAILVVVYIQEEFSWAFGFGIPCVFMVISLVLFVSGRRIYRYSKRRHEEEINPFTRIGRVFFVALKNQRLSSSDLCKVELEANTSPEKQSFFNKALLVPNDSSQGENASKSSDVEDATALIRLIPVWFTTLAYAIPYAQYMTFFTKQGVTMDRTILPGVKIPPASLQVFIGISIVLFVPIYDRVFVPIARLITKEPCGITTLKRIGTGIVLSTITMVIAALVEFKRLETAKEHGLIDQPEATLPMSIWWLIPQYLLLGLADVYTLVGMQEFFYSQVPTELRSIGLALYLSALGVGSLLSSLLISLIDLATGGDAGNSWFNSNLNRAHLDYFYWLLAIVSAVGFFTFLFISKSYIYRRVDRV

SEQ ID NO: 83002 - protein, 557 aa, Arabidopsis thaliana
  peptide (1)..(557): Ceres Seq. ID no. 12668178
  misc_feature (101)..(488): Pfam Name: POT family Pfam Description: POT family
  misc_feature (1)..(557): Homolog of NCBI NO: 18086410 NR Description: At1g72120/F28P5_2 [Arabidopsis thaliana]
  misc_feature (1)..(555): Homolog of NCBI NO: 15218352 NR Description: oligopeptide transporter, putative; protein id: [Arabidopsis thaliana] >gi|25406146|pir||E96744 probable
  misc_feature (1)..(557): Homolog of NCBI NO: 15218352 NR Description: oligopeptide transporter, putative; protein id: [Arabidopsis thaliana] >gi|25406146|pir||E96744 probable
  misc_feature (6)..(557): Homolog of NCBI NO: 15219905 NR Description: peptide transporter, putative; protein id: [Arabidopsis thaliana] >gi|25402971|pir||G86358 protein Similar
  misc_feature (6)..(557): Homolog of NCBI NO: 28416707 NR Description: At1g22550 [Arabidopsis thaliana]
  misc_feature (6)..(557): Homolog of NCBI NO: 15219907 NR Description: peptide transporter, putative; protein id: [Arabidopsis thaliana] >gi|25402974|pir||B86359 protein Similar
  misc_feature (18)..(555): Homolog of NCBI NO: 30687920 NR Description: oligopeptide transporter -related [Arabidopsis
  misc_feature (18)..(555): Homolog of NCBI NO: 25402970 NR Description: Similar to peptide transporter [imported] - thaliana >gi|6587835|gb|AAF18524.1|AC006551_10 Similar to peptide
  misc_feature (9)..(551): Homolog of NCBI NO: 15218381 NR Description: peptide transporter PTR2-B, putative; protein id:
  misc_feature (291)..(553): Homolog of NCBI NO: 34908688 NR Description: P0039A07.25 [Oryza sativa (japonica
MTTTSEISLQEEYVTDAVDHRGLAARRSNTGRWRAALFIIGVEVAERFAYYGIGSNLISYLTGPLGESTAVAAANVNAWSGIATLLPVLGAFVADAFLGRYRTIIISSLIYVLGLAFLTLSAFLIPNTTEVTSSTSSFLNVLFFFSLYLVAIGQSGHKPCVQAFGADQFDEKDSQEKSDRSSFFNWWYLSLSAGICFAILVVVYIQEEFSWAFGFGIPCVFMVISLVLFVSGRRIYRYSKRRHEEEINPFTRIGRVFFVALKNQRLSSSDLCKVELEANTSPEKQSFFNKALLVPNDSSQGENASKSSDVEDATALIRLIPVWFTTLAYAIPYAQYMTFFTKQGVTMDRTILPGVKIPPASLQVFIGISIVLFVPIYDRVFVPIARLITKEPCGITTLKRIGTGIVLSTITMVIAALVEFKRLETAKEHGLIDQPEATLPMSIWWLIPQYLLLGLADVYTLVGMQEFFYSQVPTELRSIGLALYLSALGVGSLLSSLLISLIDLATGGDAGNSWFNSNLNRAHLDYFYWLLAIVSAVGFFTFLFISKSYIYRRVDRV

SEQ ID NO: 83003 - protein, 336 aa, Arabidopsis thaliana
  peptide (1)..(336): Ceres Seq. ID no. 12668179
  misc_feature (1)..(267): Pfam Name: POT family Pfam Description: POT family
  misc_feature (1)..(336): Homolog of NCBI NO: 18086410 NR Description: At1g72120/F28P5_2 [Arabidopsis thaliana]
  misc_feature (1)..(334): Homolog of NCBI NO: 15218352 NR Description: oligopeptide transporter, putative; protein id: [Arabidopsis thaliana] >gi|25406146|pir||E96744 probable
  misc_feature (1)..(336): Homolog of NCBI NO: 15218352 NR Description: oligopeptide transporter, putative; protein id: [Arabidopsis thaliana] >gi|25406146|pir||E96744 probable
  misc_feature (1)..(336): Homolog of NCBI NO: 15219905 NR Description: peptide transporter, putative; protein id: [Arabidopsis thaliana] >gi|25402971|pir||G86358 protein Similar
  misc_feature (1)..(336): Homolog of NCBI NO: 28416707 NR Description: At1g22550 [Arabidopsis thaliana]
  misc_feature (1)..(336): Homolog of NCBI NO: 15219907 NR Description: peptide transporter, putative; protein id: [Arabidopsis thaliana] >gi|25402974|pir||B86359 protein Similar
  misc_feature (1)..(334): Homolog of NCBI NO: 30687920 NR Description: oligopeptide transporter -related [Arabidopsis
  misc_feature (1)..(334): Homolog of NCBI NO: 25402970 NR Description: Similar to peptide transporter [imported] - thaliana >gi|6587835|gb|AAF18524.1|AC006551_10 Similar to peptide
  misc_feature (1)..(330): Homolog of NCBI NO: 15218381 NR Description: peptide transporter PTR2-B, putative; protein id:
  misc_feature (70)..(332): Homolog of NCBI NO: 34908688 NR Description: P0039A07.25 [Oryza sativa (japonica
MVISLVLFVSGRRIYRYSKRRHEEEINPFTRIGRVFFVALKNQRLSSSDLCKVELEANTSPEKQSFFNKALLVPNDSSQGENASKSSDVEDATALIRLIPVWFTTLAYAIPYAQYMTFFTKQGVTMDRTILPGVKIPPASLQVFIGISIVLFVPIYDRVFVPIARLITKEPCGITTLKRIGTGIVLSTITMVIAALVEFKRLETAKEHGLIDQPEATLPMSIWWLIPQYLLLGLADVYTLVGMQEFFYSQVPTELRSIGLALYLSALGVGSLLSSLLISLIDLATGGDAGNSWFNSNLNRAHLDYFYWLLAIVSAVGFFTFLFISKSYIYRRVDRV

SEQ ID NO: 83004 - DNA, 1940 bp, Arabidopsis thaliana
  misc_feature (1)..(1940): Ceres Seq. ID no. 12668180
  misc_feature: MA Experiment ID: 20000180 Result: Down-regulated in Transcription
  misc_feature: MA Experiment 20000180 PARAMETER Experiment Name: At_Germinating_Seeds_P Parameter: Age (hr) Value: 24 vs. 0
  misc_feature: MA Experiment 20000180 PARAMETER Experiment Name: At_Germinating_Seeds_P Parameter: Tissue Value: Germinating Seeds
  misc_feature: MA Experiment ID: 20000185 Result: Down-regulated in Transcription
  misc_feature: MA Experiment 20000185 PARAMETER Experiment Name: At_Roots__P Parameter: Age (day) Value: 7 vs. 21
  misc_feature: MA Experiment 20000185 PARAMETER Experiment Name: At_Roots__P Parameter: Organism Value: A. thaliana
  misc_feature: MA Experiment 20000185 PARAMETER Experiment Name: At_Roots__P Parameter: Tissue Value: Roots vs. Whole Plant
  misc_feature: MA Experiment ID: 20000264 Result: Up-regulated in Transcription
  misc_feature: MA Experiment 20000264 PARAMETER Experiment Name: At_Open_Flower_P Parameter: Age (day) Value: 21
  misc_feature: MA Experiment 20000264 PARAMETER Experiment Name: At_Open_Flower_P Parameter: Plant Line Value: WS
  misc_feature: MA Experiment 20000264 PARAMETER Experiment Name: At_Open_Flower_P Parameter: Tissue Value: Open Flower vs. Whole Plant
  misc_feature: MA Experiment ID: 20000438 Result: Down-regulated in Transcription
  misc_feature: MA Experiment 20000438 PARAMETER Experiment Name: At_Shoots__P Parameter: Age (day) Value: 14
  misc_feature: MA Experiment 20000438 PARAMETER Experiment Name: At_Shoots__P Parameter: Tissue Value: Shoots vs. Whole Plant
  misc_feature: MA Experiment ID: 20000439 Result: Down-regulated in Transcription
  misc_feature: MA Experiment 20000439 PARAMETER Experiment Name: At_Roots__P Parameter: Age (day) Value: 14 vs. 21
  misc_feature: MA Experiment 20000439 PARAMETER Experiment Name: At_Roots__P Parameter: Organism Value: A. thaliana
  misc_feature: MA Experiment 20000439 PARAMETER Experiment Name: At_Roots__P Parameter: Tissue Value: Roots vs. Whole Plant
  misc_feature: MA Experiment ID: 20000451 Result: Down-regulated in Transcription
  misc_feature: MA Experiment 20000451 PARAMETER Experiment Name: At_CS6879_Shoots-Roots_P Parameter: Age (day) Value: 14
  misc_feature: MA Experiment 20000451 PARAMETER Experiment Name: At_CS6879_Shoots-Roots_P Parameter: Organism Value: A. thaliana
  misc_feature: MA Experiment 20000451 PARAMETER Experiment Name: At_CS6879_Shoots-Roots_P Parameter: Plant Line Value: CS6879 vs. WS
  misc_feature: MA Experiment 20000451 PARAMETER Experiment Name: At_CS6879_Shoots-Roots_P Parameter: Tissue Value: Roots
  misc_feature: MA Experiment ID: 20000709 Result: Up-regulated in Transcription
  misc_feature: MA Experiment 20000709 PARAMETER Experiment Name: At_15mM_NH4NO3_L-to-H_P Parameter: Age (hr) Value: 14
  misc_feature: MA Experiment 20000709 PARAMETER Experiment Name: At_15mM_NH4NO3_L-to-H_P Parameter: Organism Value: A. thaliana
  misc_feature: MA Experiment 20000709 PARAMETER Experiment Name: At_15mM_NH4NO3_L-to-H_P Parameter: Plant Line Value: WS
  misc_feature: MA Experiment 20000709 PARAMETER Experiment Name: At_15mM_NH4NO3_L-to-H_P Parameter: Timepoint (hr) Value: 4
  misc_feature: MA Experiment 20000709 PARAMETER Experiment Name: At_15mM_NH4NO3_L-to-H_P Parameter: Tissue Value: Aerial
  misc_feature: MA Experiment 20000709 PARAMETER Experiment Name: At_15mM_NH4NO3_L-to-H_P Parameter: Treatment Value: 15mM NH4NO3 vs. 30mM Mannitol
  misc_feature: MA Experiment ID: 20000794 Result: Up-regulated in Transcription
  misc_feature: MA Experiment 20000794 PARAMETER Experiment Name: At_Petals_P Parameter: Age (day) Value: 23-25 days
  misc_feature: MA Experiment 20000794 PARAMETER Experiment Name: At_Petals_P Parameter: Plant Line Value: WS
  misc_feature: MA Experiment 20000794 PARAMETER Experiment Name: At_Petals_P Parameter: Tissue Value: Petals vs. Whole plant
  misc_feature: MA Experiment ID: 20001247 Result: Down-regulated in Transcription
  misc_feature: MA Experiment 20001247 PARAMETER Experiment Name: At_Far-red-induction_P Parameter: Age (day) Value: 7
  misc_feature: MA Experiment 20001247 PARAMETER Experiment Name: At_Far-red-induction_P Parameter: Light Value: Far-red vs. White
  misc_feature: MA Experiment 20001247 PARAMETER Experiment Name: At_Far-red-induction_P Parameter: Organism Value: A. thaliana
  misc_feature: MA Experiment 20001247 PARAMETER Experiment Name: At_Far-red-induction_P Parameter: Plant Line Value: Columbia
  misc_feature: MA Experiment 20001247 PARAMETER Experiment Name: At_Far-red-induction_P Parameter: Timepoint (hr) Value: 1
  misc_feature: MA Experiment 20001247 PARAMETER Experiment Name: At_Far-red-induction_P Parameter: Tissue Value: Whole Plant
  misc_feature: MA Experiment ID: 20001248 Result: Up-regulated in Transcription
  misc_feature: MA Experiment 20001248 PARAMETER Experiment Name: At_Far-red-induction_P Parameter: Age (day) Value: 7
  misc_feature: MA Experiment 20001248 PARAMETER Experiment Name: At_Far-red-induction_P Parameter: Light Value: Far-red vs. White
  misc_feature: MA Experiment 20001248 PARAMETER Experiment Name: At_Far-red-induction_P Parameter: Organism Value: A. thaliana
  misc_feature: MA Experiment 20001248 PARAMETER Experiment Name: At_Far-red-induction_P Parameter: Plant Line Value: Columbia
  misc_feature: MA Experiment 20001248 PARAMETER Experiment Name: At_Far-red-induction_P Parameter: Timepoint (hr) Value: 4
  misc_feature: MA Experiment 20001248 PARAMETER Experiment Name: At_Far-red-induction_P Parameter: Tissue Value: Whole Plant
  misc_feature: MA Experiment ID: 20001557 Result: Up-regulated in Transcription
  misc_feature: MA Experiment 20001557 PARAMETER Experiment Name: At_Drought_Soil_Dry_P Parameter: Age (day) Value: 27
  misc_feature: MA Experiment 20001557 PARAMETER Experiment Name: At_Drought_Soil_Dry_P Parameter: Organism Value: A. thaliana
  misc_feature: MA Experiment 20001557 PARAMETER Experiment Name: At_Drought_Soil_Dry_P Parameter: Plant Line Value: WS
  misc_feature: MA Experiment 20001557 PARAMETER Experiment Name: At_Drought_Soil_Dry_P Parameter: Post Timepoint (hr) Value: 3
  misc_feature: MA Experiment 20001557 PARAMETER Experiment Name: At_Drought_Soil_Dry_P Parameter: Post-Treatment Value: Re-Water vs. No Drought
  misc_feature: MA Experiment 20001557 PARAMETER Experiment Name: At_Drought_Soil_Dry_P Parameter: Timepoint (day) Value: 13
  misc_feature: MA Experiment 20001557 PARAMETER Experiment Name: At_Drought_Soil_Dry_P Parameter: Treatment Value: Drought vs. No Drought
  misc_feature: MA Experiment ID: 20001910 Result: Up-regulated in Transcription
  misc_feature: MA Experiment 20001910 PARAMETER Experiment Name: At_Drought_Reproduction_P Parameter: Age (day) Value: 37
  misc_feature: MA Experiment 20001910 PARAMETER Experiment Name: At_Drought_Reproduction_P Parameter: Organism Value: A. thaliana
  misc_feature: MA Experiment 20001910 PARAMETER Experiment Name: At_Drought_Reproduction_P Parameter: Plant Line Value: WS
  misc_feature: MA Experiment 20001910 PARAMETER Experiment Name: At_Drought_Reproduction_P Parameter: Timepoint (day) Value: 7
  misc_feature: MA Experiment 20001910 PARAMETER Experiment Name: At_Drought_Reproduction_P Parameter: Tissue Value: Flowers
  misc_feature: MA Experiment 20001910 PARAMETER Experiment Name: At_Drought_Reproduction_P Parameter: Treatment Value: Drought vs. No Drought
aatttctgagcgtggaggacaaggcaaaattcggtgtgcaaggcactggatattgggacccttgtttcctcgtgagagaattttcaatcctagggcttaaagagcacgttcctagtataaagctgattcacagatgcggagattcttgattaaccaagctaaaggtctcgtcgaccattctcgtcgtcaacatcaccacaaaagtccaagctttctctctcctcaacctcgtccccttgcttcttctcctcctgctctgtctcgtttcttctcttctacttcggagatgtctgcttctgattccacttcttctcttcccgttactcttgactccatcaatcccaaggttctgaaatgtgagtatgctgttcgaggagaaattgtcaacattgctcagaagttacaagaagacttgaagactaataaggatgcttatccctttgatgagataatctattgcaacattgggaatcctcaatctcttggtcagctgcctataaagttcttccgtgaggttctcgcattgtgtgaccacgcaagtcttttggatgagtctgaaacccatggtttgttcagtaccgattcaattgaccgagcatggaggattttggaccatattcccggaagagcaactggggcttacagtcatagccagggtatcaagggtttacgtgatgtaattgcagctggaatcgaagcacgtgatggtttccctgctgatccaaatgatattttcttgactgatggtgcaagtccagcggttcacatgatgatgcaacttctcttgagctcagagaaagatggtattctttccccgattcctcagtatccattgtactcggcttcaattgcccttcatggtggatctttggttccgtactatcttgatgaagcaacaggatggggactggaaatatctgaccttaagaagcaactagaggaagctaggtccaagggcatctctgtaagggccttggttgtcataaaccccggtaacccaactgggcaggttcttgcggaagaaaaccagcgtgacattgttaatttctgcaagcaagagggtttggttcttttagctgatgaagtctaccaagaaaatgtttacgtccctgacaaaaagttccattctttcaagaaagtggctcggtctttgggctatggagaaaaagatatctcgttagtctcgttccaatcagtctccaaaggatattatggagaatgtggaaaaagaggaggttacatggaggttactggattcacttctgatgtaagagaacagatatacaaaatggcttctgtgaatctttgttctaacatctctggtcaaattcttgctagccttgtcatgagcccacccaagcctggtgatgactcatatgactcatacatggcagaaagagatggaattctctcatccatggctaaacgtgcaaagactttggaagacgctctcaacagtttagaaggtgttacatgtaacagagccgaaggagcaatgtatctcttcccgcgaattaaccttcctcaaaaggctatcgaagctgctgaggctgaaaaaactgcaccagatgcgttctactgcaaacgccttctcaatgctactggtgtagttgtagtccctggttctggctttggacaggttcctggaacatggcactttagatgcacaatacttccacaagaagacaagattccagcgatagtgaatcgtctgacagagttccacaagagcttcatggacgagttccgcaactaaaaggacctgaccatgaagatgaacttaaagacccttttgaagaaaagtgtgatcagtttgagttattaaaaaaaagaaaacttgtgttttgaatttgatcaggcaattgtgatcagctaatttaattttagaatattttgtacttccattccatggcatgtcatatgaagatatgaaaattagt

SEQ ID NO: 83005 - protein, 540 aa, Arabidopsis thaliana
  peptide (1)..(540): Ceres Seq. ID no. 12668181
  misc_feature (191)..(531): Pfam Name: Aminotransferase class I and II Pfam Description: Aminotransferase class I and II
  misc_feature (1)..(540): Homolog of NCBI NO: 30698866 NR Description: alanine aminotransferase, putative [Arabidopsis >gi|25287211|pir||B96747 probable alanine aminotransferase
  misc_feature (9)..(540): Homolog of NCBI NO: 21954069 NR Description: putative alanine aminotransferase [Arabidopsis
  misc_feature (1)..(540): Homolog of NCBI NO: 9082270 NR Description: alanine aminotransferase [Arabidopsis thaliana]
  misc_feature (3)..(540): Homolog of NCBI NO: 21954071 NR Description: putative alanine aminotransferase [Arabidopsis
  misc_feature (72)..(540): Homolog of NCBI NO: 25287212 NR Description: hypothetical protein T13M22.3 [imported] - thaliana >gi|8778976|gb|AAF79891.1|AC026479_3 Strong similarity alanine aminotransferase from Zea mays gb|AF055898. It contains
  misc_feature (52)..(540): Homolog of NCBI NO: 34906732 NR Description: alanine aminotransferase [Oryza sativa (japonica
  misc_feature (63)..(540): Homolog of NCBI NO: 461498 NR Description: ALANINE AMINOTRANSFERASE 2 (GPT)
  misc_feature (63)..(540): Homolog of NCBI NO: 1703227 NR Description: ALANINE AMINOTRANSFERASE 2 (GPT)
  misc_feature (63)..(540): Homolog of NCBI NO: 4730884 NR Description: alanine aminotransferase [Oryza sativa]
  misc_feature (63)..(540): Homolog of NCBI NO: 37533928 NR Description: putative alanine aminotransferase [Oryza sativa
MRRFLINQAKGLVDHSRRQHHHKSPSFLSPQPRPLASSPPALSRFFSSTSEMSASDSTSSLPVTLDSINPKVLKCEYAVRGEIVNIAQKLQEDLKTNKDAYPFDEIIYCNIGNPQSLGQLPIKFFREVLALCDHASLLDESETHGLFSTDSIDRAWRILDHIPGRATGAYSHSQGIKGLRDVIAAGIEARDGFPADPNDIFLTDGASPAVHMMMQLLLSSEKDGILSPIPQYPLYSASIALHGGSLVPYYLDEATGWGLEISDLKKQLEEARSKGISVRALVVINPGNPTGQVLAEENQRDIVNFCKQEGLVLLADEVYQENVYVPDKKFHSFKKVARSLGYGEKDISLVSFQSVSKGYYGECGKRGGYMEVTGFTSDVREQIYKMASVNLCSNISGQILASLVMSPPKPGDDSYDSYMAERDGILSSMAKRAKTLEDALNSLEGVTCNRAEGAMYLFPRINLPQKAIEAAEAEKTAPDAFYCKRLLNATGVVVVPGSGFGQVPGTWHFRCTILPQEDKIPAIVNRLTEFHKSFMDEFRN

SEQ ID NO: 83006 - protein, 489 aa, Arabidopsis thaliana
  peptide (1)..(489): Ceres Seq. ID no. 12668182
  misc_feature (140)..(480): Pfam Name: Aminotransferase class I and II Pfam Description: Aminotransferase class I and II
  misc_feature (1)..(489): Homolog of NCBI NO: 30698866 NR Description: alanine aminotransferase, putative [Arabidopsis >gi|25287211|pir||B96747 probable alanine aminotransferase
  misc_feature (1)..(489): Homolog of NCBI NO: 21954069 NR Description: putative alanine aminotransferase [Arabidopsis
  misc_feature (1)..(489): Homolog of NCBI NO: 9082270 NR Description: alanine aminotransferase [Arabidopsis thaliana]
  misc_feature (1)..(489): Homolog of NCBI NO: 21954071 NR Description: putative alanine aminotransferase [Arabidopsis
  misc_feature (21)..(489): Homolog of NCBI NO: 25287212 NR Description: hypothetical protein T13M22.3 [imported] - thaliana >gi|8778976|gb|AAF79891.1|AC026479_3 Strong similarity alanine aminotransferase from Zea mays gb|AF055898. It contains
  misc_feature (1)..(489): Homolog of NCBI NO: 34906732 NR Description: alanine aminotransferase [Oryza sativa (japonica
  misc_feature (12)..(489): Homolog of NCBI NO: 461498 NR Description: ALANINE AMINOTRANSFERASE 2 (GPT)
  misc_feature (12)..(489): Homolog of NCBI NO: 1703227 NR Description: ALANINE AMINOTRANSFERASE 2 (GPT)
  misc_feature (12)..(489): Homolog of NCBI NO: 4730884 NR Description: alanine aminotransferase [Oryza sativa]
  misc_feature (12)..(489): Homolog of NCBI NO: 37533928 NR Description: putative alanine aminotransferase [Oryza sativa
MSASDSTSSLPVTLDSINPKVLKCEYAVRGEIVNIAQKLQEDLKTNKDAYPFDEIIYCNIGNPQSLGQLPIKFFREVLALCDHASLLDESETHGLFSTDSIDRAWRILDHIPGRATGAYSHSQGIKGLRDVIAAGIEARDGFPADPNDIFLTDGASPAVHMMMQLLLSSEKDGILSPIPQYPLYSASIALHGGSLVPYYLDEATGWGLEISDLKKQLEEARSKGISVRALVVINPGNPTGQVLAEENQRDIVNFCKQEGLVLLADEVYQENVYVPDKKFHSFKKVARSLGYGEKDISLVSFQSVSKGYYGECGKRGGYMEVTGFTSDVREQIYKMASVNLCSNISGQILASLVMSPPKPGDDSYDSYMAERDGILSSMAKRAKTLEDALNSLEGVTCNRAEGAMYLFPRINLPQKAIEAAEAEKTAPDAFYCKRLLNATGVVVVPGSGFGQVPGTWHFRCTILPQEDKIPAIVNRLTEFHKSFMDEFRN

SEQ ID NO: 83007 - protein, 329 aa, Arabidopsis thaliana
  peptide (1)..(329): Ceres Seq. ID no. 12668183
  misc_feature (1)..(320): Pfam Name: Aminotransferase class I and II Pfam Description: Aminotransferase class I and II
  misc_feature (1)..(329): Homolog of NCBI NO: 30698866 NR Description: alanine aminotransferase, putative [Arabidopsis >gi|25287211|pir||B96747 probable alanine aminotransferase
  misc_feature (1)..(329): Homolog of NCBI NO: 21954069 NR Description: putative alanine aminotransferase [Arabidopsis
  misc_feature (1)..(329): Homolog of NCBI NO: 9082270 NR Description: alanine aminotransferase [Arabidopsis thaliana]
  misc_feature (1)..(329): Homolog of NCBI NO: 21954071 NR Description: putative alanine aminotransferase [Arabidopsis
  misc_feature (1)..(329): Homolog of NCBI NO: 25287212 NR Description: hypothetical protein T13M22.3 [imported] - thaliana >gi|8778976|gb|AAF79891.1|AC026479_3 Strong similarity alanine aminotransferase from Zea mays gb|AF055898. It contains
  misc_feature (1)..(329): Homolog of NCBI NO: 34906732 NR Description: alanine aminotransferase [Oryza sativa (japonica
  misc_feature (1)..(329): Homolog of NCBI NO: 461498 NR Description: ALANINE AMINOTRANSFERASE 2 (GPT)
  misc_feature (1)..(329): Homolog of NCBI NO: 1703227 NR Description: ALANINE AMINOTRANSFERASE 2 (GPT)
  misc_feature (1)..(329): Homolog of NCBI NO: 4730884 NR Description: alanine aminotransferase [Oryza sativa]
  misc_feature (1)..(329): Homolog of NCBI NO: 37533928 NR Description: putative alanine aminotransferase [Oryza sativa
MMMQLLLSSEKDGILSPIPQYPLYSASIALHGGSLVPYYLDEATGWGLEISDLKKQLEEARSKGISVRALVVINPGNPTGQVLAEENQRDIVNFCKQEGLVLLADEVYQENVYVPDKKFHSFKKVARSLGYGEKDISLVSFQSVSKGYYGECGKRGGYMEVTGFTSDVREQIYKMASVNLCSNISGQILASLVMSPPKPGDDSYDSYMAERDGILSSMAKRAKTLEDALNSLEGVTCNRAEGAMYLFPRINLPQKAIEAAEAEKTAPDAFYCKRLLNATGVVVVPGSGFGQVPGTWHFRCTILPQEDKIPAIVNRLTEFHKSFMDEFRN

SEQ ID NO: 83008 - DNA, 809 bp, Arabidopsis thaliana
  misc_feature (1)..(809): Ceres Seq. ID no. 12668200
  misc_feature: MA Experiment ID: 108561 Result: Down-regulated in Transcription
  misc_feature: MA Experiment 108561 PARAMETER Experiment Name: At_100uM_ABA_cDNA_P Parameter: Timepoint (hr) Value: 6
  misc_feature: MA Experiment 108561 PARAMETER Experiment Name: At_100uM_ABA_cDNA_P Parameter: Tissue Value: Aerial
  misc_feature: MA Experiment 108561 PARAMETER Experiment Name: At_100uM_ABA_cDNA_P Parameter: Treatment Value: 100uM ABA vs. No Treatment
  misc_feature: MA Experiment ID: 108572 Result: Down-regulated in Transcription
  misc_feature: MA Experiment 108572 PARAMETER Experiment Name: At_Drought_cDNA_P Parameter: Timepoint (hr) Value: 1
  misc_feature: MA Experiment 108572 PARAMETER Experiment Name: At_Drought_cDNA_P Parameter: Tissue Value: Aerial
  misc_feature: MA Experiment 108572 PARAMETER Experiment Name: At_Drought_cDNA_P Parameter: Treatment Value: Drought vs. No Drought
  misc_feature: MA Experiment ID: 108573 Result: Down-regulated in Transcription
  misc_feature: MA Experiment 108573 PARAMETER Experiment Name: At_Drought_cDNA_P Parameter: Timepoint (hr) Value: 6
  misc_feature: MA Experiment 108573 PARAMETER Experiment Name: At_Drought_cDNA_P Parameter: Tissue Value: Aerial
  misc_feature: MA Experiment 108573 PARAMETER Experiment Name: At_Drought_cDNA_P Parameter: Treatment Value: Drought vs. No Drought
  misc_feature: MA Experiment ID: 108577 Result: Down-regulated in Transcription
  misc_feature: MA Experiment 108577 PARAMETER Experiment Name: At_42deg_Heat_cDNA_P Parameter: Temperature (deg C) Value: 42 vs. 22
  misc_feature: MA Experiment 108577 PARAMETER Experiment Name: At_42deg_Heat_cDNA_P Parameter: Timepoint (hr) Value: 6
  misc_feature: MA Experiment 108577 PARAMETER Experiment Name: At_42deg_Heat_cDNA_P Parameter: Tissue Value: Aerial
  misc_feature: MA Experiment ID: 108595 Result: Down-regulated in Transcription
  misc_feature: MA Experiment 108595 PARAMETER Experiment Name: At_Ler-pi_Ovule_cDNA_P Parameter: Plant Line Value: null
  misc_feature: MA Experiment ID: 20000173 Result: Down-regulated in Transcription
  misc_feature: MA Experiment 20000173 PARAMETER Experiment Name: At_42deg_Heat_P Parameter: Age (day) Value: 14
  misc_feature: MA Experiment 20000173 PARAMETER Experiment Name: At_42deg_Heat_P Parameter: Organism Value: A. thaliana
  misc_feature: MA Experiment 20000173 PARAMETER Experiment Name: At_42deg_Heat_P Parameter: Plant Line Value: WS
  misc_feature: MA Experiment 20000173 PARAMETER Experiment Name: At_42deg_Heat_P Parameter: Temperature (deg C) Value: 42 vs. 22
  misc_feature: MA Experiment 20000173 PARAMETER Experiment Name: At_42deg_Heat_P Parameter: Timepoint (hr) Value: 6
  misc_feature: MA Experiment 20000173 PARAMETER Experiment Name: At_42deg_Heat_P Parameter: Tissue Value: Aerial
  misc_feature: MA Experiment ID: 20000179 Result: Down-regulated in Transcription
  misc_feature: MA Experiment 20000179 PARAMETER Experiment Name: At_Germinating_Seeds_P Parameter: Age (hr) Value: 6 vs. 0
  misc_feature: MA Experiment 20000179 PARAMETER Experiment Name: At_Germinating_Seeds_P Parameter: Tissue Value: Germinating Seeds
  misc_feature: MA Experiment ID: 20000185 Result: Down-regulated in Transcription
  misc_feature: MA Experiment 20000185 PARAMETER Experiment Name: At_Roots__P Parameter: Age (day) Value: 7 vs. 21
  misc_feature: MA Experiment 20000185 PARAMETER Experiment Name: At_Roots__P Parameter: Organism Value: A. thaliana
  misc_feature: MA Experiment 20000185 PARAMETER Experiment Name: At_Roots__P Parameter: Tissue Value: Roots vs. Whole Plant
  misc_feature: MA Experiment ID: 20000264 Result: Down-regulated in Transcription
  misc_feature: MA Experiment 20000264 PARAMETER Experiment Name: At_Open_Flower_P Parameter: Age (day) Value: 21
  misc_feature: MA Experiment 20000264 PARAMETER Experiment Name: At_Open_Flower_P Parameter: Plant Line Value: WS
  misc_feature: MA Experiment 20000264 PARAMETER Experiment Name: At_Open_Flower_P Parameter: Tissue Value: Open Flower vs. Whole Plant
  misc_feature: MA Experiment ID: 20000268 Result: Down-regulated in Transcription
  misc_feature: MA Experiment 20000268 PARAMETER Experiment Name: At_100mM_NaCl__P Parameter: Age (day) Value: 14
  misc_feature: MA Experiment 20000268 PARAMETER Experiment Name: At_100mM_NaCl__P Parameter: Organism Value: A. thaliana
  misc_feature: MA Experiment 20000268 PARAMETER Experiment Name: At_100mM_NaCl__P Parameter: Plant Line Value: WS
  misc_feature: MA Experiment 20000268 PARAMETER Experiment Name: At_100mM_NaCl__P Parameter: Timepoint (hr) Value: 6
  misc_feature: MA Experiment 20000268 PARAMETER Experiment Name: At_100mM_NaCl__P Parameter: Tissue Value: Whole Plant
  misc_feature: MA Experiment 20000268 PARAMETER Experiment Name: At_100mM_NaCl__P Parameter: Treatment Value: 100mM NaCl vs. No Treatment
  misc_feature: MA Experiment ID: 20000286 Result: Down-regulated in Transcription
  misc_feature: MA Experiment 20000286 PARAMETER Experiment Name: At_Open_Flower_P Parameter: Age (day) Value: 21
  misc_feature: MA Experiment 20000286 PARAMETER Experiment Name: At_Open_Flower_P Parameter: Plant Line Value: WS
  misc_feature: MA Experiment 20000286 PARAMETER Experiment Name: At_Open_Flower_P Parameter: Tissue Value: Half Open vs. Whole Plant
  misc_feature: MA Experiment ID: 20000436 Result: Down-regulated in Transcription
  misc_feature: MA Experiment 20000436 PARAMETER Experiment Name: At_Drought_P Parameter: Age (day) Value: 7
  misc_feature: MA Experiment 20000436 PARAMETER Experiment Name: At_Drought_P Parameter: Organism Value: A. thaliana
  misc_feature: MA Experiment 20000436 PARAMETER Experiment Name: At_Drought_P Parameter: Plant Line Value: WS
  misc_feature: MA Experiment 20000436 PARAMETER Experiment Name: At_Drought_P Parameter: Timepoint (hr) Value: 12
  misc_feature: MA Experiment 20000436 PARAMETER Experiment Name: At_Drought_P Parameter: Tissue Value: Whole Plant
  misc_feature: MA Experiment 20000436 PARAMETER Experiment Name: At_Drought_P Parameter: Treatment Value: Drought vs. No Drought
  misc_feature: MA Experiment ID: 20000437 Result: Down-regulated in Transcription
  misc_feature: MA Experiment 20000437 PARAMETER Experiment Name: At_Drought_P Parameter: Age (day) Value: 8
  misc_feature: MA Experiment 20000437 PARAMETER Experiment Name: At_Drought_P Parameter: Organism Value: A. thaliana
  misc_feature: MA Experiment 20000437 PARAMETER Experiment Name: At_Drought_P Parameter: Plant Line Value: WS
  misc_feature: MA Experiment 20000437 PARAMETER Experiment Name: At_Drought_P Parameter: Timepoint (hr) Value: 24
  misc_feature: MA Experiment 20000437 PARAMETER Experiment Name: At_Drought_P Parameter: Tissue Value: Whole Plant
  misc_feature: MA Experiment 20000437 PARAMETER Experiment Name: At_Drought_P Parameter: Treatment Value: Drought vs. No Drought
  misc_feature: MA Experiment ID: 20000439 Result: Down-regulated in Transcription
  misc_feature: MA Experiment 20000439 PARAMETER Experiment Name: At_Roots__P Parameter: Age (day) Value: 14 vs. 21
  misc_feature: MA Experiment 20000439 PARAMETER Experiment Name: At_Roots__P Parameter: Organism Value: A. thaliana
  misc_feature: MA Experiment 20000439 PARAMETER Experiment Name: At_Roots__P Parameter: Tissue Value: Roots vs. Whole Plant
  misc_feature: MA Experiment ID: 20000794 Result: Down-regulated in Transcription
  misc_feature: MA Experiment 20000794 PARAMETER Experiment Name: At_Petals_P Parameter: Age (day) Value: 23-25 days
  misc_feature: MA Experiment 20000794 PARAMETER Experiment Name: At_Petals_P Parameter: Plant Line Value: WS
  misc_feature: MA Experiment 20000794 PARAMETER Experiment Name: At_Petals_P Parameter: Tissue Value: Petals vs. Whole plant
  misc_feature: MA Experiment ID: 20001554 Result: Down-regulated in Transcription
  misc_feature: MA Experiment 20001554 PARAMETER Experiment Name: At_Drought_Soil_Dry_P Parameter: Age (day) Value: 21
  misc_feature: MA Experiment 20001554 PARAMETER Experiment Name: At_Drought_Soil_Dry_P Parameter: Organism Value: A. thaliana
  misc_feature: MA Experiment 20001554 PARAMETER Experiment Name: At_Drought_Soil_Dry_P Parameter: Plant Line Value: WS
  misc_feature: MA Experiment 20001554 PARAMETER Experiment Name: At_Drought_Soil_Dry_P Parameter: Post Timepoint (hr) Value: None
  misc_feature: MA Experiment 20001554 PARAMETER Experiment Name: At_Drought_Soil_Dry_P Parameter: Post-Treatment Value: None
  misc_feature: MA Experiment 20001554 PARAMETER Experiment Name: At_Drought_Soil_Dry_P Parameter: Timepoint (day) Value: 7
  misc_feature: MA Experiment 20001554 PARAMETER Experiment Name: At_Drought_Soil_Dry_P Parameter: Treatment Value: Drought vs. No Drought
  misc_feature: MA Experiment ID: 20001555 Result: Down-regulated in Transcription
  misc_feature: MA Experiment 20001555 PARAMETER Experiment Name: At_Drought_Soil_Dry_P Parameter: Age (day) Value: 24
  misc_feature: MA Experiment 20001555 PARAMETER Experiment Name: At_Drought_Soil_Dry_P Parameter: Organism Value: A. thaliana
  misc_feature: MA Experiment 20001555 PARAMETER Experiment Name: At_Drought_Soil_Dry_P Parameter: Plant Line Value: WS
  misc_feature: MA Experiment 20001555 PARAMETER Experiment Name: At_Drought_Soil_Dry_P Parameter: Post Timepoint (hr) Value: None
  misc_feature: MA Experiment 20001555 PARAMETER Experiment Name: At_Drought_Soil_Dry_P Parameter: Post-Treatment Value: None
  misc_feature: MA Experiment 20001555 PARAMETER Experiment Name: At_Drought_Soil_Dry_P Parameter: Timepoint (day) Value: 10
  misc_feature: MA Experiment 20001555 PARAMETER Experiment Name: At_Drought_Soil_Dry_P Parameter: Treatment Value: Drought vs. No Drought
  misc_feature: MA Experiment ID: 20001556 Result: Down-regulated in Transcription
  misc_feature: MA Experiment 20001556 PARAMETER Experiment Name: At_Drought_Soil_Dry_P Parameter: Age (day) Value: 26
  misc_feature: MA Experiment 20001556 PARAMETER Experiment Name: At_Drought_Soil_Dry_P Parameter: Organism Value: A. thaliana
  misc_feature: MA Experiment 20001556 PARAMETER Experiment Name: At_Drought_Soil_Dry_P Parameter: Plant Line Value: WS
  misc_feature: MA Experiment 20001556 PARAMETER Experiment Name: At_Drought_Soil_Dry_P Parameter: Post Timepoint (hr) Value: None
  misc_feature: MA Experiment 20001556 PARAMETER Experiment Name: At_Drought_Soil_Dry_P Parameter: Post-Treatment Value: None
  misc_feature: MA Experiment 20001556 PARAMETER Experiment Name: At_Drought_Soil_Dry_P Parameter: Timepoint (day) Value: 12
  misc_feature: MA Experiment 20001556 PARAMETER Experiment Name: At_Drought_Soil_Dry_P Parameter: Treatment Value: Drought vs. No Drought
  misc_feature: MA Experiment ID: 20001557 Result: Up-regulated in Transcription
  misc_feature: MA Experiment 20001557 PARAMETER Experiment Name: At_Drought_Soil_Dry_P Parameter: Age (day) Value: 27
  misc_feature: MA Experiment 20001557 PARAMETER Experiment Name: At_Drought_Soil_Dry_P Parameter: Organism Value: A. thaliana
  misc_feature: MA Experiment 20001557 PARAMETER Experiment Name: At_Drought_Soil_Dry_P Parameter: Plant Line Value: WS
  misc_feature: MA Experiment 20001557 PARAMETER Experiment Name: At_Drought_Soil_Dry_P Parameter: Post Timepoint (hr) Value: 3
  misc_feature: MA Experiment 20001557 PARAMETER Experiment Name: At_Drought_Soil_Dry_P Parameter: Post-Treatment Value: Re-Water vs. No Drought
  misc_feature: MA Experiment 20001557 PARAMETER Experiment Name: At_Drought_Soil_Dry_P Parameter: Timepoint (day) Value: 13
  misc_feature: MA Experiment 20001557 PARAMETER Experiment Name: At_Drought_Soil_Dry_P Parameter: Treatment Value: Drought vs. No Drought
  misc_feature: MA Experiment ID: 20001756 Result: Up-regulated in Transcription
  misc_feature: MA Experiment 20001756 PARAMETER Experiment Name: At_50mM_NH4NO3_L-to-H_P Parameter: Timepoint (hr) Value: 4
  misc_feature: MA Experiment 20001756 PARAMETER Experiment Name: At_50mM_NH4NO3_L-to-H_P Parameter: Tissue Value: Leaf
  misc_feature: MA Experiment 20001756 PARAMETER Experiment Name: At_50mM_NH4NO3_L-to-H_P Parameter: Treatment Value: 50mM NH4NO3 vs 100mM Mannitol
  misc_feature: MA Experiment ID: 20001757 Result: Up-regulated in Transcription
  misc_feature: MA Experiment 20001757 PARAMETER Experiment Name: At_50mM_NH4NO3_L-to-H_P Parameter: Timepoint (hr) Value: 6
  misc_feature: MA Experiment 20001757 PARAMETER Experiment Name: At_50mM_NH4NO3_L-to-H_P Parameter: Tissue Value: Leaf
  misc_feature: MA Experiment 20001757 PARAMETER Experiment Name: At_50mM_NH4NO3_L-to-H_P Parameter: Treatment Value: 50mM NH4NO3 vs 100mM Mannitol
  misc_feature: MA Experiment ID: 20001904 Result: Down-regulated in Transcription
  misc_feature: MA Experiment 20001904 PARAMETER Experiment Name: At_Drought_Reproduction_P Parameter: Age (day) Value: 37
  misc_feature: MA Experiment 20001904 PARAMETER Experiment Name: At_Drought_Reproduction_P Parameter: Organism Value: A. thaliana
  misc_feature: MA Experiment 20001904 PARAMETER Experiment Name: At_Drought_Reproduction_P Parameter: Plant Line Value: WS
  misc_feature: MA Experiment 20001904 PARAMETER Experiment Name: At_Drought_Reproduction_P Parameter: Timepoint (day) Value: 7
  misc_feature: MA Experiment 20001904 PARAMETER Experiment Name: At_Drought_Reproduction_P Parameter: Tissue Value: Rosettes
  misc_feature: MA Experiment 20001904 PARAMETER Experiment Name: At_Drought_Reproduction_P Parameter: Treatment Value: Drought vs. No Drought
  misc_feature: MA Experiment ID: 20001906 Result: Down-regulated in Transcription
  misc_feature: MA Experiment 20001906 PARAMETER Experiment Name: At_Drought_Reproduction_P Parameter: Age (day) Value: 35
  misc_feature: MA Experiment 20001906 PARAMETER Experiment Name: At_Drought_Reproduction_P Parameter: Organism Value: A. thaliana
  misc_feature: MA Experiment 20001906 PARAMETER Experiment Name: At_Drought_Reproduction_P Parameter: Plant Line Value: WS
  misc_feature: MA Experiment 20001906 PARAMETER Experiment Name: At_Drought_Reproduction_P Parameter: Timepoint (day) Value: 5
  misc_feature: MA Experiment 20001906 PARAMETER Experiment Name: At_Drought_Reproduction_P Parameter: Tissue Value: Siliques
  misc_feature: MA Experiment 20001906 PARAMETER Experiment Name: At_Drought_Reproduction_P Parameter: Treatment Value: Drought vs. No Drought
gtactatcttcctcttaaaccaaccattcaaaatgttgcgtactatcttcctcttatctcttctctttgctctatccaatgcctctgttcaagatttctgtgtcgcaaacctgaaacgcgctgaaacccctgcgggttacccttgcattcgtcccattcatgtcaaagctacagactttgtcttctctggcttaggcactcctggaaacactacaaacatcatcaacgccgctgtcacacccgctttcgcagctcagttcccgggtctgaacggtctaggcctctctacagctagacttgacttagctcctaaaggtgtgatcccaatgcacactcaccctggtgcctctgaggttctctttgtccttactggctccattaccgctgggtttgtctcctcggcaaacgctgtctacgtgcagacactcaaaccaggacaggtcatggttttcccacagggcttgcttcatttccagatcaacgcgggaaaatcctctgcttcagccgttgtcactttcaacagcgctaatccgggtctgcagattctcgacttcgcactctttgctaacagtcttcccactgaactcgtcgtgggtactactttccttgacgccactacagtcaagaagctaaagggtgttcttggaggaactggctaaaaaaagacttaggactactccttgactaaaacaccaaaacctgtttcttcatctttttttctctttaattgattcttgtcttctctgttttgtgtgccttgtaattcttcaaaacctgtcaaaattgttacattgtatgtgagttttttc

SEQ ID NO: 83009 - protein, 218 aa, Arabidopsis thaliana
  peptide (1)..(218): Ceres Seq. ID no. 12668201
  misc_feature (62)..(208): Pfam Name: Cupin Pfam Description: Cupin
  misc_feature (11)..(218): Homolog of NCBI NO: 15218535 NR Description: germin-like protein; protein id: At1g72610.1, by cDNA: 20068., supported by cDNA: gi_17473702, supported by gi_1755155, supported by cDNA: gi_1755157, supported by cDNA:
  misc_feature (11)..(218): Homolog of NCBI NO: 17473703 NR Description: germin-like protein [Arabidopsis thaliana]
  misc_feature (11)..(218): Homolog of NCBI NO: 1592672 NR Description: germin1 [Arabidopsis thaliana]
  misc_feature (15)..(218): Homolog of NCBI NO: 1934726 NR Description: germin-like protein [Arabidopsis thaliana]
  misc_feature (11)..(218): Homolog of NCBI NO: 1169941 NR Description: Germin-like protein 1 precursor
  misc_feature (10)..(218): Homolog of NCBI NO: 13277342 NR Description: Germin-like protein [Pisum sativum]
  misc_feature (15)..(217): Homolog of NCBI NO: 18201940 NR Description: Auxin-binding protein ABP20 precursor
  misc_feature (16)..(217): Homolog of NCBI NO: 18203684 NR Description: Auxin-binding protein ABP19a precursor
  misc_feature (11)..(217): Homolog of NCBI NO: 15242028 NR Description: germin-like protein; protein id: At5g20630.1, by cDNA: gi_14517363, supported by cDNA: gi_15810054, supported
  misc_feature (16)..(217): Homolog of NCBI NO: 18201941 NR Description: Auxin-binding protein ABP19b precursor
TIFLLNQPFKMLRTIFLLSLLFALSNASVQDFCVANLKRAETPAGYPCIRPIHVKATDFVFSGLGTPGNTTNIINAAVTPAFAAQFPGLNGLGLSTARLDLAPKGVIPMHTHPGASEVLFVLTGSITAGFVSSANAVYVQTLKPGQVMVFPQGLLHFQINAGKSSASAVVTFNSANPGLQILDFALFANSLPTELVVGTTFLDATTVKKLKGVLGGTG

SEQ ID NO: 83010 - protein, 208 aa, Arabidopsis thaliana; identical to SEQ ID NO: 23207
  peptide (1)..(208): Ceres Seq. ID no. 12668202
  misc_feature (52)..(198): Pfam Name: Cupin Pfam Description: Cupin
  misc_feature (1)..(208): Homolog of NCBI NO: 15218535 NR Description: germin-like protein; protein id: At1g72610.1, by cDNA: 20068., supported by cDNA: gi_17473702, supported by gi_1755155, supported by cDNA: gi_1755157, supported by cDNA:
  misc_feature (1)..(208): Homolog of NCBI NO: 17473703 NR Description: germin-like protein [Arabidopsis thaliana]
  misc_feature (1)..(208): Homolog of NCBI NO: 1592672 NR Description: germin1 [Arabidopsis thaliana]
  misc_feature (5)..(208): Homolog of NCBI NO: 1934726 NR Description: germin-like protein [Arabidopsis thaliana]
  misc_feature (1)..(208): Homolog of NCBI NO: 1169941 NR Description: Germin-like protein 1 precursor
  misc_feature (1)..(208): Homolog of NCBI NO: 13277342 NR Description: Germin-like protein [Pisum sativum]
  misc_feature (5)..(207): Homolog of NCBI NO: 18201940 NR Description: Auxin-binding protein ABP20 precursor
  misc_feature (6)..(207): Homolog of NCBI NO: 18203684 NR Description: Auxin-binding protein ABP19a precursor
  misc_feature (1)..(207): Homolog of NCBI NO: 15242028 NR Description: germin-like protein; protein id: At5g20630.1, by cDNA: gi_14517363, supported by cDNA: gi_15810054, supported
  misc_feature (6)..(207): Homolog of NCBI NO: 18201941 NR Description: Auxin-binding protein ABP19b precursor

SEQ ID NO: 83011 - protein, 110 aa, Arabidopsis thaliana; identical to SEQ ID NO: 31047
  peptide (1)..(110): Ceres Seq. ID no. 12668203
  misc_feature (1)..(100): Pfam Name: Cupin Pfam Description: Cupin
  misc_feature (1)..(110): Homolog of NCBI NO: 15218535 NR Description: germin-like protein; protein id: At1g72610.1, by cDNA: 20068., supported by cDNA: gi_17473702, supported by gi_1755155, supported by cDNA: gi_1755157, supported by cDNA:
  misc_feature (1)..(110): Homolog of NCBI NO: 17473703 NR Description: germin-like protein [Arabidopsis thaliana]
  misc_feature (1)..(110): Homolog of NCBI NO: 1592672 NR Description: germin1 [Arabidopsis thaliana]
  misc_feature (1)..(110): Homolog of NCBI NO: 1934726 NR Description: germin-like protein [Arabidopsis thaliana]
  misc_feature (1)..(110): Homolog of NCBI NO: 1169941 NR Description: Germin-like protein 1 precursor
  misc_feature (1)..(110): Homolog of NCBI NO: 13277342 NR Description: Germin-like protein [Pisum sativum]
  misc_feature (1)..(109): Homolog of NCBI NO: 18201940 NR Description: Auxin-binding protein ABP20 precursor
  misc_feature (1)..(109): Homolog of NCBI NO: 18203684 NR Description: Auxin-binding protein ABP19a precursor
  misc_feature (1)..(109): Homolog of NCBI NO: 15242028 NR Description: germin-like protein; protein id: At5g20630.1, by cDNA: gi_14517363, supported by cDNA: gi_15810054, supported
  misc_feature (1)..(109): Homolog of NCBI NO: 18201941 NR Description: Auxin-binding protein ABP19b precursor

SEQ ID NO: 83012 - DNA, 1086 bp, Arabidopsis thaliana
  misc_feature (1)..(1086): Ceres Seq. ID no. 12668215
  misc_feature: MA Experiment ID: 108462 Result: Down-regulated in Transcription
  misc_feature: MA Experiment 108462 PARAMETER Experiment Name: At_Germinating_Seeds_cDNA_P Parameter: Age (day) Value: 2 vs. 0
  misc_feature: MA Experiment 108462 PARAMETER Experiment Name: At_Germinating_Seeds_cDNA_P Parameter: Tissue Value: Germinating Seeds
  misc_feature: MA Experiment ID: 108463 Result: Down-regulated in Transcription
  misc_feature: MA Experiment 108463 PARAMETER Experiment Name: At_Germinating_Seeds_cDNA_P Parameter: Age (day) Value: 3 vs. 0
  misc_feature: MA Experiment 108463 PARAMETER Experiment Name: At_Germinating_Seeds_cDNA_P Parameter: Tissue Value: Germinating Seeds
  misc_feature: MA Experiment ID: 108464 Result: Down-regulated in Transcription
  misc_feature: MA Experiment 108464 PARAMETER Experiment Name: At_Germinating_Seeds_cDNA_P Parameter: Age (day) Value: 4 vs. 0
  misc_feature: MA Experiment 108464 PARAMETER Experiment Name: At_Germinating_Seeds_cDNA_P Parameter: Tissue Value: Germinating Seeds
  misc_feature: MA Experiment ID: 20000113 Result: Up-regulated in Transcription
  misc_feature: MA Experiment 20000113 PARAMETER Experiment Name: At_42deg_Heat_cDNA_P Parameter: Temperature (deg C) Value: 42 vs. 22
  misc_feature: MA Experiment 20000113 PARAMETER Experiment Name: At_42deg_Heat_cDNA_P Parameter: Timepoint (hr) Value: 8
  misc_feature: MA Experiment 20000113 PARAMETER Experiment Name: At_42deg_Heat_cDNA_P Parameter: Tissue Value: Aerial
  misc_feature: MA Experiment ID: 20000144 Result: Up-regulated in Transcription
  misc_feature: MA Experiment 20000144 PARAMETER Experiment Name: At_42deg_Heat_cDNA_P Parameter: Temperature (deg C) Value: 42 vs. 22
  misc_feature: MA Experiment 20000144 PARAMETER Experiment Name: At_42deg_Heat_cDNA_P Parameter: Timepoint (hr) Value: 1
  misc_feature: MA Experiment 20000144 PARAMETER Experiment Name: At_42deg_Heat_cDNA_P Parameter: Tissue Value: Aerial
  misc_feature: MA Experiment ID: 20000171 Result: Up-regulated in Transcription
  misc_feature: MA Experiment 20000171 PARAMETER Experiment Name: At_42deg_Heat_P Parameter: Age (day) Value: 14
  misc_feature: MA Experiment 20000171 PARAMETER Experiment Name: At_42deg_Heat_P Parameter: Organism Value: A. thaliana
  misc_feature: MA Experiment 20000171 PARAMETER Experiment Name: At_42deg_Heat_P Parameter: Plant Line Value: WS
  misc_feature: MA Experiment 20000171 PARAMETER Experiment Name: At_42deg_Heat_P Parameter: Temperature (deg C) Value: 42 vs. 22
  misc_feature: MA Experiment 20000171 PARAMETER Experiment Name: At_42deg_Heat_P Parameter: Timepoint (hr) Value: 1
  misc_feature: MA Experiment 20000171 PARAMETER Experiment Name: At_42deg_Heat_P Parameter: Tissue Value: Aerial
  misc_feature: MA Experiment ID: 20000173 Result: Up-regulated in Transcription
  misc_feature: MA Experiment 20000173 PARAMETER Experiment Name: At_42deg_Heat_P Parameter: Age (day) Value: 14
  misc_feature: MA Experiment 20000173 PARAMETER Experiment Name: At_42deg_Heat_P Parameter: Organism Value: A. thaliana
  misc_feature: MA Experiment 20000173 PARAMETER Experiment Name: At_42deg_Heat_P Parameter: Plant Line Value: WS
  misc_feature: MA Experiment 20000173 PARAMETER Experiment Name: At_42deg_Heat_P Parameter: Temperature (deg C) Value: 42 vs. 22
  misc_feature: MA Experiment 20000173 PARAMETER Experiment Name: At_42deg_Heat_P Parameter: Timepoint (hr) Value: 6
  misc_feature: MA Experiment 20000173 PARAMETER Experiment Name: At_42deg_Heat_P Parameter: Tissue Value: Aerial
  misc_feature: MA Experiment ID: 20000224 Result: Down-regulated in Transcription
  misc_feature: MA Experiment ID: 20000794 Result: Down-regulated in Transcription
  misc_feature: MA Experiment 20000794 PARAMETER Experiment Name: At_Petals_P Parameter: Age (day) Value: 23-25 days
  misc_feature: MA Experiment 20000794 PARAMETER Experiment Name: At_Petals_P Parameter: Plant Line Value: WS
  misc_feature: MA Experiment 20000794 PARAMETER Experiment Name: At_Petals_P Parameter: Tissue Value: Petals vs. Whole plant
  misc_feature: MA Experiment ID: 20001560 Result: Up-regulated in Transcription
  misc_feature: MA Experiment 20001560 PARAMETER Experiment Name: At_Drought_Soil_Dry_P Parameter: Age (day) Value: 28
  misc_feature: MA Experiment 20001560 PARAMETER Experiment Name: At_Drought_Soil_Dry_P Parameter: Organism Value: A. thaliana
  misc_feature: MA Experiment 20001560 PARAMETER Experiment Name: At_Drought_Soil_Dry_P Parameter: Plant Line Value: WS
  misc_feature: MA Experiment 20001560 PARAMETER Experiment Name: At_Drought_Soil_Dry_P Parameter: Post Timepoint (hr) Value: None
  misc_feature: MA Experiment 20001560 PARAMETER Experiment Name: At_Drought_Soil_Dry_P Parameter: Post-Treatment Value: None
  misc_feature: MA Experiment 20001560 PARAMETER Experiment Name: At_Drought_Soil_Dry_P Parameter: Timepoint (day) Value: 14
  misc_feature: MA Experiment 20001560 PARAMETER Experiment Name: At_Drought_Soil_Dry_P Parameter: Treatment Value: Drought vs. No Drought
atttctcatttcggcaaccaaaccaaacattcagagagacacaacacaaccacatcatcacacgtttctctctctctctttcctctccgtcgtctctctctctctagccaccaccaaaatccttaaaacctagacttttctcttccatcgatggcggctaataacagatccgatcatgggtcagacgaaaacacaagactttacaatccttaccaaaactacgaagtcccaatcaacaaatctcagtacctttacaagcttcctacctcccctgagtttctcttcacggaggaggctttaaggcaacgtagatcttggggtgagaatctcactttctacaccggaacagcttacctcggtggctccgttgccggagcttctgttggagtcatcactggagtcaaaagcttcgaatctggcgacactactaagctcaaaatcaacaggatcttgaactcttctggtcaaactggtcgaacttggggtaatcggattggtatcattggattggtttacgcagggatcgagagtggtattgtggctgccacggatagagatgatgtttggaccagtgtggtggctggtcttggaaccggagctgtttgtagagcggcgagaggagtgagatctgcagctgtagctggtgctcttggtggacttgcggctggagctgttgtagctgggaagcaaattgtgaagcggtatgtgcccatttgaagactgcaagagtctaattggcagactctttttcgggtcgttgttgaaatttttgataggggaaatggtgagaatttgataggtttggtatgtcttggaatcataaaaatgaaaactttatttggtttctagaggtacaacaagtctgtatgtcaagtcataatgcagtttcactttgaagaataacctgcaaacctttttcttatattcatactgattaaatgttttgccgattggtaatttaatttgtcatgagtgtgtttgttctagttagtgttttatgtttctgtttttgatcaatgttaactctttcttgattcgttgagaaactgatgtgttgtattacatttgaaaatgaagctcttctct

SEQ ID NO: 83013 - protein, 188 aa, Arabidopsis thaliana; identical to SEQ ID NO: 27627
  peptide (1)..(188): Ceres Seq. ID no. 12668216
  misc_feature (49)..(182): Pfam Name: Tim17/Tim22/Tim23 family Pfam Description: Tim17/Tim22/Tim23 family
  misc_feature (1)..(188): Homolog of NCBI NO: 15218593 NR Description: inner mitochondrial membrane protein; protein id: supported by cDNA: 6793., supported by cDNA: gi_14596208, by cDNA: gi_18377493, supported by cDNA: gi_603055 [Arabidopsis
  misc_feature (1)..(188): Homolog of NCBI NO: 18394498 NR Description: inner mitochondrial membrane protein, putative; id: At1g17530.1, supported by cDNA: gi_13641345, supported by gi_15010569, supported by cDNA: gi_20147386 [Arabidopsis
  misc_feature (1)..(188): Homolog of NCBI NO: 13641346 NR Description: translocase of inner mitochondrial membrane TIM23
  misc_feature (1)..(187): Homolog of NCBI NO: 34902184 NR Description: Putative mitochondrial inner membrane protein
  misc_feature (2)..(187): Homolog of NCBI NO: 37536126 NR Description: putaive mitochondrial inner membrane protein
  misc_feature (4)..(188): Homolog of NCBI NO: 15229350 NR Description: putative inner mitochondrial membrane protein; id: At3g04800.1 [Arabidopsis thaliana] putative inner mitochondrial membrane protein [Arabidopsis
  misc_feature (1)..(184): Homolog of NCBI NO: 19075496 NR Description: putative mitochondrial import inner membrane subunit [Schizosaccharomyces pombe] Probable mitochondrial import inner membrane translocase subunit
  misc_feature (88)..(187): Homolog of NCBI NO: 34394286 NR Description: hypothetical protein [Oryza sativa (japonica
  misc_feature (1)..(96): Homolog of NCBI NO: 38344267 NR Description: OSJNBa0005N02.5 [Oryza sativa (japonica
  misc_feature (124)..(187): Homolog of NCBI NO: 12039278 NR Description: putative inner mitochondrial membrane protein

SEQ ID NO: 83014 - DNA, 2106 bp, Arabidopsis thaliana
  misc_feature (1)..(2106): Ceres Seq. ID no. 12668217
  misc_feature: MA Experiment ID: 108434 Result: Up-regulated in Transcription
  misc_feature: MA Experiment 108434 PARAMETER Experiment Name: At_Root_Tips_cDNA_P Parameter: Tissue Value: Root Tips
  misc_feature: MA Experiment ID: 108461 Result: Up-regulated in Transcription
  misc_feature: MA Experiment 108461 PARAMETER Experiment Name: At_Germinating_Seeds_cDNA_P Parameter: Age (day) Value: 1 vs. 0
  misc_feature: MA Experiment 108461 PARAMETER Experiment Name: At_Germinating_Seeds_cDNA_P Parameter: Tissue Value: Germinating Seeds
  misc_feature: MA Experiment ID: 108462 Result: Up-regulated in Transcription
  misc_feature: MA Experiment 108462 PARAMETER Experiment Name: At_Germinating_Seeds_cDNA_P Parameter: Age (day) Value: 2 vs. 0
  misc_feature: MA Experiment 108462 PARAMETER Experiment Name: At_Germinating_Seeds_cDNA_P Parameter: Tissue Value: Germinating Seeds
  misc_feature: MA Experiment ID: 108573 Result: Down-regulated in Transcription
  misc_feature: MA Experiment 108573 PARAMETER Experiment Name: At_Drought_cDNA_P Parameter: Timepoint (hr) Value: 6
  misc_feature: MA Experiment 108573 PARAMETER Experiment Name: At_Drought_cDNA_P Parameter: Tissue Value: Aerial
  misc_feature: MA Experiment 108573 PARAMETER Experiment Name: At_Drought_cDNA_P Parameter: Treatment Value: Drought vs. No Drought
  misc_feature: MA Experiment ID: 108576 Result: Down-regulated in Transcription
  misc_feature: MA Experiment 108576 PARAMETER Experiment Name: At_42deg_Heat_cDNA_P Parameter: Temperature (deg C) Value: 42 vs. 22
  misc_feature: MA Experiment 108576 PARAMETER Experiment Name: At_42deg_Heat_cDNA_P Parameter: Timepoint (hr) Value: 1
  misc_feature: MA Experiment 108576 PARAMETER Experiment Name: At_42deg_Heat_cDNA_P Parameter: Tissue Value: Aerial
  misc_feature: MA Experiment ID: 108579 Result: Up-regulated in Transcription
  misc_feature: MA Experiment 108579 PARAMETER Experiment Name: At_4deg_Cold_cDNA_P Parameter: Temperature (deg C) Value: 4 vs. 22
  misc_feature: MA Experiment 108579 PARAMETER Experiment Name: At_4deg_Cold_cDNA_P Parameter: Timepoint (hr) Value: 6
  misc_feature: MA Experiment 108579 PARAMETER Experiment Name: At_4deg_Cold_cDNA_P Parameter: Tissue Value: Aerial
  misc_feature: MA Experiment ID: 108595 Result: Up-regulated in Transcription
  misc_feature: MA Experiment 108595 PARAMETER Experiment Name: At_Ler-pi_Ovule_cDNA_P Parameter: Plant Line Value: null
  misc_feature: MA Experiment ID: 20000069 Result: Down-regulated in Transcription
  misc_feature: MA Experiment 20000069 PARAMETER Experiment Name: At_100uM_ABA_Mutants_cDNA_P Parameter: Plant Line Value: CS23
  misc_feature: MA Experiment 20000069 PARAMETER Experiment Name: At_100uM_ABA_Mutants_cDNA_P Parameter: Timepoint (hr) Value: 6
  misc_feature: MA Experiment 20000069 PARAMETER Experiment Name: At_100uM_ABA_Mutants_cDNA_P Parameter: Tissue Value: Aerial
  misc_feature: MA Experiment 20000069 PARAMETER Experiment Name: At_100uM_ABA_Mutants_cDNA_P Parameter: Treatment Value: 100uM ABA vs. No Treatment
  misc_feature: MA Experiment ID: 20000070 Result: Down-regulated in Transcription
  misc_feature: MA Experiment 20000070 PARAMETER Experiment Name: At_100uM_ABA_Mutants_cDNA_P Parameter: Plant Line Value: CS24
  misc_feature: MA Experiment 20000070 PARAMETER Experiment Name: At_100uM_ABA_Mutants_cDNA_P Parameter: Timepoint (hr) Value: 6
  misc_feature: MA Experiment 20000070 PARAMETER Experiment Name: At_100uM_ABA_Mutants_cDNA_P Parameter: Tissue Value: Aerial
  misc_feature: MA Experiment 20000070 PARAMETER Experiment Name: At_100uM_ABA_Mutants_cDNA_P Parameter: Treatment Value: 100uM ABA vs. No Treatment
  misc_feature: MA Experiment ID: 20000071 Result: Down-regulated in Transcription
  misc_feature: MA Experiment 20000071 PARAMETER Experiment Name: At_100uM_ABA_Mutants_cDNA_P Parameter: Plant Line Value: CS8104
  misc_feature: MA Experiment 20000071 PARAMETER Experiment Name: At_100uM_ABA_Mutants_cDNA_P Parameter: Timepoint (hr) Value: 6
  misc_feature: MA Experiment 20000071 PARAMETER Experiment Name: At_100uM_ABA_Mutants_cDNA_P Parameter: Tissue Value: Aerial
  misc_feature: MA Experiment 20000071 PARAMETER Experiment Name: At_100uM_ABA_Mutants_cDNA_P Parameter: Treatment Value: 100uM ABA vs. No Treatment
  misc_feature: MA Experiment ID: 20000072 Result: Down-regulated in Transcription
  misc_feature: MA Experiment 20000072 PARAMETER Experiment Name: At_100uM_ABA_Mutants_cDNA_P Parameter: Plant Line Value: CS8105
  misc_feature: MA Experiment 20000072 PARAMETER Experiment Name: At_100uM_ABA_Mutants_cDNA_P Parameter: Timepoint (hr) Value: 6
  misc_feature: MA Experiment 20000072 PARAMETER Experiment Name: At_100uM_ABA_Mutants_cDNA_P Parameter: Tissue Value: Aerial
  misc_feature: MA Experiment 20000072 PARAMETER Experiment Name: At_100uM_ABA_Mutants_cDNA_P Parameter: Treatment Value: 100uM ABA vs. No Treatment
  misc_feature: MA Experiment ID: 20000086 Result: Down-regulated in Transcription
  misc_feature: MA Experiment 20000086 PARAMETER Experiment Name: At_100uM_ABA_Mutants_cDNA_P Parameter: Plant Line Value: CS22
  misc_feature: MA Experiment 20000086 PARAMETER Experiment Name: At_100uM_ABA_Mutants_cDNA_P Parameter: Timepoint (hr) Value: 6
  misc_feature: MA Experiment 20000086 PARAMETER Experiment Name: At_100uM_ABA_Mutants_cDNA_P Parameter: Tissue Value: Aerial
  misc_feature: MA Experiment 20000086 PARAMETER Experiment Name: At_100uM_ABA_Mutants_cDNA_P Parameter: Treatment Value: 100uM ABA vs. No Treatment
  misc_feature: MA Experiment ID: 20000087 Result: Down-regulated in Transcription
  misc_feature: MA Experiment 20000087 PARAMETER Experiment Name: At_100uM_ABA_Mutants_cDNA_P Parameter: Plant Line Value: WS
  misc_feature: MA Experiment 20000087 PARAMETER Experiment Name: At_100uM_ABA_Mutants_cDNA_P Parameter: Timepoint (hr) Value: 6
  misc_feature: MA Experiment 20000087 PARAMETER Experiment Name: At_100uM_ABA_Mutants_cDNA_P Parameter: Tissue Value: Aerial
  misc_feature: MA Experiment 20000087 PARAMETER Experiment Name: At_100uM_ABA_Mutants_cDNA_P Parameter: Treatment Value: 100uM ABA vs. No Treatment
  misc_feature: MA Experiment ID: 20000090 Result: Down-regulated in Transcription
  misc_feature: MA Experiment ID: 20000093 Result: Down-regulated in Transcription
  misc_feature: MA Experiment 20000093 PARAMETER Experiment Name: At_42deg_Heat_cDNA_P Parameter: Temperature (deg C) Value: 42 vs. 22
  misc_feature: MA Experiment 20000093 PARAMETER Experiment Name: At_42deg_Heat_cDNA_P Parameter: Timepoint (hr) Value: 0.5
  misc_feature: MA Experiment 20000093 PARAMETER Experiment Name: At_42deg_Heat_cDNA_P Parameter: Tissue Value: Aerial
  misc_feature: MA Experiment ID: 20000111 Result: Down-regulated in Transcription
  misc_feature: MA Experiment 20000111 PARAMETER Experiment Name: At_42deg_Heat_cDNA_P Parameter: Temperature (deg C) Value: 42 vs. 22
  misc_feature: MA Experiment 20000111 PARAMETER Experiment Name: At_42deg_Heat_cDNA_P Parameter: Timepoint (hr) Value: 6
  misc_feature: MA Experiment 20000111 PARAMETER Experiment Name: At_42deg_Heat_cDNA_P Parameter: Tissue Value: Aerial
  misc_feature: MA Experiment ID: 20000112 Result: Down-regulated in Transcription
  misc_feature: MA Experiment 20000112 PARAMETER Experiment Name: At_42deg_Heat_cDNA_P Parameter: Temperature (deg C) Value: 42 vs. 22
  misc_feature: MA Experiment 20000112 PARAMETER Experiment Name: At_42deg_Heat_cDNA_P Parameter: Timepoint (hr) Value: 2
  misc_feature: MA Experiment 20000112 PARAMETER Experiment Name: At_42deg_Heat_cDNA_P Parameter: Tissue Value: Aerial
  misc_feature: MA Experiment ID: 20000113 Result: Down-regulated in Transcription
  misc_feature: MA Experiment 20000113 PARAMETER Experiment Name: At_42deg_Heat_cDNA_P Parameter: Temperature (deg C) Value: 42 vs. 22
  misc_feature: MA Experiment 20000113 PARAMETER Experiment Name: At_42deg_Heat_cDNA_P Parameter: Timepoint (hr) Value: 8
  misc_feature: MA Experiment 20000113 PARAMETER Experiment Name: At_42deg_Heat_cDNA_P Parameter: Tissue Value: Aerial
  misc_feature: MA Experiment ID: 20000117 Result: Down-regulated in Transcription
  misc_feature: MA Experiment 20000117 PARAMETER Experiment Name: At_100uM_ABA_Mutants_cDNA_P Parameter: Plant Line Value: Columbia
  misc_feature: MA Experiment 20000117 PARAMETER Experiment Name: At_100uM_ABA_Mutants_cDNA_P Parameter: Timepoint (hr) Value: 6
  misc_feature: MA Experiment 20000117 PARAMETER Experiment Name: At_100uM_ABA_Mutants_cDNA_P Parameter: Tissue Value: Aerial
  misc_feature: MA Experiment 20000117 PARAMETER Experiment Name: At_100uM_ABA_Mutants_cDNA_P Parameter: Treatment Value: 100uM ABA vs. No Treatment
  misc_feature: MA Experiment ID: 20000144 Result: Down-regulated in Transcription
  misc_feature: MA Experiment 20000144 PARAMETER Experiment Name: At_42deg_Heat_cDNA_P Parameter: Temperature (deg C) Value: 42 vs. 22
  misc_feature: MA Experiment 20000144 PARAMETER Experiment Name: At_42deg_Heat_cDNA_P Parameter: Timepoint (hr) Value: 1
  misc_feature: MA Experiment 20000144 PARAMETER Experiment Name: At_42deg_Heat_cDNA_P Parameter: Tissue Value: Aerial
  misc_feature: MA Experiment ID: 20000171 Result: Down-regulated in Transcription
  misc_feature: MA Experiment 20000171 PARAMETER Experiment Name: At_42deg_Heat_P Parameter: Age (day) Value: 14
  misc_feature: MA Experiment 20000171 PARAMETER Experiment Name: At_42deg_Heat_P Parameter: Organism Value: A. thaliana
  misc_feature: MA Experiment 20000171 PARAMETER Experiment Name: At_42deg_Heat_P Parameter: Plant Line Value: WS
  misc_feature: MA Experiment 20000171 PARAMETER Experiment Name: At_42deg_Heat_P Parameter: Temperature (deg C) Value: 42 vs. 22
  misc_feature: MA Experiment 20000171 PARAMETER Experiment Name: At_42deg_Heat_P Parameter: Timepoint (hr) Value: 1
  misc_feature: MA Experiment 20000171 PARAMETER Experiment Name: At_42deg_Heat_P Parameter: Tissue Value: Aerial
  misc_feature: MA Experiment ID: 20000180 Result: Up-regulated in Transcription
  misc_feature: MA Experiment 20000180 PARAMETER Experiment Name: At_Germinating_Seeds_P Parameter: Age (hr) Value: 24 vs. 0
  misc_feature: MA Experiment 20000180 PARAMETER Experiment Name: At_Germinating_Seeds_P Parameter: Tissue Value: Germinating Seeds
  misc_feature: MA Experiment ID: 20000184 Result: Up-regulated in Transcription
  misc_feature: MA Experiment 20000184 PARAMETER Experiment Name: At_Shoots__P Parameter: Age (day) Value: 7
  misc_feature: MA Experiment 20000184 PARAMETER Experiment Name: At_Shoots__P Parameter: Tissue Value: Shoots vs. Whole Plant
  misc_feature: MA Experiment ID: 20000185 Result: Down-regulated in Transcription
  misc_feature: MA Experiment 20000185 PARAMETER Experiment Name: At_Roots__P Parameter: Age (day) Value: 7 vs. 21
  misc_feature: MA Experiment 20000185 PARAMETER Experiment Name: At_Roots__P Parameter: Organism Value: A. thaliana
  misc_feature: MA Experiment 20000185 PARAMETER Experiment Name: At_Roots__P Parameter: Tissue Value: Roots vs. Whole Plant
  misc_feature: MA Experiment ID: 20000224 Result: Up-regulated in Transcription
  misc_feature: MA Experiment ID: 20000234 Result: Up-regulated in Transcription
  misc_feature: MA Experiment 20000234 PARAMETER Experiment Name: At_Siliques_P Parameter: Age (day) Value: 21
  misc_feature: MA Experiment 20000234 PARAMETER Experiment Name: At_Siliques_P Parameter: Organism Value: A. thaliana
  misc_feature: MA Experiment 20000234 PARAMETER Experiment Name: At_Siliques_P Parameter: Plant Line Value: WS
  misc_feature: MA Experiment 20000234 PARAMETER Experiment Name: At_Siliques_P Parameter: Tissue Value: Less Than 5mm Siliques vs. Whole Plant
  misc_feature: MA Experiment ID: 20000235 Result: Up-regulated in Transcription
  misc_feature: MA Experiment 20000235 PARAMETER Experiment Name: At_Siliques_P Parameter: Age (day) Value: 21
  misc_feature: MA Experiment 20000235 PARAMETER Experiment Name: At_Siliques_P Parameter: Organism Value: A. thaliana
  misc_feature: MA Experiment 20000235 PARAMETER Experiment Name: At_Siliques_P Parameter: Plant Line Value: WS
  misc_feature: MA Experiment 20000235 PARAMETER Experiment Name: At_Siliques_P Parameter: Tissue Value: 5-10mm Siliques vs. Whole Plant
  misc_feature: MA Experiment ID: 20000264 Result: Up-regulated in Transcription
  misc_feature: MA Experiment 20000264 PARAMETER Experiment Name: At_Open_Flower_P Parameter: Age (day) Value: 21
  misc_feature: MA Experiment 20000264 PARAMETER Experiment Name: At_Open_Flower_P Parameter: Plant Line Value: WS
  misc_feature: MA Experiment 20000264 PARAMETER Experiment Name: At_Open_Flower_P Parameter: Tissue Value: Open Flower vs. Whole Plant
  misc_feature: MA Experiment ID: 20000265 Result: Up-regulated in Transcription
  misc_feature: MA Experiment 20000265 PARAMETER Experiment Name: At_Open_Flower_P Parameter: Age (day) Value: 21
  misc_feature: MA Experiment 20000265 PARAMETER Experiment Name: At_Open_Flower_P Parameter: Plant Line Value: WS
  misc_feature: MA Experiment 20000265 PARAMETER Experiment Name: At_Open_Flower_P Parameter: Tissue Value: Closed Flower vs. Whole Plant
  misc_feature: MA Experiment ID: 20000286 Result: Up-regulated in Transcription
  misc_feature: MA Experiment 20000286 PARAMETER Experiment Name: At_Open_Flower_P Parameter: Age (day) Value: 21
  misc_feature: MA Experiment 20000286 PARAMETER Experiment Name: At_Open_Flower_P Parameter: Plant Line Value: WS
  misc_feature: MA Experiment 20000286 PARAMETER Experiment Name: At_Open_Flower_P Parameter: Tissue Value: Half Open vs. Whole Plant
  misc_feature: MA Experiment ID: 20000436 Result: Down-regulated in Transcription
  misc_feature: MA Experiment 20000436 PARAMETER Experiment Name: At_Drought_P Parameter: Age (day) Value: 7
  misc_feature: MA Experiment 20000436 PARAMETER Experiment Name: At_Drought_P Parameter: Organism Value: A. thaliana
  misc_feature: MA Experiment 20000436 PARAMETER Experiment Name: At_Drought_P Parameter: Plant Line Value: WS
  misc_feature: MA Experiment 20000436 PARAMETER Experiment Name: At_Drought_P Parameter: Timepoint (hr) Value: 12
  misc_feature: MA Experiment 20000436 PARAMETER Experiment Name: At_Drought_P Parameter: Tissue Value: Whole Plant
  misc_feature: MA Experiment 20000436 PARAMETER Experiment Name: At_Drought_P Parameter: Treatment Value: Drought vs. No Drought
  misc_feature: MA Experiment ID: 20000437 Result: Down-regulated in Transcription
  misc_feature: MA Experiment 20000437 PARAMETER Experiment Name: At_Drought_P Parameter: Age (day) Value: 8
  misc_feature: MA Experiment 20000437 PARAMETER Experiment Name: At_Drought_P Parameter: Organism Value: A. thaliana
  misc_feature: MA Experiment 20000437 PARAMETER Experiment Name: At_Drought_P Parameter: Plant Line Value: WS
  misc_feature: MA Experiment 20000437 PARAMETER Experiment Name: At_Drought_P Parameter: Timepoint (hr) Value: 24
  misc_feature: MA Experiment 20000437 PARAMETER Experiment Name: At_Drought_P Parameter: Tissue Value: Whole Plant
  misc_feature: MA Experiment 20000437 PARAMETER Experiment Name: At_Drought_P Parameter: Treatment Value: Drought vs. No Drought
  misc_feature: MA Experiment ID: 20000439 Result: Down-regulated in Transcription
  misc_feature: MA Experiment 20000439 PARAMETER Experiment Name: At_Roots__P Parameter: Age (day) Value: 14 vs. 21
  misc_feature: MA Experiment 20000439 PARAMETER Experiment Name: At_Roots__P Parameter: Organism Value: A. thaliana
  misc_feature: MA Experiment 20000439 PARAMETER Experiment Name: At_Roots__P Parameter: Tissue Value: Roots vs. Whole Plant
  misc_feature: MA Experiment ID: 20000573 Result: Down-regulated in Transcription
  misc_feature: MA Experiment 20000573 PARAMETER Experiment Name: At_100uM_ABA_Mutants__P Parameter: Organism Value: A. thaliana
  misc_feature: MA Experiment 20000573 PARAMETER Experiment Name: At_100uM_ABA_Mutants__P Parameter: Plant Line Value: CS22 vs. Ler wt
  misc_feature: MA Experiment 20000573 PARAMETER Experiment Name: At_100uM_ABA_Mutants__P Parameter: Timepoint (hr) Value: N/A
  misc_feature: MA Experiment 20000573 PARAMETER Experiment Name: At_100uM_ABA_Mutants__P Parameter: Tissue Value: Whole Plant
  misc_feature: MA Experiment 20000573 PARAMETER Experiment Name: At_100uM_ABA_Mutants__P Parameter: Treatment Value: None
  misc_feature: MA Experiment ID: 20000574 Result: Down-regulated in Transcription
  misc_feature: MA Experiment 20000574 PARAMETER Experiment Name: At_100uM_ABA_Mutants__P Parameter: Organism Value: A. thaliana
  misc_feature: MA Experiment 20000574 PARAMETER Experiment Name: At_100uM_ABA_Mutants__P Parameter: Plant Line Value: CS23 vs. Ler wt
  misc_feature: MA Experiment 20000574 PARAMETER Experiment Name: At_100uM_ABA_Mutants__P Parameter: Timepoint (hr) Value: N/A
  misc_feature: MA Experiment 20000574 PARAMETER Experiment Name: At_100uM_ABA_Mutants__P Parameter: Tissue Value: Whole Plant
  misc_feature: MA Experiment 20000574 PARAMETER Experiment Name: At_100uM_ABA_Mutants__P Parameter: Treatment Value: None
  misc_feature: MA Experiment ID: 20000794 Result: Down-regulated in Transcription
  misc_feature: MA Experiment 20000794 PARAMETER Experiment Name: At_Petals_P Parameter: Age (day) Value: 23-25 days
  misc_feature: MA Experiment 20000794 PARAMETER Experiment Name: At_Petals_P Parameter: Plant Line Value: WS
  misc_feature: MA Experiment 20000794 PARAMETER Experiment Name: At_Petals_P Parameter: Tissue Value: Petals vs. Whole plant
  misc_feature: MA Experiment ID: 20001248 Result: Down-regulated in Transcription
  misc_feature: MA Experiment 20001248 PARAMETER Experiment Name: At_Far-red-induction_P Parameter: Age (day) Value: 7
  misc_feature: MA Experiment 20001248 PARAMETER Experiment Name: At_Far-red-induction_P Parameter: Light Value: Far-red vs. White
  misc_feature: MA Experiment 20001248 PARAMETER Experiment Name: At_Far-red-induction_P Parameter: Organism Value: A. thaliana
  misc_feature: MA Experiment 20001248 PARAMETER Experiment Name: At_Far-red-induction_P Parameter: Plant Line Value: Columbia
  misc_feature: MA Experiment 20001248 PARAMETER Experiment Name: At_Far-red-induction_P Parameter: Timepoint (hr) Value: 4
  misc_feature: MA Experiment 20001248 PARAMETER Experiment Name: At_Far-red-induction_P Parameter: Tissue Value: Whole Plant
  misc_feature: MA Experiment ID: 20001450 Result: Down-regulated in Transcription
  misc_feature: MA Experiment 20001450 PARAMETER Experiment Name: At_Far-red-induction_P Parameter: Age (day) Value: 7
  misc_feature: MA Experiment 20001450 PARAMETER Experiment Name: At_Far-red-induction_P Parameter: Light Value: Far-red vs. White
  misc_feature: MA Experiment 20001450 PARAMETER Experiment Name: At_Far-red-induction_P Parameter: Organism Value: A. thaliana
  misc_feature: MA Experiment 20001450 PARAMETER Experiment Name: At_Far-red-induction_P Parameter: Plant Line Value: Columbia
  misc_feature: MA Experiment 20001450 PARAMETER Experiment Name: At_Far-red-induction_P Parameter: Timepoint (hr) Value: 8
  misc_feature: MA Experiment 20001450 PARAMETER Experiment Name: At_Far-red-induction_P Parameter: Tissue Value: Whole Plant
  misc_feature: MA Experiment ID: 20001451 Result: Down-regulated in Transcription
  misc_feature: MA Experiment 20001451 PARAMETER Experiment Name: At_Far-red-induction_P Parameter: Age (day) Value: 7
  misc_feature: MA Experiment 20001451 PARAMETER Experiment Name: At_Far-red-induction_P Parameter: Light Value: Far-red vs. White
  misc_feature: MA Experiment 20001451 PARAMETER Experiment Name: At_Far-red-induction_P Parameter: Organism Value: A. thaliana
  misc_feature: MA Experiment 20001451 PARAMETER Experiment Name: At_Far-red-induction_P Parameter: Plant Line Value: Columbia
  misc_feature: MA Experiment 20001451 PARAMETER Experiment Name: At_Far-red-induction_P Parameter: Timepoint (hr) Value: 24
  misc_feature: MA Experiment 20001451 PARAMETER Experiment Name: At_Far-red-induction_P Parameter: Tissue Value: Whole Plant
  misc_feature: MA Experiment ID: 20001555 Result: Down-regulated in Transcription
  misc_feature: MA Experiment 20001555 PARAMETER Experiment Name: At_Drought_Soil_Dry_P Parameter: Age (day) Value: 24
  misc_feature: MA Experiment 20001555 PARAMETER Experiment Name: At_Drought_Soil_Dry_P Parameter: Organism Value: A. thaliana
  misc_feature: MA Experiment 20001555 PARAMETER Experiment Name: At_Drought_Soil_Dry_P Parameter: Plant Line Value: WS
  misc_feature: MA Experiment 20001555 PARAMETER Experiment Name: At_Drought_Soil_Dry_P Parameter: Post Timepoint (hr) Value: None
  misc_feature: MA Experiment 20001555 PARAMETER Experiment Name: At_Drought_Soil_Dry_P Parameter: Post-Treatment Value: None
  misc_feature: MA Experiment 20001555 PARAMETER Experiment Name: At_Drought_Soil_Dry_P Parameter: Timepoint (day) Value: 10
  misc_feature: MA Experiment 20001555 PARAMETER Experiment Name: At_Drought_Soil_Dry_P Parameter: Treatment Value: Drought vs. No Drought
  misc_feature: MA Experiment ID: 20001557 Result: Up-regulated in Transcription
  misc_feature: MA Experiment 20001557 PARAMETER Experiment Name: At_Drought_Soil_Dry_P Parameter: Age (day) Value: 27
  misc_feature: MA Experiment 20001557 PARAMETER Experiment Name: At_Drought_Soil_Dry_P Parameter: Organism Value: A. thaliana
  misc_feature: MA Experiment 20001557 PARAMETER Experiment Name: At_Drought_Soil_Dry_P Parameter: Plant Line Value: WS
  misc_feature: MA Experiment 20001557 PARAMETER Experiment Name: At_Drought_Soil_Dry_P Parameter: Post Timepoint (hr) Value: 3
  misc_feature: MA Experiment 20001557 PARAMETER Experiment Name: At_Drought_Soil_Dry_P Parameter: Post-Treatment Value: Re-Water vs. No Drought
  misc_feature: MA Experiment 20001557 PARAMETER Experiment Name: At_Drought_Soil_Dry_P Parameter: Timepoint (day) Value: 13
  misc_feature: MA Experiment 20001557 PARAMETER Experiment Name: At_Drought_Soil_Dry_P Parameter: Treatment Value: Drought vs. No Drought
  misc_feature: MA Experiment ID: 20001558 Result: Up-regulated in Transcription
  misc_feature: MA Experiment 20001558 PARAMETER Experiment Name: At_Drought_Soil_Dry_P Parameter: Age (day) Value: 27
  misc_feature: MA Experiment 20001558 PARAMETER Experiment Name: At_Drought_Soil_Dry_P Parameter: Organism Value: A. thaliana
  misc_feature: MA Experiment 20001558 PARAMETER Experiment Name: At_Drought_Soil_Dry_P Parameter: Plant Line Value: WS
  misc_feature: MA Experiment 20001558 PARAMETER Experiment Name: At_Drought_Soil_Dry_P Parameter: Post Timepoint (hr) Value: 6
  misc_feature: MA Experiment 20001558 PARAMETER Experiment Name: At_Drought_Soil_Dry_P Parameter: Post-Treatment Value: Re-Water vs. No Drought
  misc_feature: MA Experiment 20001558 PARAMETER Experiment Name: At_Drought_Soil_Dry_P Parameter: Timepoint (day) Value: 13
  misc_feature: MA Experiment 20001558 PARAMETER Experiment Name: At_Drought_Soil_Dry_P Parameter: Treatment Value: Drought vs. No Drought
  misc_feature: MA Experiment ID: 20001560 Result: Up-regulated in Transcription
  misc_feature: MA Experiment 20001560 PARAMETER Experiment Name: At_Drought_Soil_Dry_P Parameter: Age (day) Value: 28
  misc_feature: MA Experiment 20001560 PARAMETER Experiment Name: At_Drought_Soil_Dry_P Parameter: Organism Value: A. thaliana
  misc_feature: MA Experiment 20001560 PARAMETER Experiment Name: At_Drought_Soil_Dry_P Parameter: Plant Line Value: WS
  misc_feature: MA Experiment 20001560 PARAMETER Experiment Name: At_Drought_Soil_Dry_P Parameter: Post Timepoint (hr) Value: None
  misc_feature: MA Experiment 20001560 PARAMETER Experiment Name: At_Drought_Soil_Dry_P Parameter: Post-Treatment Value: None
  misc_feature: MA Experiment 20001560 PARAMETER Experiment Name: At_Drought_Soil_Dry_P Parameter: Timepoint (day) Value: 14
  misc_feature: MA Experiment 20001560 PARAMETER Experiment Name: At_Drought_Soil_Dry_P Parameter: Treatment Value: Drought vs. No Drought
  misc_feature: MA Experiment ID: 20001906 Result: Down-regulated in Transcription
  misc_feature: MA Experiment 20001906 PARAMETER Experiment Name: At_Drought_Reproduction_P Parameter: Age (day) Value: 35
  misc_feature: MA Experiment 20001906 PARAMETER Experiment Name: At_Drought_Reproduction_P Parameter: Organism Value: A. thaliana
  misc_feature: MA Experiment 20001906 PARAMETER Experiment Name: At_Drought_Reproduction_P Parameter: Plant Line Value: WS
  misc_feature: MA Experiment 20001906 PARAMETER Experiment Name: At_Drought_Reproduction_P Parameter: Timepoint (day) Value: 5
  misc_feature: MA Experiment 20001906 PARAMETER Experiment Name: At_Drought_Reproduction_P Parameter: Tissue Value: Siliques
  misc_feature: MA Experiment 20001906 PARAMETER Experiment Name: At_Drought_Reproduction_P Parameter: Treatment Value: Drought vs. No Drought
  misc_feature: MA Experiment ID: 20001908 Result: Down-regulated in Transcription
  misc_feature: MA Experiment 20001908 PARAMETER Experiment Name: At_Drought_Reproduction_P Parameter: Age (day) Value: 40
  misc_feature: MA Experiment 20001908 PARAMETER Experiment Name: At_Drought_Reproduction_P Parameter: Organism Value: A. thaliana
  misc_feature: MA Experiment 20001908 PARAMETER Experiment Name: At_Drought_Reproduction_P Parameter: Plant Line Value: WS
  misc_feature: MA Experiment 20001908 PARAMETER Experiment Name: At_Drought_Reproduction_P Parameter: Timepoint (day) Value: 10
  misc_feature: MA Experiment 20001908 PARAMETER Experiment Name: At_Drought_Reproduction_P Parameter: Tissue Value: Siliques
  misc_feature: MA Experiment 20001908 PARAMETER Experiment Name: At_Drought_Reproduction_P Parameter: Treatment Value: Drought vs. No Drought
  misc_feature: MA Experiment ID: 20001911 Result: Down-regulated in Transcription
  misc_feature: MA Experiment 20001911 PARAMETER Experiment Name: At_Drought_Reproduction_P Parameter: Age (day) Value: 40
  misc_feature: MA Experiment 20001911 PARAMETER Experiment Name: At_Drought_Reproduction_P Parameter: Organism Value: A. thaliana
  misc_feature: MA Experiment 20001911 PARAMETER Experiment Name: At_Drought_Reproduction_P Parameter: Plant Line Value: WS
  misc_feature: MA Experiment 20001911 PARAMETER Experiment Name: At_Drought_Reproduction_P Parameter: Timepoint (day) Value: 10
  misc_feature: MA Experiment 20001911 PARAMETER Experiment Name: At_Drought_Reproduction_P Parameter: Tissue Value: Flowers
  misc_feature: MA Experiment 20001911 PARAMETER Experiment Name: At_Drought_Reproduction_P Parameter: Treatment Value: Drought vs. No Drought
attcatcaaaagccacataagaagttgatgcagaagcaataataacaaaacaaaaaaacattaaaaaaaaaagctcttcagttttggtttctgcagtctccaatggctctcaagctctttctctttgctcttcttctctgtctcccgacttctctctcctccactgcctctaaaggtaaagagaagaagtcgaagtttaatccatacagatacacattcatcgataaagcaagcacattctcatcatcttcctcatcttcattttcatccaacggtcaagattcgtcctacgactacatagtcatcggaggtggaaccgcagggtgtcctctcgccgcaacgttgtcgcagaatttcagcgttcttgttttagagagaggtggcgttccgtttacaaacgcaaacgtttctttcctcaggaattttcacatcggacttgctgacatttcagcttcttccgcgtctcaagcgtttgtttccactgacggcgtttacaacgcccgtgctagagttctcggtggcggttcctgtattaacgccggtttttactccagagccgatgctgcgttcgtgaagcgagcaggatgggatccgaagctggtgaaggagtcgtatccatgggtggagagagagattgttcatcagccaaagttaacgttatggcagaaagctctcagagacagtcttttagaggttggagtcagacctttcaatggtttcacttacgatcacgtttccggaaccaaaatcggcggtacaattttcgacagattcggccgtcgtcacaccgcggcggagcttctcgcttacgctaatcctcagaagcttagagtcttgatctacgccaccgtgcaaaaaatcgtctttgacacttctggaacaaggcctcgagtaacaggagtaatattcaaagatgagaaaggtaatcaacaccaggctttactctcgaatagaaagggaagtgaagtgatcttatctagtggagctattgggtcaccacagatgctgatgttaagtgggattggacctaagaaggagcttcagaggctgaagattcctgtggttttagagaatgagcatgtaggaaaaggaatggctgataatcccatgaacacgatcttggtgccttcaaaggcgcctatagagcagtcacttattcagactgttggaattacaaagatgggtgtgtatgttgaagccagtactggctttgggcaatctcctgagagtattcatactcactatgggattatgtcgaacaagaatgaattgttttccaccattcctgcaaagcagagaagaccagaagcaacgcaagcttacatcacaagaaacaaataccaacttcacgaagcattcaatggaagtttcatcttggagaaacttgcttacccgatctctagagggcatttgagcttggtcaacacaaatgttgatgacaacccttcagtcaccttcaattactttaaacacccggtggatctccaacgctgtgttgaagccattcgtcttgtttccaaagtggtgacgtctaaccgtttcttaaactacacgcagtgtgacaagcaaaacgtacacaagatgcttagcttaagcgtcaaggcaaacatcaatctaaggccaaagcaactgaacgataccaaatcaatggctcagttctgcaaagacactgttgtcacaatctggcactaccatggtggatgtcttgtgggtaaagttgtgagccctaaccgcaaagttcttggtgtcgacaggctcagagttattgatggttcaacgtttgacgagtctccaggaaccaacccgcaagctactatgatgatgatgggaagatacatgggagtcaagattcttcgggagagacttggaaacaaagctggtgtttagtttgcagattgagcttttatggtagacaaattcgtagcagataattctgttgtggaattgtgttggagaatatctctctctgtctccttctctgttatttgatattcgattcattaaagtataggatcatattgtctaatgaactgtgtaaccctctattgggcaatcggctctgttgcttattagcttgtgtgaaaagttaatcacgttttctgtttc

SEQ ID NO: 83015 - protein, 594 aa, Arabidopsis thaliana; identical to SEQ ID NO: 76779
  peptide (1)..(594): Ceres Seq. ID no. 12668218
  misc_feature (63)..(328): Pfam Name: GMC oxidoreductase Pfam Description: GMC oxidoreductase
  misc_feature (1)..(594): Homolog of NCBI NO: 11357159 NR Description: adhesion of calyx edges protein ACE [imported] -
  misc_feature (51)..(594): Homolog of NCBI NO: 37572986 NR Description: putative mandelonitrile lyase [Oryza sativa
  misc_feature (41)..(591): Homolog of NCBI NO: 22329512 NR Description: hypothetical protein; protein id: At1g12570.1,
  misc_feature (41)..(591): Homolog of NCBI NO: 17978954 NR Description: At1g12570/T12C24_9 [Arabidopsis thaliana]
  misc_feature (61)..(591): Homolog of NCBI NO: 8778640 NR Description: F5O11.31 [Arabidopsis thaliana]
  misc_feature (61)..(591): Homolog of NCBI NO: 9502391 NR Description: T12C24.11 [Arabidopsis thaliana]
  misc_feature (41)..(591): Homolog of NCBI NO: 15242236 NR Description: mandelonitrile lyase-like protein; protein id: supported by cDNA: gi_14194160 [Arabidopsis thaliana]
  misc_feature (61)..(587): Homolog of NCBI NO: 11358959 NR Description: probable mandelonitrile lyase (EC 4.1.2.10) - rice >gi|7649261|gb|AAF65820.1|AF251031_1 putative
  misc_feature (41)..(577): Homolog of NCBI NO: 10177730 NR Description: mandelonitrile lyase-like protein [Arabidopsis
  misc_feature (59)..(577): Homolog of NCBI NO: 10177728 NR Description: mandelonitrile lyase-like protein [Arabidopsis

SEQ ID NO: 83016 - DNA, 1834 bp, Arabidopsis thaliana
  misc_feature (1)..(1834): Ceres Seq. ID no. 12668230
  misc_feature: MA Experiment ID: 20000306 Result: Up-regulated in Transcription
  misc_feature: MA Experiment 20000306 PARAMETER Experiment Name: At_Germinating_Seeds_Sub_P Parameter: Age (hr) Value: 6 vs. 0
  misc_feature: MA Experiment 20000306 PARAMETER Experiment Name: At_Germinating_Seeds_Sub_P Parameter: Organism Value: A. thaliana
  misc_feature: MA Experiment 20000306 PARAMETER Experiment Name: At_Germinating_Seeds_Sub_P Parameter: Plant Line Value: WS
  misc_feature: MA Experiment 20000306 PARAMETER Experiment Name: At_Germinating_Seeds_Sub_P Parameter: Tissue Value: Germinating Seeds
  misc_feature: MA Experiment ID: 20000307 Result: Up-regulated in Transcription
  misc_feature: MA Experiment 20000307 PARAMETER Experiment Name: At_Germinating_Seeds_Sub_P Parameter: Age (hr) Value: 24 vs. 0
  misc_feature: MA Experiment 20000307 PARAMETER Experiment Name: At_Germinating_Seeds_Sub_P Parameter: Organism Value: A. thaliana
  misc_feature: MA Experiment 20000307 PARAMETER Experiment Name: At_Germinating_Seeds_Sub_P Parameter: Plant Line Value: WS
  misc_feature: MA Experiment 20000307 PARAMETER Experiment Name: At_Germinating_Seeds_Sub_P Parameter: Tissue Value: Germinating Seeds
  misc_feature: MA Experiment ID: 20000329 Result: Up-regulated in Transcription
  misc_feature: MA Experiment 20000329 PARAMETER Experiment Name: At_4deg_Cold_Sub_P Parameter: Age (day) Value: 14
  misc_feature: MA Experiment 20000329 PARAMETER Experiment Name: At_4deg_Cold_Sub_P Parameter: Organism Value: A. thaliana
  misc_feature: MA Experiment 20000329 PARAMETER Experiment Name: At_4deg_Cold_Sub_P Parameter: Plant Line Value: WS
  misc_feature: MA Experiment 20000329 PARAMETER Experiment Name: At_4deg_Cold_Sub_P Parameter: Temperature (deg C) Value: 4 vs. 22
  misc_feature: MA Experiment 20000329 PARAMETER Experiment Name: At_4deg_Cold_Sub_P Parameter: Timepoint (hr) Value: 6
  misc_feature: MA Experiment 20000329 PARAMETER Experiment Name: At_4deg_Cold_Sub_P Parameter: Tissue Value: Aerial
  misc_feature: MA Experiment ID: 20000332 Result: Up-regulated in Transcription
  misc_feature: MA Experiment 20000332 PARAMETER Experiment Name: At_4deg_Cold_Sub_P Parameter: Age (day) Value: 14
  misc_feature: MA Experiment 20000332 PARAMETER Experiment Name: At_4deg_Cold_Sub_P Parameter: Organism Value: A. thaliana
  misc_feature: MA Experiment 20000332 PARAMETER Experiment Name: At_4deg_Cold_Sub_P Parameter: Plant Line Value: WS
  misc_feature: MA Experiment 20000332 PARAMETER Experiment Name: At_4deg_Cold_Sub_P Parameter: Temperature (deg C) Value: 4 vs. 22
  misc_feature: MA Experiment 20000332 PARAMETER Experiment Name: At_4deg_Cold_Sub_P Parameter: Timepoint (hr) Value: 2
  misc_feature: MA Experiment 20000332 PARAMETER Experiment Name: At_4deg_Cold_Sub_P Parameter: Tissue Value: Aerial
  misc_feature: MA Experiment ID: 20000349 Result: Down-regulated in Transcription
  misc_feature: MA Experiment 20000349 PARAMETER Experiment Name: At_100uM_ABA_Sub_P Parameter: Age (day) Value: 14
  misc_feature: MA Experiment 20000349 PARAMETER Experiment Name: At_100uM_ABA_Sub_P Parameter: Organism Value: A. thaliana
  misc_feature: MA Experiment 20000349 PARAMETER Experiment Name: At_100uM_ABA_Sub_P Parameter: Plant Line Value: WS
  misc_feature: MA Experiment 20000349 PARAMETER Experiment Name: At_100uM_ABA_Sub_P Parameter: Timepoint (hr) Value: 6
  misc_feature: MA Experiment 20000349 PARAMETER Experiment Name: At_100uM_ABA_Sub_P Parameter: Tissue Value: Aerial
  misc_feature: MA Experiment 20000349 PARAMETER Experiment Name: At_100uM_ABA_Sub_P Parameter: Treatment Value: 100uM ABA vs. No Treatment
  misc_feature: MA Experiment ID: 20000440 Result: Up-regulated in Transcription
  misc_feature: MA Experiment 20000440 PARAMETER Experiment Name: At_Closed-Flower__Sub_P Parameter: Tissue Value: Closed Flower vs. Whole Plant
accacagagaaccacaacatacaaaaaaagaaccctatagaactctgatttttttcttgttgtcaatagtcaatggctcacagtcacactaatggcgccatctctccttctttctccaaagacttatgcgaggagcgtgaaatccaaaagaattactggaaagagcattcagtgggattgagtgttgaagctatgatgcttgattccaaagcttctgacctcgacaaagaagaacgtcctgagatacttgcgtttcttccacctattgaagggacaacagtgctagagtttggtgctggaattggtcgttttactactgaattagctcagaaggccggccaggtcattgcggttgacttcattgaaagtgttatcaaaaagaatgagaacattaacggtcactacaagaacgtcaaatttctgtgcgctgatgtcacatcaccaaatatgaactttccaaatgagtctatggatctgatattctccaactggctgctaatgtatctctctgatcaagaggttgaagatttggcgaaaaagatgttacaatggacaaaggttggcgggtatattttctttcgggagtcttgtttccatcagtctggtgataacaagcggaagtacaacccaacacactaccgtgaacctaaattttacacaaagcttttcaaagaatgccatatgaatgacgaagatgggaattcgtatgaactctctttggttagctgtaaatgcattggagcttatgtgagaaacaaaaagaaccagaaccagatatgctggctttggcagaaagtcagttcggataatgataggggcttccaacgcttcttggacaatgtccagtataagtctagtggtatcttacgctatgagcgtgtctttggagaagggtttgttagcacagggggactcgagacaacaaaggaattcgtggatatgctggatctgaaacctggccaaaaagttctagacgttgggtgcggaataggaggaggggacttctacatggctgagaactttgacgtggatgttgtgggcattgatctatctgtaaacatgatctcttttgcgcttgaacacgcaataggactcaaatgctctgtagaattcgaagtagctgattgcaccaagaaggagtatcctgataacacctttgatgttatttatagcagagacaccattctacatatccaagtataagcttccgctatttcttcttcccttatgactttaatttggtatccattttgtaatccctggtcttactctcaggacaagccagcattgttcagaagattctacaaatggttgaagccgggagggaaagttctcatcactgattactgcagaagccccaaaaccccatctccagactttgcaatctacatcaagaaacgaggttatgatcttcatgatgtacaagcatacggtcagatgctgagagatgctggtttcgaggaggtaatcgcggaggatagaaccgatcagttcatgaaagtcctgaaacgggaactggatgcagtggagaaggagaaggaagaattcatcagtgacttctcgaaagaggattacgaggatattataggcgggtggaagtcaaagctacttaggagctcaagtggtgagcagaagtggggtttgttcatcgccaagagaaactgattatggcatttactataagttggaaataaatttgggtatgtatgtagatcatcaaaacccagtaccctgctattatctctacaagctatatatatgtggctgtgaggttcctttaatgtctccattttacagcatatccagtttggtatttaatatatgtgatattttg

SEQ ID NO: 83017 - protein, 376 aa, Arabidopsis thaliana
  peptide (1)..(376): Ceres Seq. ID no. 12668231
  misc_feature (20)..(375): Homolog of NCBI NO: 15219502 NR Description: phosphoethanolamine N-methyltransferase, protein id: At1g73600.1 [Arabidopsis thaliana]
  misc_feature (20)..(375): Homolog of NCBI NO: 24212080 NR Description: Putative phosphoethanolamine N-methyltransferase 3
  misc_feature (20)..(375): Homolog of NCBI NO: 30684743 NR Description: phosphoethanolamine N-methyltransferase, putative
  misc_feature (20)..(375): Homolog of NCBI NO: 20260388 NR Description: unknown protein [Arabidopsis thaliana]
  misc_feature (20)..(375): Homolog of NCBI NO: 9294501 NR Description: methyl transferase-like protein [Arabidopsis
  misc_feature (20)..(375): Homolog of NCBI NO: 28804509 NR Description: phosphoethanolamine N-methyltransferase [Aster
  misc_feature (31)..(375): Homolog of NCBI NO: 15221909 NR Description: phosphoethanolamine N-methyltransferase, protein id: At1g48600.1, supported by cDNA: gi_16226648, by cDNA: gi_17380783 [Arabidopsis thaliana]
  misc_feature (17)..(375): Homolog of NCBI NO: 28436074 NR Description: phosphoethanolamine N-methyltransferase [Suaeda
  misc_feature (20)..(375): Homolog of NCBI NO: 24212082 NR Description: Phosphoethanolamine N-methyltransferase
  misc_feature (20)..(375): Homolog of NCBI NO: 12584943 NR Description: phosphoethanolamine N-methyltransferase
MAHSHTNGAISPSFSKDLCEEREIQKNYWKEHSVGLSVEAMMLDSKASDLDKEERPEILAFLPPIEGTTVLEFGAGIGRFTTELAQKAGQVIAVDFIESVIKKNENINGHYKNVKFLCADVTSPNMNFPNESMDLIFSNWLLMYLSDQEVEDLAKKMLQWTKVGGYIFFRESCFHQSGDNKRKYNPTHYREPKFYTKLFKECHMNDEDGNSYELSLVSCKCIGAYVRNKKNQNQICWLWQKVSSDNDRGFQRFLDNVQYKSSGILRYERVFGEGFVSTGGLETTKEFVDMLDLKPGQKVLDVGCGIGGGDFYMAENFDVDVVGIDLSVNMISFALEHAIGLKCSVEFEVADCTKKEYPDNTFDVIYSRDTILHIQV

SEQ ID NO: 83018 - protein, 336 aa, Arabidopsis thaliana
  peptide (1)..(336): Ceres Seq. ID no. 12668232
  misc_feature (1)..(335): Homolog of NCBI NO: 15219502 NR Description: phosphoethanolamine N-methyltransferase, protein id: At1g73600.1 [Arabidopsis thaliana]
  misc_feature (1)..(335): Homolog of NCBI NO: 24212080 NR Description: Putative phosphoethanolamine N-methyltransferase 3
  misc_feature (1)..(335): Homolog of NCBI NO: 30684743 NR Description: phosphoethanolamine N-methyltransferase, putative
  misc_feature (1)..(335): Homolog of NCBI NO: 20260388 NR Description: unknown protein [Arabidopsis thaliana]
  misc_feature (1)..(335): Homolog of NCBI NO: 9294501 NR Description: methyl transferase-like protein [Arabidopsis
  misc_feature (1)..(335): Homolog of NCBI NO: 28804509 NR Description: phosphoethanolamine N-methyltransferase [Aster
  misc_feature (1)..(335): Homolog of NCBI NO: 15221909 NR Description: phosphoethanolamine N-methyltransferase, protein id: At1g48600.1, supported by cDNA: gi_16226648, by cDNA: gi_17380783 [Arabidopsis thaliana]
  misc_feature (1)..(335): Homolog of NCBI NO: 28436074 NR Description: phosphoethanolamine N-methyltransferase [Suaeda
  misc_feature (1)..(335): Homolog of NCBI NO: 24212082 NR Description: Phosphoethanolamine N-methyltransferase
  misc_feature (1)..(335): Homolog of NCBI NO: 12584943 NR Description: phosphoethanolamine N-methyltransferase
MMLDSKASDLDKEERPEILAFLPPIEGTTVLEFGAGIGRFTTELAQKAGQVIAVDFIESVIKKNENINGHYKNVKFLCADVTSPNMNFPNESMDLIFSNWLLMYLSDQEVEDLAKKMLQWTKVGGYIFFRESCFHQSGDNKRKYNPTHYREPKFYTKLFKECHMNDEDGNSYELSLVSCKCIGAYVRNKKNQNQICWLWQKVSSDNDRGFQRFLDNVQYKSSGILRYERVFGEGFVSTGGLETTKEFVDMLDLKPGQKVLDVGCGIGGGDFYMAENFDVDVVGIDLSVNMISFALEHAIGLKCSVEFEVADCTKKEYPDNTFDVIYSRDTILHIQV

SEQ ID NO: 83019 - protein, 335 aa, Arabidopsis thaliana
  peptide (1)..(335): Ceres Seq. ID no. 12668233
  misc_feature (1)..(334): Homolog of NCBI NO: 15219502 NR Description: phosphoethanolamine N-methyltransferase, protein id: At1g73600.1 [Arabidopsis thaliana]
  misc_feature (1)..(334): Homolog of NCBI NO: 24212080 NR Description: Putative phosphoethanolamine N-methyltransferase 3
  misc_feature (1)..(334): Homolog of NCBI NO: 30684743 NR Description: phosphoethanolamine N-methyltransferase, putative
  misc_feature (1)..(334): Homolog of NCBI NO: 20260388 NR Description: unknown protein [Arabidopsis thaliana]
  misc_feature (1)..(334): Homolog of NCBI NO: 9294501 NR Description: methyl transferase-like protein [Arabidopsis
  misc_feature (1)..(334): Homolog of NCBI NO: 28804509 NR Description: phosphoethanolamine N-methyltransferase [Aster
  misc_feature (1)..(334): Homolog of NCBI NO: 15221909 NR Description: phosphoethanolamine N-methyltransferase, protein id: At1g48600.1, supported by cDNA: gi_16226648, by cDNA: gi_17380783 [Arabidopsis thaliana]
  misc_feature (1)..(334): Homolog of NCBI NO: 28436074 NR Description: phosphoethanolamine N-methyltransferase [Suaeda
  misc_feature (1)..(334): Homolog of NCBI NO: 24212082 NR Description: Phosphoethanolamine N-methyltransferase
  misc_feature (1)..(334): Homolog of NCBI NO: 12584943 NR Description: phosphoethanolamine N-methyltransferase
MLDSKASDLDKEERPEILAFLPPIEGTTVLEFGAGIGRFTTELAQKAGQVIAVDFIESVIKKNENINGHYKNVKFLCADVTSPNMNFPNESMDLIFSNWLLMYLSDQEVEDLAKKMLQWTKVGGYIFFRESCFHQSGDNKRKYNPTHYREPKFYTKLFKECHMNDEDGNSYELSLVSCKCIGAYVRNKKNQNQICWLWQKVSSDNDRGFQRFLDNVQYKSSGILRYERVFGEGFVSTGGLETTKEFVDMLDLKPGQKVLDVGCGIGGGDFYMAENFDVDVVGIDLSVNMISFALEHAIGLKCSVEFEVADCTKKEYPDNTFDVIYSRDTILHIQV

SEQ ID NO: 83020 - DNA, 1355 bp, Arabidopsis thaliana
  misc_feature (1)..(1355): Ceres Seq. ID no. 12668276
  misc_feature: MA Experiment ID: 20000184 Result: Up-regulated in Transcription
  misc_feature: MA Experiment 20000184 PARAMETER Experiment Name: At_Shoots__P Parameter: Age (day) Value: 7
  misc_feature: MA Experiment 20000184 PARAMETER Experiment Name: At_Shoots__P Parameter: Tissue Value: Shoots vs. Whole Plant
  misc_feature: MA Experiment ID: 20000234 Result: Down-regulated in Transcription
  misc_feature: MA Experiment 20000234 PARAMETER Experiment Name: At_Siliques_P Parameter: Age (day) Value: 21
  misc_feature: MA Experiment 20000234 PARAMETER Experiment Name: At_Siliques_P Parameter: Organism Value: A. thaliana
  misc_feature: MA Experiment 20000234 PARAMETER Experiment Name: At_Siliques_P Parameter: Plant Line Value: WS
  misc_feature: MA Experiment 20000234 PARAMETER Experiment Name: At_Siliques_P Parameter: Tissue Value: Less Than 5mm Siliques vs. Whole Plant
  misc_feature: MA Experiment ID: 20000235 Result: Down-regulated in Transcription
  misc_feature: MA Experiment 20000235 PARAMETER Experiment Name: At_Siliques_P Parameter: Age (day) Value: 21
  misc_feature: MA Experiment 20000235 PARAMETER Experiment Name: At_Siliques_P Parameter: Organism Value: A. thaliana
  misc_feature: MA Experiment 20000235 PARAMETER Experiment Name: At_Siliques_P Parameter: Plant Line Value: WS
  misc_feature: MA Experiment 20000235 PARAMETER Experiment Name: At_Siliques_P Parameter: Tissue Value: 5-10mm Siliques vs. Whole Plant
  misc_feature: MA Experiment ID: 20000264 Result: Down-regulated in Transcription
  misc_feature: MA Experiment 20000264 PARAMETER Experiment Name: At_Open_Flower_P Parameter: Age (day) Value: 21
  misc_feature: MA Experiment 20000264 PARAMETER Experiment Name: At_Open_Flower_P Parameter: Plant Line Value: WS
  misc_feature: MA Experiment 20000264 PARAMETER Experiment Name: At_Open_Flower_P Parameter: Tissue Value: Open Flower vs. Whole Plant
  misc_feature: MA Experiment ID: 20000265 Result: Down-regulated in Transcription
  misc_feature: MA Experiment 20000265 PARAMETER Experiment Name: At_Open_Flower_P Parameter: Age (day) Value: 21
  misc_feature: MA Experiment 20000265 PARAMETER Experiment Name: At_Open_Flower_P Parameter: Plant Line Value: WS
  misc_feature: MA Experiment 20000265 PARAMETER Experiment Name: At_Open_Flower_P Parameter: Tissue Value: Closed Flower vs. Whole Plant
  misc_feature: MA Experiment ID: 20000286 Result: Down-regulated in Transcription
  misc_feature: MA Experiment 20000286 PARAMETER Experiment Name: At_Open_Flower_P Parameter: Age (day) Value: 21
  misc_feature: MA Experiment 20000286 PARAMETER Experiment Name: At_Open_Flower_P Parameter: Plant Line Value: WS
  misc_feature: MA Experiment 20000286 PARAMETER Experiment Name: At_Open_Flower_P Parameter: Tissue Value: Half Open vs. Whole Plant
  misc_feature: MA Experiment ID: 20000437 Result: Down-regulated in Transcription
  misc_feature: MA Experiment 20000437 PARAMETER Experiment Name: At_Drought_P Parameter: Age (day) Value: 8
  misc_feature: MA Experiment 20000437 PARAMETER Experiment Name: At_Drought_P Parameter: Organism Value: A. thaliana
  misc_feature: MA Experiment 20000437 PARAMETER Experiment Name: At_Drought_P Parameter: Plant Line Value: WS
  misc_feature: MA Experiment 20000437 PARAMETER Experiment Name: At_Drought_P Parameter: Timepoint (hr) Value: 24
  misc_feature: MA Experiment 20000437 PARAMETER Experiment Name: At_Drought_P Parameter: Tissue Value: Whole Plant
  misc_feature: MA Experiment 20000437 PARAMETER Experiment Name: At_Drought_P Parameter: Treatment Value: Drought vs. No Drought
  misc_feature: MA Experiment ID: 20000573 Result: Down-regulated in Transcription
  misc_feature: MA Experiment 20000573 PARAMETER Experiment Name: At_100uM_ABA_Mutants__P Parameter: Organism Value: A. thaliana
  misc_feature: MA Experiment 20000573 PARAMETER Experiment Name: At_100uM_ABA_Mutants__P Parameter: Plant Line Value: CS22 vs. Ler wt
  misc_feature: MA Experiment 20000573 PARAMETER Experiment Name: At_100uM_ABA_Mutants__P Parameter: Timepoint (hr) Value: N/A
  misc_feature: MA Experiment 20000573 PARAMETER Experiment Name: At_100uM_ABA_Mutants__P Parameter: Tissue Value: Whole Plant
  misc_feature: MA Experiment 20000573 PARAMETER Experiment Name: At_100uM_ABA_Mutants__P Parameter: Treatment Value: None
  misc_feature: MA Experiment ID: 20000574 Result: Down-regulated in Transcription
  misc_feature: MA Experiment 20000574 PARAMETER Experiment Name: At_100uM_ABA_Mutants__P Parameter: Organism Value: A. thaliana
  misc_feature: MA Experiment 20000574 PARAMETER Experiment Name: At_100uM_ABA_Mutants__P Parameter: Plant Line Value: CS23 vs. Ler wt
  misc_feature: MA Experiment 20000574 PARAMETER Experiment Name: At_100uM_ABA_Mutants__P Parameter: Timepoint (hr) Value: N/A
  misc_feature: MA Experiment 20000574 PARAMETER Experiment Name: At_100uM_ABA_Mutants__P Parameter: Tissue Value: Whole Plant
  misc_feature: MA Experiment 20000574 PARAMETER Experiment Name: At_100uM_ABA_Mutants__P Parameter: Treatment Value: None
  misc_feature: MA Experiment ID: 20001248 Result: Down-regulated in Transcription
  misc_feature: MA Experiment 20001248 PARAMETER Experiment Name: At_Far-red-induction_P Parameter: Age (day) Value: 7
  misc_feature: MA Experiment 20001248 PARAMETER Experiment Name: At_Far-red-induction_P Parameter: Light Value: Far-red vs. White
  misc_feature: MA Experiment 20001248 PARAMETER Experiment Name: At_Far-red-induction_P Parameter: Organism Value: A. thaliana
  misc_feature: MA Experiment 20001248 PARAMETER Experiment Name: At_Far-red-induction_P Parameter: Plant Line Value: Columbia
  misc_feature: MA Experiment 20001248 PARAMETER Experiment Name: At_Far-red-induction_P Parameter: Timepoint (hr) Value: 4
  misc_feature: MA Experiment 20001248 PARAMETER Experiment Name: At_Far-red-induction_P Parameter: Tissue Value: Whole Plant
gtttattccattttcttgtgtgtttttttccccataatttataaattttataagcaatatggagtcccacaacaacaaccagagcaacaacaacaccactggttcggcccatctggtcccatccatgggaccaatctccggttcagtctcattaaccaccactgctccaaactccactaccaccaccgtcaccgccgctaaaacacccgcaaaacgaccgtccaaggaccgtcacatcaaagtagacggacgtggccggaggatacgtatgccggctatctgcgcagcacgtgtcttccaactaacacgtgagttacaacacaaatcggacggcgagactatagagtggctgctccaacaagcggagccagctatcatcgcagccaccggaactggaaccataccggcgaatatctctactttgaacatctctcttcgaagcagtggctctactctttcagctccactgtctaaatctttccacatgggaagagcggctcaaaacgctgccgtttttgggttccagcaacagctttatcatcctcatcatatcacgacagattcttcttcttcttctcttcccaaaacattccgtgaagaagatctttttaaagatcctaattttctagatcaagaacccggttcaagatcacctaaaccgggatccgaagctcctgatcaagatccgggttcgacccggtcaagaacacaaaatatgataccgccgatgtgggcactagcgccaacgccagcctccacaaacggaggtagtgctttttggatgttaccagtcggaggaggaggaggtccggctaacgttcaggatccatcacagcacatgtgggcgtttaatccgggtcattacccgggtcgaatcgggtcggttcagctagggtctatgttagtgggaggtcaacagttagggttaggtgttgcagaaaataacaatttggggctattttccggcggaggaggagacggtggtcgggttggtctcggaatgagtcttgagcaaaagcctcaacatcaagtgagtgatcatgctactagagaccaaaatcctactatagatggttctccttgaaagacttcatgatttctttggtttttaaaaagtgtgaatgtgtgatttattgcaacttttgttgaggactccaatgttaatatgggttttagggttggcttttcgggattgccaaattgttatttaagaaaatggatttattgttttggttgcataataattaacgagttttgcaactctttttattcgatgcaaaagcatgtcacttaaaggaaatatagttgaatctctatgtgtaacataatggacaaaagaataaattaaatattta

SEQ ID NO: 83021 - protein, 341 aa, Arabidopsis thaliana
  peptide (1)..(341): Ceres Seq. ID no. 12668277
  misc_feature (39)..(239): Pfam Name: TCP family transcription factor Pfam Description: TCP family transcription factor
  misc_feature (1)..(341): Homolog of NCBI NO: 15219640 NR Description: DNA binding protein, putative; protein id: supported by cDNA: gi_15912302, supported by cDNA: gi_19548006
  misc_feature (1)..(245): Homolog of NCBI NO: 15217857 NR Description: auxin-induced basic helix-loop-helix factor, putative; protein id: At1g58100.1, supported by cDNA:
  misc_feature (15)..(339): Homolog of NCBI NO: 20975251 NR Description: transcription factor PCF3 [Oryza sativa (japonica
  misc_feature (7)..(267): Homolog of NCBI NO: 15218305 NR Description: unknown protein; protein id: At1g72010.1, by cDNA: gi_19423971 [Arabidopsis thaliana]
  misc_feature (27)..(250): Homolog of NCBI NO: 18409345 NR Description: expressed protein; protein id: At1g69690.1, by cDNA: gi_15912212, supported by cDNA: gi_19547990 [Arabidopsis
  misc_feature (109)..(334): Homolog of NCBI NO: 15218305 NR Description: unknown protein; protein id: At1g72010.1, by cDNA: gi_19423971 [Arabidopsis thaliana]
  misc_feature (8)..(264): Homolog of NCBI NO: 5731257 NR Description: auxin-induced basic helix-loop-helix
  misc_feature (41)..(136): Homolog of NCBI NO: 11357581 NR Description: hypothetical protein F1P2.170 - Arabidopsis >gi|6522545|emb|CAB61988.1| putative protein [Arabidopsis
  misc_feature (41)..(136): Homolog of NCBI NO: 22331641 NR Description: putative protein; protein id: At3g47620.1, by cDNA: gi_16604510 [Arabidopsis thaliana] AT3g47620/F1P2_170 [Arabidopsis thaliana]
  misc_feature (3)..(137): Homolog of NCBI NO: 15237274 NR Description: unknown protein; protein id: At5g23280.1 thaliana] >gi|10177817|dbj|BAB11183.1| gene_id:MKD15.14~unknown
MESHNNNQSNNNTTGSAHLVPSMGPISGSVSLTTTAPNSTTTTVTAAKTPAKRPSKDRHIKVDGRGRRIRMPAICAARVFQLTRELQHKSDGETIEWLLQQAEPAIIAATGTGTIPANISTLNISLRSSGSTLSAPLSKSFHMGRAAQNAAVFGFQQQLYHPHHITTDSSSSSLPKTFREEDLFKDPNFLDQEPGSRSPKPGSEAPDQDPGSTRSRTQNMIPPMWALAPTPASTNGGSAFWMLPVGGGGGPANVQDPSQHMWAFNPGHYPGRIGSVQLGSMLVGGQQLGLGVAENNNLGLFSGGGGDGGRVGLGMSLEQKPQHQVSDHATRDQNPTIDGSP

SEQ ID NO: 83022 - protein, 319 aa, Arabidopsis thaliana
  peptide (1)..(319): Ceres Seq. ID no. 12668278
  misc_feature (17)..(217): Pfam Name: TCP family transcription factor Pfam Description: TCP family transcription factor
  misc_feature (1)..(319): Homolog of NCBI NO: 15219640 NR Description: DNA binding protein, putative; protein id: supported by cDNA: gi_15912302, supported by cDNA: gi_19548006
  misc_feature (1)..(223): Homolog of NCBI NO: 15217857 NR Description: auxin-induced basic helix-loop-helix factor, putative; protein id: At1g58100.1, supported by cDNA:
  misc_feature (1)..(317): Homolog of NCBI NO: 20975251 NR Description: transcription factor PCF3 [Oryza sativa (japonica
  misc_feature (1)..(245): Homolog of NCBI NO: 15218305 NR Description: unknown protein; protein id: At1g72010.1, by cDNA: gi_19423971 [Arabidopsis thaliana]
  misc_feature (5)..(228): Homolog of NCBI NO: 18409345 NR Description: expressed protein; protein id: At1g69690.1, by cDNA: gi_15912212, supported by cDNA: gi_19547990 [Arabidopsis
  misc_feature (87)..(312): Homolog of NCBI NO: 15218305 NR Description: unknown protein; protein id: At1g72010.1, by cDNA: gi_19423971 [Arabidopsis thaliana]
  misc_feature (1)..(242): Homolog of NCBI NO: 5731257 NR Description: auxin-induced basic helix-loop-helix
  misc_feature (19)..(114): Homolog of NCBI NO: 11357581 NR Description: hypothetical protein F1P2.170 - Arabidopsis >gi|6522545|emb|CAB61988.1| putative protein [Arabidopsis
  misc_feature (19)..(114): Homolog of NCBI NO: 22331641 NR Description: putative protein; protein id: At3g47620.1, by cDNA: gi_16604510 [Arabidopsis thaliana] AT3g47620/F1P2_170 [Arabidopsis thaliana]
  misc_feature (1)..(115): Homolog of NCBI NO: 15237274 NR Description: unknown protein; protein id: At5g23280.1 thaliana] >gi|10177817|dbj|BAB11183.1| gene_id:MKD15.14~unknown
MGPISGSVSLTTTAPNSTTTTVTAAKTPAKRPSKDRHIKVDGRGRRIRMPAICAARVFQLTRELQHKSDGETIEWLLQQAEPAIIAATGTGTIPANISTLNISLRSSGSTLSAPLSKSFHMGRAAQNAAVFGFQQQLYHPHHITTDSSSSSLPKTFREEDLFKDPNFLDQEPGSRSPKPGSEAPDQDPGSTRSRTQNMIPPMWALAPTPASTNGGSAFWMLPVGGGGGPANVQDPSQHMWAFNPGHYPGRIGSVQLGSMLVGGQQLGLGVAENNNLGLFSGGGGDGGRVGLGMSLEQKPQHQVSDHATRDQNPTIDGSP

SEQ ID NO: 83023 - protein, 271 aa, Arabidopsis thaliana
  peptide (1)..(271): Ceres Seq. ID no. 12668279
  misc_feature (1)..(169): Pfam Name: TCP family transcription factor Pfam Description: TCP family transcription factor
  misc_feature (1)..(271): Homolog of NCBI NO: 15219640 NR Description: DNA binding protein, putative; protein id: supported by cDNA: gi_15912302, supported by cDNA: gi_19548006
  misc_feature (1)..(175): Homolog of NCBI NO: 15217857 NR Description: auxin-induced basic helix-loop-helix factor, putative; protein id: At1g58100.1, supported by cDNA:
  misc_feature (1)..(269): Homolog of NCBI NO: 20975251 NR Description: transcription factor PCF3 [Oryza sativa (japonica
  misc_feature (1)..(197): Homolog of NCBI NO: 15218305 NR Description: unknown protein; protein id: At1g72010.1, by cDNA: gi_19423971 [Arabidopsis thaliana]
  misc_feature (1)..(180): Homolog of NCBI NO: 18409345 NR Description: expressed protein; protein id: At1g69690.1, by cDNA: gi_15912212, supported by cDNA: gi_19547990 [Arabidopsis
  misc_feature (39)..(264): Homolog of NCBI NO: 15218305 NR Description: unknown protein; protein id: At1g72010.1, by cDNA: gi_19423971 [Arabidopsis thaliana]
  misc_feature (1)..(194): Homolog of NCBI NO: 5731257 NR Description: auxin-induced basic helix-loop-helix
  misc_feature (1)..(66): Homolog of NCBI NO: 11357581 NR Description: hypothetical protein F1P2.170 - Arabidopsis >gi|6522545|emb|CAB61988.1| putative protein [Arabidopsis
  misc_feature (1)..(66): Homolog of NCBI NO: 22331641 NR Description: putative protein; protein id: At3g47620.1, by cDNA: gi_16604510 [Arabidopsis thaliana] AT3g47620/F1P2_170 [Arabidopsis thaliana]
  misc_feature (1)..(67): Homolog of NCBI NO: 15237274 NR Description: unknown protein; protein id: At5g23280.1 thaliana] >gi|10177817|dbj|BAB11183.1| gene_id:MKD15.14~unknown
MPAICAARVFQLTRELQHKSDGETIEWLLQQAEPAIIAATGTGTIPANISTLNISLRSSGSTLSAPLSKSFHMGRAAQNAAVFGFQQQLYHPHHITTDSSSSSLPKTFREEDLFKDPNFLDQEPGSRSPKPGSEAPDQDPGSTRSRTQNMIPPMWALAPTPASTNGGSAFWMLPVGGGGGPANVQDPSQHMWAFNPGHYPGRIGSVQLGSMLVGGQQLGLGVAENNNLGLFSGGGGDGGRVGLGMSLEQKPQHQVSDHATRDQNPTIDGSP

SEQ ID NO: 83024 - DNA, 1733 bp, Arabidopsis thaliana
  misc_feature (1)..(1733): Ceres Seq. ID no. 12668296
  misc_feature: MA Experiment ID: 20000185 Result: Up-regulated in Transcription
  misc_feature: MA Experiment 20000185 PARAMETER Experiment Name: At_Roots__P Parameter: Age (day) Value: 7 vs. 21
  misc_feature: MA Experiment 20000185 PARAMETER Experiment Name: At_Roots__P Parameter: Organism Value: A. thaliana
  misc_feature: MA Experiment 20000185 PARAMETER Experiment Name: At_Roots__P Parameter: Tissue Value: Roots vs. Whole Plant
  misc_feature: MA Experiment ID: 20001248 Result: Up-regulated in Transcription
  misc_feature: MA Experiment 20001248 PARAMETER Experiment Name: At_Far-red-induction_P Parameter: Age (day) Value: 7
  misc_feature: MA Experiment 20001248 PARAMETER Experiment Name: At_Far-red-induction_P Parameter: Light Value: Far-red vs. White
  misc_feature: MA Experiment 20001248 PARAMETER Experiment Name: At_Far-red-induction_P Parameter: Organism Value: A. thaliana
  misc_feature: MA Experiment 20001248 PARAMETER Experiment Name: At_Far-red-induction_P Parameter: Plant Line Value: Columbia
  misc_feature: MA Experiment 20001248 PARAMETER Experiment Name: At_Far-red-induction_P Parameter: Timepoint (hr) Value: 4
  misc_feature: MA Experiment 20001248 PARAMETER Experiment Name: At_Far-red-induction_P Parameter: Tissue Value: Whole Plant
  misc_feature: MA Experiment ID: 20001450 Result: Up-regulated in Transcription
  misc_feature: MA Experiment 20001450 PARAMETER Experiment Name: At_Far-red-induction_P Parameter: Age (day) Value: 7
  misc_feature: MA Experiment 20001450 PARAMETER Experiment Name: At_Far-red-induction_P Parameter: Light Value: Far-red vs. White
  misc_feature: MA Experiment 20001450 PARAMETER Experiment Name: At_Far-red-induction_P Parameter: Organism Value: A. thaliana
  misc_feature: MA Experiment 20001450 PARAMETER Experiment Name: At_Far-red-induction_P Parameter: Plant Line Value: Columbia
  misc_feature: MA Experiment 20001450 PARAMETER Experiment Name: At_Far-red-induction_P Parameter: Timepoint (hr) Value: 8
  misc_feature: MA Experiment 20001450 PARAMETER Experiment Name: At_Far-red-induction_P Parameter: Tissue Value: Whole Plant
  misc_feature: MA Experiment ID: 20001451 Result: Up-regulated in Transcription
  misc_feature: MA Experiment 20001451 PARAMETER Experiment Name: At_Far-red-induction_P Parameter: Age (day) Value: 7
  misc_feature: MA Experiment 20001451 PARAMETER Experiment Name: At_Far-red-induction_P Parameter: Light Value: Far-red vs. White
  misc_feature: MA Experiment 20001451 PARAMETER Experiment Name: At_Far-red-induction_P Parameter: Organism Value: A. thaliana
  misc_feature: MA Experiment 20001451 PARAMETER Experiment Name: At_Far-red-induction_P Parameter: Plant Line Value: Columbia
  misc_feature: MA Experiment 20001451 PARAMETER Experiment Name: At_Far-red-induction_P Parameter: Timepoint (hr) Value: 24
  misc_feature: MA Experiment 20001451 PARAMETER Experiment Name: At_Far-red-induction_P Parameter: Tissue Value: Whole Plant
aacaaagaaaaagtctgtttatcatcttcttcttcttcaaatcgagatcgaagaagaaccaacaaaaaaccaaaaatggagacgaagccaaaccctagacgtccttcaaacacagttctaccatatcaaacaccacgattaagagatcattaccttctgggaaaaaagctaggccaaggccaatttggaacaacctatctctgcacagagaaatcaacctccgctaattacgcctgcaaatcgatcccgaagcgaaagctcgtgtgtcgcgaggattacgaagatgtatggcgtgagattcagatcatgcatcatctctctgagcatccaaatgttgttaggatcaaagggacttatgaagattcggtgtttgttcatattgttatggaggtttgtgaaggtggtgagctttttgatcggattgtttctaaaggtcattttagtgagcgtgaagctgtcaagcttattaagacgattcttggtgttgttgaggcttgtcattctcttggtgttatgcatagagatctcaaacctgagaatttcttgtttgatagtcctaaagatgatgctaagcttaaggctaccgattttggtttgtctgtcttctataagccaggacaatatttatatgacgtagttggaagtccgtactatgttgcaccagaggtgctaaagaaatgttatggacctgaaatagatgtgtggagtgctggtgttatcctctacattttactcagcggtgttcctcccttctgggcagagactgagtctggaatctttagacagatattgcaagggaagttagatttcaaatctgacccgtggcctactatctcagaagctgctaaagatttgatctataaaatgctcgaaaggagccccaagaaacgcatttctgctcatgaagccttgtgtcacccatggattgtcgatgaacaagcagcaccagacaagcctcttgatccagcagtcttatctcgtctaaagcagttttctcaaatgaataagattaagaaaatggcattacgggtaattgctgagagactttcagaggaagaaattggaggtctgaaggaattgttcaagatgatagacacagacaacagcggaacgattacttttgaagagctcaaagcgggtttgaagagagtcggatctgaactgatggaatcagaaatcaagtctctcatggatgcggctgatatcgacaacagtggtacaatagactacggagaattcctagcagcaaccttacacatgaacaagatggagagagaggagaatctggtggctgcattttcgtactttgacaaagacggaagcggttatatcaccatcgatgagcttcagtcagcttgcacagagtttggtctatgtgatacacctctggacgacatgatcaaggagattgatcttgacaatgacgggaagatcgatttctcggagtttacagcaatgatgaggaaaggagatggagttgggagaagcagaaccatgatgaagaacttgaacttcaacattgctgatgcttttggagttgatggtgaaaaatctgatgactgactcatcattcttccacaatttctgttttttttctctttaatttcgtttatattttgaattctaatttctaaggatacaaaaatatattctggcttgttttttgctttcctttttatttttgtacatgagcaactttctaaatttttatcctcatatggataatttttgct

SEQ ID NO: 83025 - protein, 520 aa, Arabidopsis thaliana
  peptide (1)..(520): Ceres Seq. ID no. 12668297
  misc_feature (51)..(309): Pfam Name: Protein kinase domain Pfam Description: Protein kinase domain
  misc_feature (26)..(520): Homolog of NCBI NO: 15219693 NR Description: calcium-dependent protein kinase; protein id: supported by cDNA: gi_1235717, supported by cDNA: gi_15293094, by cDNA: gi_21281140 [Arabidopsis thaliana]
  misc_feature (206)..(520): Homolog of NCBI NO: 8778378 NR Description: F15O4.8 [Arabidopsis thaliana]
  misc_feature (26)..(215): Homolog of NCBI NO: 8778378 NR Description: F15O4.8 [Arabidopsis thaliana]
  misc_feature (26)..(520): Homolog of NCBI NO: 1084335 NR Description: calcium-dependent protein kinase (EC 2.7.1.-) 2 -
  misc_feature (26)..(520): Homolog of NCBI NO: 15233947 NR Description: calmodulin-domain protein kinase CDPK isoform 4 protein id: At4g09570.1 [Arabidopsis thaliana]
NKEKVCLSSSSSSNRDRRRTNKKPKMETKPNPRRPSNTVLPYQTPRLRDHYLLGKKLGQGQFGTTYLCTEKSTSANYACKSIPKRKLVCREDYEDVWREIQIMHHLSEHPNVVRIKGTYEDSVFVHIVMEVCEGGELFDRIVSKGHFSEREAVKLIKTILGVVEACHSLGVMHRDLKPENFLFDSPKDDAKLKATDFGLSVFYKPGQYLYDVVGSPYYVAPEVLKKCYGPEIDVWSAGVILYILLSGVPPFWAETESGIFRQILQGKLDFKSDPWPTISEAAKDLIYKMLERSPKKRISAHEALCHPWIVDEQAAPDKPLDPAVLSRLKQFSQMNKIKKMALRVIAERLSEEEIGGLKELFKMIDTDNSGTITFEELKAGLKRVGSELMESEIKSLMDAADIDNSGTIDYGEFLAATLHMNKMEREENLVAAFSYFDKDGSGYITIDELQSACTEFGLCDTPLDDMIKEIDLDNDGKIDFSEFTAMMRKGDGVGRSRTMMKNLNFNIADAFGVDGEKSDD

SEQ ID NO: 83026 - protein, 495 aa, Arabidopsis thaliana
  peptide (1)..(495): Ceres Seq. ID no. 12668298
  misc_feature (26)..(284): Pfam Name: Protein kinase domain Pfam Description: Protein kinase domain
  misc_feature (1)..(495): Homolog of NCBI NO: 15219693 NR Description: calcium-dependent protein kinase; protein id: supported by cDNA: gi_1235717, supported by cDNA: gi_15293094, by cDNA: gi_21281140 [Arabidopsis thaliana]
  misc_feature (181)..(495): Homolog of NCBI NO: 8778378 NR Description: F15O4.8 [Arabidopsis thaliana]
  misc_feature (1)..(190): Homolog of NCBI NO: 8778378 NR Description: F15O4.8 [Arabidopsis thaliana]
  misc_feature (1)..(495): Homolog of NCBI NO: 1084335 NR Description: calcium-dependent protein kinase (EC 2.7.1.-) 2 -
  misc_feature (1)..(495): Homolog of NCBI NO: 15233947 NR Description: calmodulin-domain protein kinase CDPK isoform 4 protein id: At4g09570.1 [Arabidopsis thaliana]
METKPNPRRPSNTVLPYQTPRLRDHYLLGKKLGQGQFGTTYLCTEKSTSANYACKSIPKRKLVCREDYEDVWREIQIMHHLSEHPNVVRIKGTYEDSVFVHIVMEVCEGGELFDRIVSKGHFSEREAVKLIKTILGVVEACHSLGVMHRDLKPENFLFDSPKDDAKLKATDFGLSVFYKPGQYLYDVVGSPYYVAPEVLKKCYGPEIDVWSAGVILYILLSGVPPFWAETESGIFRQILQGKLDFKSDPWPTISEAAKDLIYKMLERSPKKRISAHEALCHPWIVDEQAAPDKPLDPAVLSRLKQFSQMNKIKKMALRVIAERLSEEEIGGLKELFKMIDTDNSGTITFEELKAGLKRVGSELMESEIKSLMDAADIDNSGTIDYGEFLAATLHMNKMEREENLVAAFSYFDKDGSGYITIDELQSACTEFGLCDTPLDDMIKEIDLDNDGKIDFSEFTAMMRKGDGVGRSRTMMKNLNFNIADAFGVDGEKSDD

SEQ ID NO: 83027 - protein, 418 aa, Arabidopsis thaliana
  peptide (1)..(418): Ceres Seq. ID no. 12668299
  misc_feature (1)..(207): Pfam Name: Protein kinase domain Pfam Description: Protein kinase domain
  misc_feature (1)..(418): Homolog of NCBI NO: 15219693 NR Description: calcium-dependent protein kinase; protein id: supported by cDNA: gi_1235717, supported by cDNA: gi_15293094, by cDNA: gi_21281140 [Arabidopsis thaliana]
  misc_feature (104)..(418): Homolog of NCBI NO: 8778378 NR Description: F15O4.8 [Arabidopsis thaliana]
  misc_feature (1)..(113): Homolog of NCBI NO: 8778378 NR Description: F15O4.8 [Arabidopsis thaliana]
  misc_feature (1)..(418): Homolog of NCBI NO: 1084335 NR Description: calcium-dependent protein kinase (EC 2.7.1.-) 2 -
  misc_feature (1)..(418): Homolog of NCBI NO: 15233947 NR Description: calmodulin-domain protein kinase CDPK isoform 4 protein id: At4g09570.1 [Arabidopsis thaliana]
MHHLSEHPNVVRIKGTYEDSVFVHIVMEVCEGGELFDRIVSKGHFSEREAVKLIKTILGVVEACHSLGVMHRDLKPENFLFDSPKDDAKLKATDFGLSVFYKPGQYLYDVVGSPYYVAPEVLKKCYGPEIDVWSAGVILYILLSGVPPFWAETESGIFRQILQGKLDFKSDPWPTISEAAKDLIYKMLERSPKKRISAHEALCHPWIVDEQAAPDKPLDPAVLSRLKQFSQMNKIKKMALRVIAERLSEEEIGGLKELFKMIDTDNSGTITFEELKAGLKRVGSELMESEIKSLMDAADIDNSGTIDYGEFLAATLHMNKMEREENLVAAFSYFDKDGSGYITIDELQSACTEFGLCDTPLDDMIKEIDLDNDGKIDFSEFTAMMRKGDGVGRSRTMMKNLNFNIADAFGVDGEKSDD

SEQ ID NO: 83028 - DNA, 3658 bp, Arabidopsis thaliana
  misc_feature (1)..(3658): Ceres Seq. ID no. 12668300
  misc_feature: MA Experiment ID: 20000182 Result: Up-regulated in Transcription
  misc_feature: MA Experiment 20000182 PARAMETER Experiment Name: At_2mM_SA_P Parameter: Age (day) Value: 14
  misc_feature: MA Experiment 20000182 PARAMETER Experiment Name: At_2mM_SA_P Parameter: Organism Value: A. thaliana
  misc_feature: MA Experiment 20000182 PARAMETER Experiment Name: At_2mM_SA_P Parameter: Plant Line Value: WS
  misc_feature: MA Experiment 20000182 PARAMETER Experiment Name: At_2mM_SA_P Parameter: Timepoint (hr) Value: 6
  misc_feature: MA Experiment 20000182 PARAMETER Experiment Name: At_2mM_SA_P Parameter: Tissue Value: Aerial
  misc_feature: MA Experiment 20000182 PARAMETER Experiment Name: At_2mM_SA_P Parameter: Treatment Value: 2mM SA vs. No Treatment
  misc_feature: MA Experiment ID: 20000184 Result: Down-regulated in Transcription
  misc_feature: MA Experiment 20000184 PARAMETER Experiment Name: At_Shoots__P Parameter: Age (day) Value: 7
  misc_feature: MA Experiment 20000184 PARAMETER Experiment Name: At_Shoots__P Parameter: Tissue Value: Shoots vs. Whole Plant
  misc_feature: MA Experiment ID: 20000185 Result: Down-regulated in Transcription
  misc_feature: MA Experiment 20000185 PARAMETER Experiment Name: At_Roots__P Parameter: Age (day) Value: 7 vs. 21
  misc_feature: MA Experiment 20000185 PARAMETER Experiment Name: At_Roots__P Parameter: Organism Value: A. thaliana
  misc_feature: MA Experiment 20000185 PARAMETER Experiment Name: At_Roots__P Parameter: Tissue Value: Roots vs. Whole Plant
  misc_feature: MA Experiment ID: 20000234 Result: Down-regulated in Transcription
  misc_feature: MA Experiment 20000234 PARAMETER Experiment Name: At_Siliques_P Parameter: Age (day) Value: 21
  misc_feature: MA Experiment 20000234 PARAMETER Experiment Name: At_Siliques_P Parameter: Organism Value: A. thaliana
  misc_feature: MA Experiment 20000234 PARAMETER Experiment Name: At_Siliques_P Parameter: Plant Line Value: WS
  misc_feature: MA Experiment 20000234 PARAMETER Experiment Name: At_Siliques_P Parameter: Tissue Value: Less Than 5mm Siliques vs. Whole Plant
  misc_feature: MA Experiment ID: 20000264 Result: Down-regulated in Transcription
  misc_feature: MA Experiment 20000264 PARAMETER Experiment Name: At_Open_Flower_P Parameter: Age (day) Value: 21
  misc_feature: MA Experiment 20000264 PARAMETER Experiment Name: At_Open_Flower_P Parameter: Plant Line Value: WS
  misc_feature: MA Experiment 20000264 PARAMETER Experiment Name: At_Open_Flower_P Parameter: Tissue Value: Open Flower vs. Whole Plant
  misc_feature: MA Experiment ID: 20000265 Result: Down-regulated in Transcription
  misc_feature: MA Experiment 20000265 PARAMETER Experiment Name: At_Open_Flower_P Parameter: Age (day) Value: 21
  misc_feature: MA Experiment 20000265 PARAMETER Experiment Name: At_Open_Flower_P Parameter: Plant Line Value: WS
  misc_feature: MA Experiment 20000265 PARAMETER Experiment Name: At_Open_Flower_P Parameter: Tissue Value: Closed Flower vs. Whole Plant
  misc_feature: MA Experiment ID: 20000286 Result: Down-regulated in Transcription
  misc_feature: MA Experiment 20000286 PARAMETER Experiment Name: At_Open_Flower_P Parameter: Age (day) Value: 21
  misc_feature: MA Experiment 20000286 PARAMETER Experiment Name: At_Open_Flower_P Parameter: Plant Line Value: WS
  misc_feature: MA Experiment 20000286 PARAMETER Experiment Name: At_Open_Flower_P Parameter: Tissue Value: Half Open vs. Whole Plant
  misc_feature: MA Experiment ID: 20000438 Result: Down-regulated in Transcription
  misc_feature: MA Experiment 20000438 PARAMETER Experiment Name: At_Shoots__P Parameter: Age (day) Value: 14
  misc_feature: MA Experiment 20000438 PARAMETER Experiment Name: At_Shoots__P Parameter: Tissue Value: Shoots vs. Whole Plant
  misc_feature: MA Experiment ID: 20000439 Result: Down-regulated in Transcription
  misc_feature: MA Experiment 20000439 PARAMETER Experiment Name: At_Roots__P Parameter: Age (day) Value: 14 vs. 21
  misc_feature: MA Experiment 20000439 PARAMETER Experiment Name: At_Roots__P Parameter: Organism Value: A. thaliana
  misc_feature: MA Experiment 20000439 PARAMETER Experiment Name: At_Roots__P Parameter: Tissue Value: Roots vs. Whole Plant
  misc_feature: MA Experiment ID: 20000575 Result: Down-regulated in Transcription
  misc_feature: MA Experiment 20000575 PARAMETER Experiment Name: At_100uM_ABA_Mutants__P Parameter: Organism Value: A. thaliana
  misc_feature: MA Experiment 20000575 PARAMETER Experiment Name: At_100uM_ABA_Mutants__P Parameter: Plant Line Value: CS22
  misc_feature: MA Experiment 20000575 PARAMETER Experiment Name: At_100uM_ABA_Mutants__P Parameter: Timepoint (hr) Value: 6
  misc_feature: MA Experiment 20000575 PARAMETER Experiment Name: At_100uM_ABA_Mutants__P Parameter: Tissue Value: Whole Plant
  misc_feature: MA Experiment 20000575 PARAMETER Experiment Name: At_100uM_ABA_Mutants__P Parameter: Treatment Value: 1uM ABA vs. No Treatment
  misc_feature: MA Experiment ID: 20000794 Result: Down-regulated in Transcription
  misc_feature: MA Experiment 20000794 PARAMETER Experiment Name: At_Petals_P Parameter: Age (day) Value: 23-25 days
  misc_feature: MA Experiment 20000794 PARAMETER Experiment Name: At_Petals_P Parameter: Plant Line Value: WS
  misc_feature: MA Experiment 20000794 PARAMETER Experiment Name: At_Petals_P Parameter: Tissue Value: Petals vs. Whole plant
  misc_feature: MA Experiment ID: 20001556 Result: Down-regulated in Transcription
  misc_feature: MA Experiment 20001556 PARAMETER Experiment Name: At_Drought_Soil_Dry_P Parameter: Age (day) Value: 26
  misc_feature: MA Experiment 20001556 PARAMETER Experiment Name: At_Drought_Soil_Dry_P Parameter: Organism Value: A. thaliana
  misc_feature: MA Experiment 20001556 PARAMETER Experiment Name: At_Drought_Soil_Dry_P Parameter: Plant Line Value: WS
  misc_feature: MA Experiment 20001556 PARAMETER Experiment Name: At_Drought_Soil_Dry_P Parameter: Post Timepoint (hr) Value: None
  misc_feature: MA Experiment 20001556 PARAMETER Experiment Name: At_Drought_Soil_Dry_P Parameter: Post-Treatment Value: None
  misc_feature: MA Experiment 20001556 PARAMETER Experiment Name: At_Drought_Soil_Dry_P Parameter: Timepoint (day) Value: 12
  misc_feature: MA Experiment 20001556 PARAMETER Experiment Name: At_Drought_Soil_Dry_P Parameter: Treatment Value: Drought vs. No Drought
atgggttttgcagagaagaatctttatgattttcgttttcttttgttcatttccattattttgagctgttccatttcagcttctgcaactatcgcagaagcaaatgctcttctgaaatggaaatccactttcacgaactcatcaaaactgtcttcatgggtccatgatgcaaacaccaatactagcttttcctgcaccagttggtatggtgtttcttgcaactcacgagggagtatcgaagagttaaacctcactaacactggtatagaaggtactttccaagatttccccttcatttctctctcaaaccttgcttacgtagatcttagcatgaaccttttatctggaaccatccctcctcaattcggaaacctctctaaactcatctactttgacctctccacaaatcacttaaccggagaaatctctccttccttaggaaatctcaagaacttgacggtactttatcttcaccaaaactatctaactagtgtcattccctcggaactaggcaacatggaatccatgacagatttagcgctaagtcagaacaaacttaccggttcaattccttcttccttaggaaatctcaagaacttgatggttctttatctttacgagaactatctaactggtgtcattcccccggaactaggtaacatggaatccatgacagatttagctttaagtcagaacaaacttaccggttcaattccttctaccttaggaaatctcaagaacttgatggttctttatctttacgagaactatctaactggtgtcattcccccagaaataggcaacatggaatccatgacaaatttagcgctaagtcagaacaaacttactggttcaattccttcttccttaggtaatctcaagaacttgacgcttctttctcttttccagaactatctaactggtggcattcccccgaaactaggcaacatagaatccatgatcgatttagagttgagtaacaacaaacttaccggttcaattccttcttccttaggaaatctcaagaatttgactattctttatctttacgagaactatttaactggtgtcattcccccggaactaggcaacatggaatcgatgattgatttacagttgaataacaacaaacttaccggttcaattccttcttccttcggaaatctcaagaacttgacgtatctttatctttacctgaattatttaactggtgtcattccccaggagctaggcaacatggaatccatgatcaatttagatttaagtcagaacaaacttacaggttctgttcctgattcctttggtaactttaccaagctggaaagtttgtaccttcgtgttaaccacctctctggtgcgatcccgccaggagtagcaaactcttcacatctaactaccttgatacttgacaccaacaacttcactggtttctttcctgaaactgtttgcaaaggtaggaagcttcaaaatatctcattggattacaatcacctcgaaggtcctatcccgaaaagcttgagagattgcaagagcctgatcagagcaagatttctaggaaacaaattcactggcgatatttttgaagcttttgggatttacccagaccttaacttcattgatttcagccacaacaaattccacggtgagatttctagcaactgggagaagagtccaaagctaggtgccttgatcatgtcaaacaacaacatcacgggtgctatcccaacagagatttggaacatgacacaactagttgagctggatctatctaccaacaacctctttggtgaacttccagaagcaattggaaatctcacgaatttgtcgaggctacgacttaatgggaatcagttatctggaagagttcctgcaggtttaagtttcttaaccaatcttgagtctcttgacttatcctcaaacaatttcagctcagagatcccacaaacctttgactcctttttaaagcttcatgacatgaacctgagcagaaacaaattcgacggaagcattccccgactatcaaagctgactcagttaacgcaacttgatctcagccacaaccagctcgacggagaaatcccatcacaactaagctccctgcaaagcctcgacaagctcgacctctcacacaacaatctctcaggtctcattccaacaactttcgagggcatgatagcgctgacgaacgtcgatatatcaaacaataaactcgaaggtccgcttccagatactccaacgtttcgaaaagcaacagcagatgcattggaggaaaacataggcttatgcagtaatattcctaaacaaagattgaaaccatgccgtgagttgaagaaaccgaagaaaaatggcaaccttgttgtgtggatattagtgccaatcctaggagtactcgtcattctctctatatgtgcaaacacattcacctactgcattcggaaacgaaaactacaaaatggaagaaacacagatcctgaaacaggagagaatatgtccatattcagcgttgatggcaaattcaaataccaagatatcatcgaatcaacaaacgaattcgatccaacacacctcatcggaaccggaggatacagcaaagtctacagagcaaacctccaagatacaatcatagccgttaaacgactacatgacacaatagacgaagagatatcaaagccagttgtgaagcaagagttcctaaacgaggtaaaagcattaacagagatccgtcaccgcaacgttgtgaagctcttcggcttctgctcccaccgccgccacacatttctgatctacgagtacatggaaaaaggaagtttaaacaaactcttagccaacgacgaagaagctaagcgactcacttggaccaaaaggatcaacgtcgtgaaaggtgtggctcacgctttatcgtatatgcaccatgaccgaataacaccgatcgttcaccgtgatattagcagcggaaacatccttctcgataacgattacacagctaagatctccgattttggtacagcaaaacttctaaagacggattcatcaaactggtccgccgttgctggaacctacggctacgttgcaccagagtttgcttacacgatgaaggtgacggagaaatgcgatgtgtatagcttcggggttttgatactcgaattgataattgggaaacatccgggagatttggtatcgagtttgtcttcgtctccaggagaagctctgtcgctaagaagcatttccgatgaacgtgtattagaaccacggggacaaaatagagagaagctcttgaagatggtggaaatggctttattgtgtttacaagcaaatccagaatctcggccaacgatgttgtcaatctccactacattttcttagaaactgaacttctccatcaatttctatgttatcattgtgtttatctatacagcaacagtaatctctgttggcttttgttctctgttcttgcttgtgtttgcaggaaggggtgtcgactctcgtttcagcttttgttgttgttgtttgggcttctcggcctgcttcagcttttgtatgtattgggctgcgcccttgttggtctttgggccttgtttgtttttatctttgcggcttgcgtgccatgttaggccttttggtcttgtaatgtgtttggttaatggaaatctatgaagtt

SEQ ID NO: 83029 - protein, 1120 aa, Arabidopsis thaliana
  peptide (1)..(1120): Ceres Seq. ID no. 12668301
  misc_feature (172)..(1120): Homolog of NCBI NO: 18086327 NR Description: AT4g08850/T32A17_160 [Arabidopsis thaliana]
  misc_feature (172)..(1120): Homolog of NCBI NO: 25407456 NR Description: receptor protein kinase-like protein [imported] -
  misc_feature (172)..(1120): Homolog of NCBI NO: 30680877 NR Description: receptor protein kinase-related protein
  misc_feature (172)..(1025): Homolog of NCBI NO: 30680882 NR Description: receptor protein kinase-related protein
  misc_feature (76)..(1118): Homolog of NCBI NO: 37530616 NR Description: putative protein kinase [Oryza sativa (japonica group)] >gi|16924042|gb|AAL31654.1| Putative protein kinase sativa] >gi|20042880|gb|AAM08708.1| Putative protein kinase
  misc_feature (724)..(1120): Homolog of NCBI NO: 14596041 NR Description: Unknown protein [Arabidopsis thaliana]
  misc_feature (132)..(1115): Homolog of NCBI NO: 15220056 NR Description: putative leucine-rich receptor protein kinase; id: At1g17230.1 [Arabidopsis thaliana] >gi|25518557|pir||E86308
  misc_feature (115)..(1115): Homolog of NCBI NO: 15237562 NR Description: leucine-rich repeat transmembrane protein kinase, protein id: At5g63930.1 [Arabidopsis thaliana]
  misc_feature (103)..(1112): Homolog of NCBI NO: 15219370 NR Description: leucine-rich repeat transmembrane protein kinase, protein id: At1g73080.1 [Arabidopsis thaliana]
  misc_feature (68)..(1055): Homolog of NCBI NO: 15225805 NR Description: putative receptor-like protein kinase; protein id:
MGFAEKNLYDFRFLLFISIILSCSISASATIAEANALLKWKSTFTNSSKLSSWVHDANTNTSFSCTSWYGVSCNSRGSIEELNLTNTGIEGTFQDFPFISLSNLAYVDLSMNLLSGTIPPQFGNLSKLIYFDLSTNHLTGEISPSLGNLKNLTVLYLHQNYLTSVIPSELGNMESMTDLALSQNKLTGSIPSSLGNLKNLMVLYLYENYLTGVIPPELGNMESMTDLALSQNKLTGSIPSTLGNLKNLMVLYLYENYLTGVIPPEIGNMESMTNLALSQNKLTGSIPSSLGNLKNLTLLSLFQNYLTGGIPPKLGNIESMIDLELSNNKLTGSIPSSLGNLKNLTILYLYENYLTGVIPPELGNMESMIDLQLNNNKLTGSIPSSFGNLKNLTYLYLYLNYLTGVIPQELGNMESMINLDLSQNKLTGSVPDSFGNFTKLESLYLRVNHLSGAIPPGVANSSHLTTLILDTNNFTGFFPETVCKGRKLQNISLDYNHLEGPIPKSLRDCKSLIRARFLGNKFTGDIFEAFGIYPDLNFIDFSHNKFHGEISSNWEKSPKLGALIMSNNNITGAIPTEIWNMTQLVELDLSTNNLFGELPEAIGNLTNLSRLRLNGNQLSGRVPAGLSFLTNLESLDLSSNNFSSEIPQTFDSFLKLHDMNLSRNKFDGSIPRLSKLTQLTQLDLSHNQLDGEIPSQLSSLQSLDKLDLSHNNLSGLIPTTFEGMIALTNVDISNNKLEGPLPDTPTFRKATADALEENIGLCSNIPKQRLKPCRELKKPKKNGNLVVWILVPILGVLVILSICANTFTYCIRKRKLQNGRNTDPETGENMSIFSVDGKFKYQDIIESTNEFDPTHLIGTGGYSKVYRANLQDTIIAVKRLHDTIDEEISKPVVKQEFLNEVKALTEIRHRNVVKLFGFCSHRRHTFLIYEYMEKGSLNKLLANDEEAKRLTWTKRINVVKGVAHALSYMHHDRITPIVHRDISSGNILLDNDYTAKISDFGTAKLLKTDSSNWSAVAGTYGYVAPEFAYTMKVTEKCDVYSFGVLILELIIGKHPGDLVSSLSSSPGEALSLRSISDERVLEPRGQNREKLLKMVEMALLCLQANPESRPTMLSISTTFS

SEQ ID NO: 83030 - protein, 1010 aa, Arabidopsis thaliana
  peptide (1)..(1010): Ceres Seq. ID no. 12668302
  misc_feature (62)..(1010): Homolog of NCBI NO: 18086327 NR Description: AT4g08850/T32A17_160 [Arabidopsis thaliana]
  misc_feature (62)..(1010): Homolog of NCBI NO: 25407456 NR Description: receptor protein kinase-like protein [imported] -
  misc_feature (62)..(1010): Homolog of NCBI NO: 30680877 NR Description: receptor protein kinase-related protein
  misc_feature (62)..(915): Homolog of NCBI NO: 30680882 NR Description: receptor protein kinase-related protein
  misc_feature (1)..(1008): Homolog of NCBI NO: 37530616 NR Description: putative protein kinase [Oryza sativa (japonica group)] >gi|16924042|gb|AAL31654.1| Putative protein kinase sativa] >gi|20042880|gb|AAM08708.1| Putative protein kinase
  misc_feature (614)..(1010): Homolog of NCBI NO: 14596041 NR Description: Unknown protein [Arabidopsis thaliana]
  misc_feature (22)..(1005): Homolog of NCBI NO: 15220056 NR Description: putative leucine-rich receptor protein kinase; id: At1g17230.1 [Arabidopsis thaliana] >gi|25518557|pir||E86308
  misc_feature (5)..(1005): Homolog of NCBI NO: 15237562 NR Description: leucine-rich repeat transmembrane protein kinase, protein id: At5g63930.1 [Arabidopsis thaliana]
  misc_feature (1)..(1002): Homolog of NCBI NO: 15219370 NR Description: leucine-rich repeat transmembrane protein kinase, protein id: At1g73080.1 [Arabidopsis thaliana]
  misc_feature (1)..(945): Homolog of NCBI NO: 15225805 NR Description: putative receptor-like protein kinase; protein id:
MNLLSGTIPPQFGNLSKLIYFDLSTNHLTGEISPSLGNLKNLTVLYLHQNYLTSVIPSELGNMESMTDLALSQNKLTGSIPSSLGNLKNLMVLYLYENYLTGVIPPELGNMESMTDLALSQNKLTGSIPSTLGNLKNLMVLYLYENYLTGVIPPEIGNMESMTNLALSQNKLTGSIPSSLGNLKNLTLLSLFQNYLTGGIPPKLGNIESMIDLELSNNKLTGSIPSSLGNLKNLTILYLYENYLTGVIPPELGNMESMIDLQLNNNKLTGSIPSSFGNLKNLTYLYLYLNYLTGVIPQELGNMESMINLDLSQNKLTGSVPDSFGNFTKLESLYLRVNHLSGAIPPGVANSSHLTTLILDTNNFTGFFPETVCKGRKLQNISLDYNHLEGPIPKSLRDCKSLIRARFLGNKFTGDIFEAFGIYPDLNFIDFSHNKFHGEISSNWEKSPKLGALIMSNNNITGAIPTEIWNMTQLVELDLSTNNLFGELPEAIGNLTNLSRLRLNGNQLSGRVPAGLSFLTNLESLDLSSNNFSSEIPQTFDSFLKLHDMNLSRNKFDGSIPRLSKLTQLTQLDLSHNQLDGEIPSQLSSLQSLDKLDLSHNNLSGLIPTTFEGMIALTNVDISNNKLEGPLPDTPTFRKATADALEENIGLCSNIPKQRLKPCRELKKPKKNGNLVVWILVPILGVLVILSICANTFTYCIRKRKLQNGRNTDPETGENMSIFSVDGKFKYQDIIESTNEFDPTHLIGTGGYSKVYRANLQDTIIAVKRLHDTIDEEISKPVVKQEFLNEVKALTEIRHRNVVKLFGFCSHRRHTFLIYEYMEKGSLNKLLANDEEAKRLTWTKRINVVKGVAHALSYMHHDRITPIVHRDISSGNILLDNDYTAKISDFGTAKLLKTDSSNWSAVAGTYGYVAPEFAYTMKVTEKCDVYSFGVLILELIIGKHPGDLVSSLSSSPGEALSLRSISDERVLEPRGQNREKLLKMVEMALLCLQANPESRPTMLSISTTFS

SEQ ID NO: 83031 - protein, 948 aa, Arabidopsis thaliana
  peptide (1)..(948): Ceres Seq. ID no. 12668303
  misc_feature (1)..(948): Homolog of NCBI NO: 18086327 NR Description: AT4g08850/T32A17_160 [Arabidopsis thaliana]
  misc_feature (1)..(948): Homolog of NCBI NO: 25407456 NR Description: receptor protein kinase-like protein [imported] -
  misc_feature (1)..(948): Homolog of NCBI NO: 30680877 NR Description: receptor protein kinase-related protein
  misc_feature (1)..(853): Homolog of NCBI NO: 30680882 NR Description: receptor protein kinase-related protein
  misc_feature (1)..(946): Homolog of NCBI NO: 37530616 NR Description: putative protein kinase [Oryza sativa (japonica group)] >gi|16924042|gb|AAL31654.1| Putative protein kinase sativa] >gi|20042880|gb|AAM08708.1| Putative protein kinase
  misc_feature (552)..(948): Homolog of NCBI NO: 14596041 NR Description: Unknown protein [Arabidopsis thaliana]
  misc_feature (1)..(943): Homolog of NCBI NO: 15220056 NR Description: putative leucine-rich receptor protein kinase; id: At1g17230.1 [Arabidopsis thaliana] >gi|25518557|pir||E86308
  misc_feature (1)..(943): Homolog of NCBI NO: 15237562 NR Description: leucine-rich repeat transmembrane protein kinase, protein id: At5g63930.1 [Arabidopsis thaliana]
  misc_feature (1)..(940): Homolog of NCBI NO: 15219370 NR Description: leucine-rich repeat transmembrane protein kinase, protein id: At1g73080.1 [Arabidopsis thaliana]
  misc_feature (1)..(883): Homolog of NCBI NO: 15225805 NR Description: putative receptor-like protein kinase; protein id:
MESMTDLALSQNKLTGSIPSSLGNLKNLMVLYLYENYLTGVIPPELGNMESMTDLALSQNKLTGSIPSTLGNLKNLMVLYLYENYLTGVIPPEIGNMESMTNLALSQNKLTGSIPSSLGNLKNLTLLSLFQNYLTGGIPPKLGNIESMIDLELSNNKLTGSIPSSLGNLKNLTILYLYENYLTGVIPPELGNMESMIDLQLNNNKLTGSIPSSFGNLKNLTYLYLYLNYLTGVIPQELGNMESMINLDLSQNKLTGSVPDSFGNFTKLESLYLRVNHLSGAIPPGVANSSHLTTLILDTNNFTGFFPETVCKGRKLQNISLDYNHLEGPIPKSLRDCKSLIRARFLGNKFTGDIFEAFGIYPDLNFIDFSHNKFHGEISSNWEKSPKLGALIMSNNNITGAIPTEIWNMTQLVELDLSTNNLFGELPEAIGNLTNLSRLRLNGNQLSGRVPAGLSFLTNLESLDLSSNNFSSEIPQTFDSFLKLHDMNLSRNKFDGSIPRLSKLTQLTQLDLSHNQLDGEIPSQLSSLQSLDKLDLSHNNLSGLIPTTFEGMIALTNVDISNNKLEGPLPDTPTFRKATADALEENIGLCSNIPKQRLKPCRELKKPKKNGNLVVWILVPILGVLVILSICANTFTYCIRKRKLQNGRNTDPETGENMSIFSVDGKFKYQDIIESTNEFDPTHLIGTGGYSKVYRANLQDTIIAVKRLHDTIDEEISKPVVKQEFLNEVKALTEIRHRNVVKLFGFCSHRRHTFLIYEYMEKGSLNKLLANDEEAKRLTWTKRINVVKGVAHALSYMHHDRITPIVHRDISSGNILLDNDYTAKISDFGTAKLLKTDSSNWSAVAGTYGYVAPEFAYTMKVTEKCDVYSFGVLILELIIGKHPGDLVSSLSSSPGEALSLRSISDERVLEPRGQNREKLLKMVEMALLCLQANPESRPTMLSISTTFS

SEQ ID NO: 83032 - DNA, 1251 bp, Arabidopsis thaliana
  misc_feature (1)..(1251): Ceres Seq. ID no. 12668330
  misc_feature: MA Experiment ID: 20000184 Result: Down-regulated in Transcription
  misc_feature: MA Experiment 20000184 PARAMETER Experiment Name: At_Shoots__P Parameter: Age (day) Value: 7
  misc_feature: MA Experiment 20000184 PARAMETER Experiment Name: At_Shoots__P Parameter: Tissue Value: Shoots vs. Whole Plant
  misc_feature: MA Experiment ID: 20000214 Result: Down-regulated in Transcription
  misc_feature: MA Experiment 20000214 PARAMETER Experiment Name: At_4deg_Cold_P Parameter: Timepoint (hr) Value: 6
  misc_feature: MA Experiment ID: 20001248 Result: Up-regulated in Transcription
  misc_feature: MA Experiment 20001248 PARAMETER Experiment Name: At_Far-red-induction_P Parameter: Age (day) Value: 7
  misc_feature: MA Experiment 20001248 PARAMETER Experiment Name: At_Far-red-induction_P Parameter: Light Value: Far-red vs. White
  misc_feature: MA Experiment 20001248 PARAMETER Experiment Name: At_Far-red-induction_P Parameter: Organism Value: A. thaliana
  misc_feature: MA Experiment 20001248 PARAMETER Experiment Name: At_Far-red-induction_P Parameter: Plant Line Value: Columbia
  misc_feature: MA Experiment 20001248 PARAMETER Experiment Name: At_Far-red-induction_P Parameter: Timepoint (hr) Value: 4
  misc_feature: MA Experiment 20001248 PARAMETER Experiment Name: At_Far-red-induction_P Parameter: Tissue Value: Whole Plant
  misc_feature: MA Experiment ID: 20001450 Result: Up-regulated in Transcription
  misc_feature: MA Experiment 20001450 PARAMETER Experiment Name: At_Far-red-induction_P Parameter: Age (day) Value: 7
  misc_feature: MA Experiment 20001450 PARAMETER Experiment Name: At_Far-red-induction_P Parameter: Light Value: Far-red vs. White
  misc_feature: MA Experiment 20001450 PARAMETER Experiment Name: At_Far-red-induction_P Parameter: Organism Value: A. thaliana
  misc_feature: MA Experiment 20001450 PARAMETER Experiment Name: At_Far-red-induction_P Parameter: Plant Line Value: Columbia
  misc_feature: MA Experiment 20001450 PARAMETER Experiment Name: At_Far-red-induction_P Parameter: Timepoint (hr) Value: 8
  misc_feature: MA Experiment 20001450 PARAMETER Experiment Name: At_Far-red-induction_P Parameter: Tissue Value: Whole Plant
atggccgggatcttgaataaattgcggaatctagatgcatatcctaagatcaatgaagatttttacagccgtacattatccggcggagttatcactctcctctcctccgttgttatgttccttctcttcttctccgagctccgtacgtctttatcttcatacagtcaccgagacgaagcttatagtagatacttcaaggggagagacgttacgcatcaacgtaattttgatattacgtttcctgctctagcatgttcgattcttagtgttgatgctatggatattagtggagagcttcatcttgacgtgaaacatgatatcataaagagaagattagattctaatggcaacactatagaggcaagacaggacggaataggcgctactaagattgaaaacccactgcagaaacatggtggcaggctgggacataatgagacttactgtggttcttgctatggggctgaagcggtaattgtgttatctctctatttgactttgtggagcatggtttctcaactttcatctgaagtatgttttttccccgtgcaggaagagcatgactgctgcaattcgtgtgaggatgttcgtgaagcatatagaaagaaaggttggggggttactaatccagatttgattgaccagtgtaaacgagaaggttttctacaaagagtaaaggatgaagaaggtgaagggtgtaatatatatgggttcttggaggtcaataaggtggctgggaacttccactttgctcctgggaaaagctttcatcagtcgggcgtgcatgttcacgatcttcttgcttttcagaaagacagttttaacataagtcacaagatcaatagacttacttatggagactactttcctggcgtcgttaaccctcttgacaaagtcgagtggagtcaagacacacctaatgctatgtaccaatactttatcaaggttgtaccaacagtatacacagatatcagaggacacacaattcaatcgaatcagttctcagtgaccgaacatgtaaagagctcagaagcaggtcaactgcaatctttacctggagttttcttcttctatgatctctctccaatcaaggtaacatttacggaggaacacatatcattcttgcacttcttgacgaatgtttgcgccatagttggaggtgtcttcacagtgtccgggataatagacgcgtttatataccatggtcaaaaagctatcaagaagaagatggaaattggtaaatttagctaa

SEQ ID NO: 83033 - protein, 416 aa, Arabidopsis thaliana
  peptide (1)..(416): Ceres Seq. ID no. 12668331
  misc_feature (1)..(392): Homolog of NCBI NO: 6598578 NR Description: F5J5.4 [Arabidopsis thaliana]
  misc_feature (388)..(416): Homolog of NCBI NO: 6598578 NR Description: F5J5.4 [Arabidopsis thaliana]
  misc_feature (179)..(416): Homolog of NCBI NO: 30693281 NR Description: expressed protein [Arabidopsis thaliana]
  misc_feature (1)..(157): Homolog of NCBI NO: 30693281 NR Description: expressed protein [Arabidopsis thaliana]
  misc_feature (179)..(416): Homolog of NCBI NO: 38347102 NR Description: OSJNBa0006M15.17 [Oryza sativa (japonica
  misc_feature (1)..(156): Homolog of NCBI NO: 38347102 NR Description: OSJNBa0006M15.17 [Oryza sativa (japonica
  misc_feature (179)..(416): Homolog of NCBI NO: 18395087 NR Description: expressed protein; protein id: At1g22200.1, by cDNA: 16380., supported by cDNA: gi_13878150, supported by gi_21281041 [Arabidopsis thaliana] >gi|25350066|pir||F86354
  misc_feature (1)..(157): Homolog of NCBI NO: 18395087 NR Description: expressed protein; protein id: At1g22200.1, by cDNA: 16380., supported by cDNA: gi_13878150, supported by gi_21281041 [Arabidopsis thaliana] >gi|25350066|pir||F86354
  misc_feature (177)..(414): Homolog of NCBI NO: 13384938 NR Description: serologically defined breast cancer antigen 84; segment, Chr 2, University of California at Los Angeles 1 [Mus >gi|12844094|dbj|BAB26233.1| unnamed protein product [Mus
  misc_feature (5)..(157): Homolog of NCBI NO: 13384938 NR Description: serologically defined breast cancer antigen 84; segment, Chr 2, University of California at Los Angeles 1 [Mus >gi|12844094|dbj|BAB26233.1| unnamed protein product [Mus
MAGILNKLRNLDAYPKINEDFYSRTLSGGVITLLSSVVMFLLFFSELRTSLSSYSHRDEAYSRYFKGRDVTHQRNFDITFPALACSILSVDAMDISGELHLDVKHDIIKRRLDSNGNTIEARQDGIGATKIENPLQKHGGRLGHNETYCGSCYGAEAVIVLSLYLTLWSMVSQLSSEVCFFPVQEEHDCCNSCEDVREAYRKKGWGVTNPDLIDQCKREGFLQRVKDEEGEGCNIYGFLEVNKVAGNFHFAPGKSFHQSGVHVHDLLAFQKDSFNISHKINRLTYGDYFPGVVNPLDKVEWSQDTPNAMYQYFIKVVPTVYTDIRGHTIQSNQFSVTEHVKSSEAGQLQSLPGVFFFYDLSPIKVTFTEEHISFLHFLTNVCAIVGGVFTVSGIIDAFIYHGQKAIKKKMEIGKFS

SEQ ID NO: 83034 - protein, 378 aa, Arabidopsis thaliana
  peptide (1)..(378): Ceres Seq. ID no. 12668332
  misc_feature (1)..(354): Homolog of NCBI NO: 6598578 NR Description: F5J5.4 [Arabidopsis thaliana]
  misc_feature (350)..(378): Homolog of NCBI NO: 6598578 NR Description: F5J5.4 [Arabidopsis thaliana]
  misc_feature (141)..(378): Homolog of NCBI NO: 30693281 NR Description: expressed protein [Arabidopsis thaliana]
  misc_feature (1)..(119): Homolog of NCBI NO: 30693281 NR Description: expressed protein [Arabidopsis thaliana]
  misc_feature (141)..(378): Homolog of NCBI NO: 38347102 NR Description: OSJNBa0006M15.17 [Oryza sativa (japonica
  misc_feature (1)..(118): Homolog of NCBI NO: 38347102 NR Description: OSJNBa0006M15.17 [Oryza sativa (japonica
  misc_feature (141)..(378): Homolog of NCBI NO: 18395087 NR Description: expressed protein; protein id: At1g22200.1, by cDNA: 16380., supported by cDNA: gi_13878150, supported by gi_21281041 [Arabidopsis thaliana] >gi|25350066|pir||F86354
  misc_feature (1)..(119): Homolog of NCBI NO: 18395087 NR Description: expressed protein; protein id: At1g22200.1, by cDNA: 16380., supported by cDNA: gi_13878150, supported by gi_21281041 [Arabidopsis thaliana] >gi|25350066|pir||F86354
  misc_feature (139)..(376): Homolog of NCBI NO: 13384938 NR Description: serologically defined breast cancer antigen 84; segment, Chr 2, University of California at Los Angeles 1 [Mus >gi|12844094|dbj|BAB26233.1| unnamed protein product [Mus
  misc_feature (1)..(119): Homolog of NCBI NO: 13384938 NR Description: serologically defined breast cancer antigen 84; segment, Chr 2, University of California at Los Angeles 1 [Mus >gi|12844094|dbj|BAB26233.1| unnamed protein product [Mus
MFLLFFSELRTSLSSYSHRDEAYSRYFKGRDVTHQRNFDITFPALACSILSVDAMDISGELHLDVKHDIIKRRLDSNGNTIEARQDGIGATKIENPLQKHGGRLGHNETYCGSCYGAEAVIVLSLYLTLWSMVSQLSSEVCFFPVQEEHDCCNSCEDVREAYRKKGWGVTNPDLIDQCKREGFLQRVKDEEGEGCNIYGFLEVNKVAGNFHFAPGKSFHQSGVHVHDLLAFQKDSFNISHKINRLTYGDYFPGVVNPLDKVEWSQDTPNAMYQYFIKVVPTVYTDIRGHTIQSNQFSVTEHVKSSEAGQLQSLPGVFFFYDLSPIKVTFTEEHISFLHFLTNVCAIVGGVFTVSGIIDAFIYHGQKAIKKKMEIGKFS

SEQ ID NO: 83035 - protein, 324 aa, Arabidopsis thaliana
  peptide (1)..(324): Ceres Seq. ID no. 12668333
  misc_feature (1)..(300): Homolog of NCBI NO: 6598578 NR Description: F5J5.4 [Arabidopsis thaliana]
  misc_feature (296)..(324): Homolog of NCBI NO: 6598578 NR Description: F5J5.4 [Arabidopsis thaliana]
  misc_feature (87)..(324): Homolog of NCBI NO: 30693281 NR Description: expressed protein [Arabidopsis thaliana]
  misc_feature (1)..(65): Homolog of NCBI NO: 30693281 NR Description: expressed protein [Arabidopsis thaliana]
  misc_feature (87)..(324): Homolog of NCBI NO: 38347102 NR Description: OSJNBa0006M15.17 [Oryza sativa (japonica
  misc_feature (1)..(64): Homolog of NCBI NO: 38347102 NR Description: OSJNBa0006M15.17 [Oryza sativa (japonica
  misc_feature (87)..(324): Homolog of NCBI NO: 18395087 NR Description: expressed protein; protein id: At1g22200.1, by cDNA: 16380., supported by cDNA: gi_13878150, supported by gi_21281041 [Arabidopsis thaliana] >gi|25350066|pir||F86354
  misc_feature (1)..(65): Homolog of NCBI NO: 18395087 NR Description: expressed protein; protein id: At1g22200.1, by cDNA: 16380., supported by cDNA: gi_13878150, supported by gi_21281041 [Arabidopsis thaliana] >gi|25350066|pir||F86354
  misc_feature (85)..(322): Homolog of NCBI NO: 13384938 NR Description: serologically defined breast cancer antigen 84; segment, Chr 2, University of California at Los Angeles 1 [Mus >gi|12844094|dbj|BAB26233.1| unnamed protein product [Mus
  misc_feature (1)..(65): Homolog of NCBI NO: 13384938 NR Description: serologically defined breast cancer antigen 84; segment, Chr 2, University of California at Los Angeles 1 [Mus >gi|12844094|dbj|BAB26233.1| unnamed protein product [Mus
MDISGELHLDVKHDIIKRRLDSNGNTIEARQDGIGATKIENPLQKHGGRLGHNETYCGSCYGAEAVIVLSLYLTLWSMVSQLSSEVCFFPVQEEHDCCNSCEDVREAYRKKGWGVTNPDLIDQCKREGFLQRVKDEEGEGCNIYGFLEVNKVAGNFHFAPGKSFHQSGVHVHDLLAFQKDSFNISHKINRLTYGDYFPGVVNPLDKVEWSQDTPNAMYQYFIKVVPTVYTDIRGHTIQSNQFSVTEHVKSSEAGQLQSLPGVFFFYDLSPIKVTFTEEHISFLHFLTNVCAIVGGVFTVSGIIDAFIYHGQKAIKKKMEIGKFS

SEQ ID NO: 83036 - DNA, 3459 bp, Arabidopsis thaliana
  misc_feature (1)..(3459): Ceres Seq. ID no. 12668375
  misc_feature: MA Experiment ID: 20000171 Result: Up-regulated in Transcription
  misc_feature: MA Experiment 20000171 PARAMETER Experiment Name: At_42deg_Heat_P Parameter: Age (day) Value: 14
  misc_feature: MA Experiment 20000171 PARAMETER Experiment Name: At_42deg_Heat_P Parameter: Organism Value: A. thaliana
  misc_feature: MA Experiment 20000171 PARAMETER Experiment Name: At_42deg_Heat_P Parameter: Plant Line Value: WS
  misc_feature: MA Experiment 20000171 PARAMETER Experiment Name: At_42deg_Heat_P Parameter: Temperature (deg C) Value: 42 vs. 22
  misc_feature: MA Experiment 20000171 PARAMETER Experiment Name: At_42deg_Heat_P Parameter: Timepoint (hr) Value: 1
  misc_feature: MA Experiment 20000171 PARAMETER Experiment Name: At_42deg_Heat_P Parameter: Tissue Value: Aerial
atgaccaaaccagtcgacggatctaccgctactacagcttcttctgaaaaggatgcaatctctgcatctccctactacttgcatccatcggatcatcctcatcatgttctcacacccatgttgttgaacggtgagaactatgaacgatgggctaaacttactcgcaacaacttgcaagccaaacaaaagcttggtttcatcgatggcaccctaacgaagccatcatctgactctccggactatccacggtggctgcagacaaactcgatgttagtaggctggttgtatgcaagtcttgatccccaggtgcagaaatcaatctctgttgttgataatgcacgagtcatgtgggaaagcttgcgaacccgatactctgttggtaacgcctctcgtgttcaccaattaaaatatgacatcgtagcttgtcgtcaagatgggcaaacagctgccaactattttggtaaactcaaagtcatgtgggatgacctagacgactacgaacctctcttaacttgttgttgtaatagaccatcatgcactcacagagttcgtcagagtcaacgacgtgatcatgaaaggattcatcaatttcttatgggacttgatgcagcaaaatttggcaccagtagaaccaatatattgggtcgtttaagtcgtgatgataatatttctctcgacagcatctactctgaaattattgcagaagaacgacatctaacaattacgaggagcaaagaagagcgtgttgatgctgtcggcttcgctgttcaaactggagttaatgcaattgcttcggtgactcgagtcaataatatgggtccatgtactcattgtgggagatcaaatcacagtgctgatacatgctttaagctacatggtgttcctgaatggtacactgaaaaatacggtgatactagctcaggccgtggtcgcgggcgcagcagcacaccacgtggcagaggaaggggacatggaaactcatacaaagccaacaatgctcaaacttctcatccgtcatcctctgcttcagaattttctgacattccaggcgttagcaaagaggcatggtctgctatcagaaatctgctgaaacaagacacagctacttcatcagaaaaactctctggtaagacaaattgtgtcgattttctaattgattcaggcgcctcacatcacatgactggttttctggatttgctcactgagatttacgaaatccctcatagtgttgttgtgctacctaacgctaaacatactattgctaccaaaaaaggcaccctaatactcggtgcaaatatgaaacttacacatgttttatttgtacctgatctctcctgcacactcatctctgtggctcgtcttctgcgtgagttgcattgcttcgcaatattcactgataaagtttgcgtgatacaggaccgtacttccaagatgctgattggggttgggacagagagtaatggagtctatcatttacaaagagctgaagtcgttgcaacaagtgctaatgtggtgaagtggaaaaccaataaagctttgtggcatatgcgactaggccatccatcttcgaaagttttatcttctgttttgccatctttagaggattttgatagttgtagttctgatttaaagacgatttgtgacgtttgtgttcgagccaaacaaactcgtgcaagtttttctgaaagtttcaataaagccgaagagtgtttttcttttattcactatgatgtttggggaccatacaaacatgcttcctcttgcggagctcattactttctaactattgttgatgatcactctagagcggtttggatacatctcatgcttgctaagagtgaggttgcctctctccttcaacagttcattgcaatggcgtcccgacaattcaacaaacaagttaaaacagtaagaagcaataatggcactgaatttatgagtctcaaatcatattttgctgaacgaggaattgttcatcaaatctcttgtgtctatacacatcagcaaaatggacgtgtcgagcgtaagcatagacacatcttgaatgtagcacgttcactcttatttcaagcagaacttcccattagcttctgggaagaaagtgttcttacagccgcctacctcataaatcgaactcctactccaattctagatggcaaaaccccatacaagattctctactcacaaccaccgtcttatgcttcacttcgtgtctttggcagcctctgttttgcaagaaaacacactggtcgtttggataaatttcaagagagaggacgaaaatgcatattcgttggctatccccatggacaaaaaggttggcgtatttatgatattgaatcacaaattttttttgtctctcgcgatgtggtctttcaggaagatattttcccatttgctgacaaaaagaataaagatacattctcttcacctgctgccgtcattccatctccaattttgccatatgatgatgaattccttgacatataccaaattggtgacgttcccgctacgaatcctctcccggctattattgatgtcaacgactcacctccaagctctcctataattactgcaacaccggctgctgcatcacctcctcctcttcgtcgcggtttacgtcaaagacaagaaaatgtgcgcctaaaagactatcaaacttattcggctcaatgtgagtcaactcaaactctgtccgacaacattggtacgtgtatctaccccatggccaactatgtatcgggtgaaatattctctccaagtaatcaacacttcttagctgccattagtatggttgatcctcctcagacttataatcaagccattcgagagaaagaatggcgtaatgcagttttttttgaagtcgatgctcttgaagatcaaggaacttgggatattaccaaacttccgcaaggagttaaagctattggatcaaagtgggtatttcgtatcaagtataactctaatggtaccgtcgaacgttacaaagcgcgtcttgtggctttaggcaatcatcaaaaggaaggtattgatttcacaaagacatttgctccagttgtcaaaatgcaaacagtgagacttttattggatgttgcggcagcaaaggactgggaacttcatcaaatggatgttcataacgcttttcttcatggtgatttaaaagaagacatctatatgaaaccacctccgggttttaaaacaacagatccatctcttgtatgcaagctcaagaaatctatctatggtttgaaacaagcgcctcgttgctggttcgaaaagttgtctacatctctactcaagtttggttttactcagtctaagaaagattattctcttttcacatcaattcggggatccaaagttcttcatgtcattgtctacgtcgatgatgtagtcatttgcggaaaggctgtccgggaaaataatacctcaaaactcgctctcgggtcgtcaccctaa

SEQ ID NO: 83037 - protein, 1152 aa, Arabidopsis thaliana
  peptide (1)..(1152): Ceres Seq. ID no. 12668376
  misc_feature (566)..(727): Pfam Name: Integrase core domain Pfam Description: Integrase core domain
  misc_feature (1)..(867): Homolog of NCBI NO: 8843739 NR Description: retroelement pol polyprotein-like [Arabidopsis
  misc_feature (801)..(1135): Homolog of NCBI NO: 8843739 NR Description: retroelement pol polyprotein-like [Arabidopsis
  misc_feature (1)..(834): Homolog of NCBI NO: 15225640 NR Description: putative retroelement pol polyprotein; protein At2g07010.1 [Arabidopsis thaliana] >gi|25301695|pir||D84481
  misc_feature (836)..(1135): Homolog of NCBI NO: 15225640 NR Description: putative retroelement pol polyprotein; protein At2g07010.1 [Arabidopsis thaliana] >gi|25301695|pir||D84481
  misc_feature (7)..(826): Homolog of NCBI NO: 15225539 NR Description: putative retroelement pol polyprotein; protein At2g13940.1 [Arabidopsis thaliana] >gi|25301698|pir||C84512
  misc_feature (834)..(1135): Homolog of NCBI NO: 15225539 NR Description: putative retroelement pol polyprotein; protein At2g13940.1 [Arabidopsis thaliana] >gi|25301698|pir||C84512
  misc_feature (8)..(867): Homolog of NCBI NO: 15227813 NR Description: putative retroelement pol polyprotein; protein At2g23330.1 [Arabidopsis thaliana] >gi|7444418|pir||T00499
  misc_feature (895)..(1135): Homolog of NCBI NO: 15227813 NR Description: putative retroelement pol polyprotein; protein At2g23330.1 [Arabidopsis thaliana] >gi|7444418|pir||T00499
  misc_feature (8)..(867): Homolog of NCBI NO: 15223588 NR Description: hypothetical protein; protein id: At1g56675.1 thaliana] >gi|25301685|pir||E96608 probable retroelement
  misc_feature (810)..(1138): Homolog of NCBI NO: 15223588 NR Description: hypothetical protein; protein id: At1g56675.1 thaliana] >gi|25301685|pir||E96608 probable retroelement
MTKPVDGSTATTASSEKDAISASPYYLHPSDHPHHVLTPMLLNGENYERWAKLTRNNLQAKQKLGFIDGTLTKPSSDSPDYPRWLQTNSMLVGWLYASLDPQVQKSISVVDNARVMWESLRTRYSVGNASRVHQLKYDIVACRQDGQTAANYFGKLKVMWDDLDDYEPLLTCCCNRPSCTHRVRQSQRRDHERIHQFLMGLDAAKFGTSRTNILGRLSRDDNISLDSIYSEIIAEERHLTITRSKEERVDAVGFAVQTGVNAIASVTRVNNMGPCTHCGRSNHSADTCFKLHGVPEWYTEKYGDTSSGRGRGRSSTPRGRGRGHGNSYKANNAQTSHPSSSASEFSDIPGVSKEAWSAIRNLLKQDTATSSEKLSGKTNCVDFLIDSGASHHMTGFLDLLTEIYEIPHSVVVLPNAKHTIATKKGTLILGANMKLTHVLFVPDLSCTLISVARLLRELHCFAIFTDKVCVIQDRTSKMLIGVGTESNGVYHLQRAEVVATSANVVKWKTNKALWHMRLGHPSSKVLSSVLPSLEDFDSCSSDLKTICDVCVRAKQTRASFSESFNKAEECFSFIHYDVWGPYKHASSCGAHYFLTIVDDHSRAVWIHLMLAKSEVASLLQQFIAMASRQFNKQVKTVRSNNGTEFMSLKSYFAERGIVHQISCVYTHQQNGRVERKHRHILNVARSLLFQAELPISFWEESVLTAAYLINRTPTPILDGKTPYKILYSQPPSYASLRVFGSLCFARKHTGRLDKFQERGRKCIFVGYPHGQKGWRIYDIESQIFFVSRDVVFQEDIFPFADKKNKDTFSSPAAVIPSPILPYDDEFLDIYQIGDVPATNPLPAIIDVNDSPPSSPIITATPAAASPPPLRRGLRQRQENVRLKDYQTYSAQCESTQTLSDNIGTCIYPMANYVSGEIFSPSNQHFLAAISMVDPPQTYNQAIREKEWRNAVFFEVDALEDQGTWDITKLPQGVKAIGSKWVFRIKYNSNGTVERYKARLVALGNHQKEGIDFTKTFAPVVKMQTVRLLLDVAAAKDWELHQMDVHNAFLHGDLKEDIYMKPPPGFKTTDPSLVCKLKKSIYGLKQAPRCWFEKLSTSLLKFGFTQSKKDYSLFTSIRGSKVLHVIVYVDDVVICGKAVRENNTSKLALGSSP

SEQ ID NO: 83038 - protein, 1113 aa, Arabidopsis thaliana
  peptide (1)..(1113): Ceres Seq. ID no. 12668377
  misc_feature (527)..(688): Pfam Name: Integrase core domain Pfam Description: Integrase core domain
  misc_feature (1)..(828): Homolog of NCBI NO: 8843739 NR Description: retroelement pol polyprotein-like [Arabidopsis
  misc_feature (762)..(1096): Homolog of NCBI NO: 8843739 NR Description: retroelement pol polyprotein-like [Arabidopsis
  misc_feature (1)..(795): Homolog of NCBI NO: 15225640 NR Description: putative retroelement pol polyprotein; protein At2g07010.1 [Arabidopsis thaliana] >gi|25301695|pir||D84481
  misc_feature (797)..(1096): Homolog of NCBI NO: 15225640 NR Description: putative retroelement pol polyprotein; protein At2g07010.1 [Arabidopsis thaliana] >gi|25301695|pir||D84481
  misc_feature (1)..(787): Homolog of NCBI NO: 15225539 NR Description: putative retroelement pol polyprotein; protein At2g13940.1 [Arabidopsis thaliana] >gi|25301698|pir||C84512
  misc_feature (795)..(1096): Homolog of NCBI NO: 15225539 NR Description: putative retroelement pol polyprotein; protein At2g13940.1 [Arabidopsis thaliana] >gi|25301698|pir||C84512
  misc_feature (1)..(828): Homolog of NCBI NO: 15227813 NR Description: putative retroelement pol polyprotein; protein At2g23330.1 [Arabidopsis thaliana] >gi|7444418|pir||T00499
  misc_feature (856)..(1096): Homolog of NCBI NO: 15227813 NR Description: putative retroelement pol polyprotein; protein At2g23330.1 [Arabidopsis thaliana] >gi|7444418|pir||T00499
  misc_feature (1)..(828): Homolog of NCBI NO: 15223588 NR Description: hypothetical protein; protein id: At1g56675.1 thaliana] >gi|25301685|pir||E96608 probable retroelement
  misc_feature (771)..(1099): Homolog of NCBI NO: 15223588 NR Description: hypothetical protein; protein id: At1g56675.1 thaliana] >gi|25301685|pir||E96608 probable retroelement
MLLNGENYERWAKLTRNNLQAKQKLGFIDGTLTKPSSDSPDYPRWLQTNSMLVGWLYASLDPQVQKSISVVDNARVMWESLRTRYSVGNASRVHQLKYDIVACRQDGQTAANYFGKLKVMWDDLDDYEPLLTCCCNRPSCTHRVRQSQRRDHERIHQFLMGLDAAKFGTSRTNILGRLSRDDNISLDSIYSEIIAEERHLTITRSKEERVDAVGFAVQTGVNAIASVTRVNNMGPCTHCGRSNHSADTCFKLHGVPEWYTEKYGDTSSGRGRGRSSTPRGRGRGHGNSYKANNAQTSHPSSSASEFSDIPGVSKEAWSAIRNLLKQDTATSSEKLSGKTNCVDFLIDSGASHHMTGFLDLLTEIYEIPHSVVVLPNAKHTIATKKGTLILGANMKLTHVLFVPDLSCTLISVARLLRELHCFAIFTDKVCVIQDRTSKMLIGVGTESNGVYHLQRAEVVATSANVVKWKTNKALWHMRLGHPSSKVLSSVLPSLEDFDSCSSDLKTICDVCVRAKQTRASFSESFNKAEECFSFIHYDVWGPYKHASSCGAHYFLTIVDDHSRAVWIHLMLAKSEVASLLQQFIAMASRQFNKQVKTVRSNNGTEFMSLKSYFAERGIVHQISCVYTHQQNGRVERKHRHILNVARSLLFQAELPISFWEESVLTAAYLINRTPTPILDGKTPYKILYSQPPSYASLRVFGSLCFARKHTGRLDKFQERGRKCIFVGYPHGQKGWRIYDIESQIFFVSRDVVFQEDIFPFADKKNKDTFSSPAAVIPSPILPYDDEFLDIYQIGDVPATNPLPAIIDVNDSPPSSPIITATPAAASPPPLRRGLRQRQENVRLKDYQTYSAQCESTQTLSDNIGTCIYPMANYVSGEIFSPSNQHFLAAISMVDPPQTYNQAIREKEWRNAVFFEVDALEDQGTWDITKLPQGVKAIGSKWVFRIKYNSNGTVERYKARLVALGNHQKEGIDFTKTFAPVVKMQTVRLLLDVAAAKDWELHQMDVHNAFLHGDLKEDIYMKPPPGFKTTDPSLVCKLKKSIYGLKQAPRCWFEKLSTSLLKFGFTQSKKDYSLFTSIRGSKVLHVIVYVDDVVICGKAVRENNTSKLALGSSP

SEQ ID NO: 83039 - protein, 1063 aa, Arabidopsis thaliana
  peptide (1)..(1063): Ceres Seq. ID no. 12668378
  misc_feature (477)..(638): Pfam Name: Integrase core domain Pfam Description: Integrase core domain
  misc_feature (1)..(778): Homolog of NCBI NO: 8843739 NR Description: retroelement pol polyprotein-like [Arabidopsis
  misc_feature (712)..(1046): Homolog of NCBI NO: 8843739 NR Description: retroelement pol polyprotein-like [Arabidopsis
  misc_feature (1)..(745): Homolog of NCBI NO: 15225640 NR Description: putative retroelement pol polyprotein; protein At2g07010.1 [Arabidopsis thaliana] >gi|25301695|pir||D84481
  misc_feature (747)..(1046): Homolog of NCBI NO: 15225640 NR Description: putative retroelement pol polyprotein; protein At2g07010.1 [Arabidopsis thaliana] >gi|25301695|pir||D84481
  misc_feature (1)..(737): Homolog of NCBI NO: 15225539 NR Description: putative retroelement pol polyprotein; protein At2g13940.1 [Arabidopsis thaliana] >gi|25301698|pir||C84512
  misc_feature (745)..(1046): Homolog of NCBI NO: 15225539 NR Description: putative retroelement pol polyprotein; protein At2g13940.1 [Arabidopsis thaliana] >gi|25301698|pir||C84512
  misc_feature (1)..(778): Homolog of NCBI NO: 15227813 NR Description: putative retroelement pol polyprotein; protein At2g23330.1 [Arabidopsis thaliana] >gi|7444418|pir||T00499
  misc_feature (806)..(1046): Homolog of NCBI NO: 15227813 NR Description: putative retroelement pol polyprotein; protein At2g23330.1 [Arabidopsis thaliana] >gi|7444418|pir||T00499
  misc_feature (1)..(778): Homolog of NCBI NO: 15223588 NR Description: hypothetical protein; protein id: At1g56675.1 thaliana] >gi|25301685|pir||E96608 probable retroelement
  misc_feature (721)..(1049): Homolog of NCBI NO: 15223588 NR Description: hypothetical protein; protein id: At1g56675.1 thaliana] >gi|25301685|pir||E96608 probable retroelement
MLVGWLYASLDPQVQKSISVVDNARVMWESLRTRYSVGNASRVHQLKYDIVACRQDGQTAANYFGKLKVMWDDLDDYEPLLTCCCNRPSCTHRVRQSQRRDHERIHQFLMGLDAAKFGTSRTNILGRLSRDDNISLDSIYSEIIAEERHLTITRSKEERVDAVGFAVQTGVNAIASVTRVNNMGPCTHCGRSNHSADTCFKLHGVPEWYTEKYGDTSSGRGRGRSSTPRGRGRGHGNSYKANNAQTSHPSSSASEFSDIPGVSKEAWSAIRNLLKQDTATSSEKLSGKTNCVDFLIDSGASHHMTGFLDLLTEIYEIPHSVVVLPNAKHTIATKKGTLILGANMKLTHVLFVPDLSCTLISVARLLRELHCFAIFTDKVCVIQDRTSKMLIGVGTESNGVYHLQRAEVVATSANVVKWKTNKALWHMRLGHPSSKVLSSVLPSLEDFDSCSSDLKTICDVCVRAKQTRASFSESFNKAEECFSFIHYDVWGPYKHASSCGAHYFLTIVDDHSRAVWIHLMLAKSEVASLLQQFIAMASRQFNKQVKTVRSNNGTEFMSLKSYFAERGIVHQISCVYTHQQNGRVERKHRHILNVARSLLFQAELPISFWEESVLTAAYLINRTPTPILDGKTPYKILYSQPPSYASLRVFGSLCFARKHTGRLDKFQERGRKCIFVGYPHGQKGWRIYDIESQIFFVSRDVVFQEDIFPFADKKNKDTFSSPAAVIPSPILPYDDEFLDIYQIGDVPATNPLPAIIDVNDSPPSSPIITATPAAASPPPLRRGLRQRQENVRLKDYQTYSAQCESTQTLSDNIGTCIYPMANYVSGEIFSPSNQHFLAAISMVDPPQTYNQAIREKEWRNAVFFEVDALEDQGTWDITKLPQGVKAIGSKWVFRIKYNSNGTVERYKARLVALGNHQKEGIDFTKTFAPVVKMQTVRLLLDVAAAKDWELHQMDVHNAFLHGDLKEDIYMKPPPGFKTTDPSLVCKLKKSIYGLKQAPRCWFEKLSTSLLKFGFTQSKKDYSLFTSIRGSKVLHVIVYVDDVVICGKAVRENNTSKLALGSSP

SEQ ID NO: 83040 - DNA, 651 bp, Arabidopsis thaliana
  misc_feature (1)..(651): Ceres Seq. ID no. 12668487
  misc_feature: MA Experiment ID: 20001451 Result: Up-regulated in Transcription
  misc_feature: MA Experiment 20001451 PARAMETER Experiment Name: At_Far-red-induction_P Parameter: Age (day) Value: 7
  misc_feature: MA Experiment 20001451 PARAMETER Experiment Name: At_Far-red-induction_P Parameter: Light Value: Far-red vs. White
  misc_feature: MA Experiment 20001451 PARAMETER Experiment Name: At_Far-red-induction_P Parameter: Organism Value: A. thaliana
  misc_feature: MA Experiment 20001451 PARAMETER Experiment Name: At_Far-red-induction_P Parameter: Plant Line Value: Columbia
  misc_feature: MA Experiment 20001451 PARAMETER Experiment Name: At_Far-red-induction_P Parameter: Timepoint (hr) Value: 24
  misc_feature: MA Experiment 20001451 PARAMETER Experiment Name: At_Far-red-induction_P Parameter: Tissue Value: Whole Plant
atggagaacgacgacgtaatgactccgccatggctaacaccaatgcttcgagctgattacttcgtgacttgttcgattcattcacaatcgagtaaaagtgaatgtaatctgttttgtttggattgttcaggcaatgccttttgttcttcttgtctcgctcatcacagaacccatcgtgttatccagattcgacgatcgtcgtatcataatgtggtgagagtgagtgagattcaaaaacatattgatatctcttgtattcagacttatgttatcaatagtgctaagatcttcttcttaaacgcgagacctcaatgtcgaactggtaaaagcttaaacaaaacatgtcagatctgttctcgtaaccttctcgattcgttcctgttctgttctcttgcttgtaagcttgaaggtgtgaagaatggagaggatccaaacctgactttatttcatagtggaaagagtgatgactcgtcgaagatcatcaataccgggatttgtagccgtttgatcgacgggatctcgattgcggttgacgaccaacgcagcgaaaccgcgggtgtgttatctccagagacaccttcaatagaaagccaccggaattacccaatgaagagtagaagaaagggtatacctcaacgagcacctttctaa

SEQ ID NO: 83041 - protein, 216 aa, Arabidopsis thaliana
  peptide (1)..(216): Ceres Seq. ID no. 12668488
  misc_feature (6)..(210): Pfam Name: Protein of unknown function, DUF597 Pfam Description: Protein of unknown function, DUF597
  misc_feature (1)..(216): Homolog of NCBI NO: 15217560 NR Description: hypothetical protein; protein id: At1g43000.1 thaliana] >gi|12323060|gb|AAG51520.1|AC068324_8 hypothetical
  misc_feature (2)..(176): Homolog of NCBI NO: 18411153 NR Description: expressed protein; protein id: At1g76590.1,
  misc_feature (2)..(176): Homolog of NCBI NO: 25337904 NR Description: unknown protein F14G6.19 [imported] - Arabidopsis
  misc_feature (2)..(176): Homolog of NCBI NO: 18394936 NR Description: expressed protein; protein id: At1g21000.1, by cDNA: 119384., supported by cDNA: gi_14030626, supported by gi_16226406 [Arabidopsis thaliana]
  misc_feature (2)..(176): Homolog of NCBI NO: 25337907 NR Description: hypothetical protein F9H16.1 - Arabidopsis >gi|4836888|gb|AAD30591.1|AC007369_1 Unknown protein [Arabidopsis >gi|13877713|gb|AAK43934.1|AF370615_1 Unknown protein
  misc_feature (2)..(176): Homolog of NCBI NO: 21536890 NR Description: unknown [Arabidopsis thaliana]
  misc_feature (2)..(176): Homolog of NCBI NO: 21537073 NR Description: unknown [Arabidopsis thaliana]
  misc_feature (9)..(216): Homolog of NCBI NO: 38346725 NR Description: OSJNBa0086O06.23 [Oryza sativa (japonica
  misc_feature (9)..(216): Homolog of NCBI NO: 6714272 NR Description: F6N18.8 [Arabidopsis thaliana]
  misc_feature (9)..(216): Homolog of NCBI NO: 18398555 NR Description: expressed protein; protein id: At1g32700.1,
MENDDVMTPPWLTPMLRADYFVTCSIHSQSSKSECNLFCLDCSGNAFCSSCLAHHRTHRVIQIRRSSYHNVVRVSEIQKHIDISCIQTYVINSAKIFFLNARPQCRTGKSLNKTCQICSRNLLDSFLFCSLACKLEGVKNGEDPNLTLFHSGKSDDSSKIINTGICSRLIDGISIAVDDQRSETAGVLSPETPSIESHRNYPMKSRRKGIPQRAPF

SEQ ID NO: 83042 - protein, 210 aa, Arabidopsis thaliana
  peptide (1)..(210): Ceres Seq. ID no. 12668489
  misc_feature (1)..(204): Pfam Name: Protein of unknown function, DUF597 Pfam Description: Protein of unknown function, DUF597
  misc_feature (1)..(210): Homolog of NCBI NO: 15217560 NR Description: hypothetical protein; protein id: At1g43000.1 thaliana] >gi|12323060|gb|AAG51520.1|AC068324_8 hypothetical
  misc_feature (1)..(170): Homolog of NCBI NO: 18411153 NR Description: expressed protein; protein id: At1g76590.1,
  misc_feature (1)..(170): Homolog of NCBI NO: 25337904 NR Description: unknown protein F14G6.19 [imported] - Arabidopsis
  misc_feature (1)..(170): Homolog of NCBI NO: 18394936 NR Description: expressed protein; protein id: At1g21000.1, by cDNA: 119384., supported by cDNA: gi_14030626, supported by gi_16226406 [Arabidopsis thaliana]
  misc_feature (1)..(170): Homolog of NCBI NO: 25337907 NR Description: hypothetical protein F9H16.1 - Arabidopsis >gi|4836888|gb|AAD30591.1|AC007369_1 Unknown protein [Arabidopsis >gi|13877713|gb|AAK43934.1|AF370615_1 Unknown protein
  misc_feature (1)..(170): Homolog of NCBI NO: 21536890 NR Description: unknown [Arabidopsis thaliana]
  misc_feature (1)..(170): Homolog of NCBI NO: 21537073 NR Description: unknown [Arabidopsis thaliana]
  misc_feature (3)..(210): Homolog of NCBI NO: 38346725 NR Description: OSJNBa0086O06.23 [Oryza sativa (japonica
  misc_feature (3)..(210): Homolog of NCBI NO: 6714272 NR Description: F6N18.8 [Arabidopsis thaliana]
  misc_feature (3)..(210): Homolog of NCBI NO: 18398555 NR Description: expressed protein; protein id: At1g32700.1,
MTPPWLTPMLRADYFVTCSIHSQSSKSECNLFCLDCSGNAFCSSCLAHHRTHRVIQIRRSSYHNVVRVSEIQKHIDISCIQTYVINSAKIFFLNARPQCRTGKSLNKTCQICSRNLLDSFLFCSLACKLEGVKNGEDPNLTLFHSGKSDDSSKIINTGICSRLIDGISIAVDDQRSETAGVLSPETPSIESHRNYPMKSRRKGIPQRAPF

SEQ ID NO: 83043 - protein, 202 aa, Arabidopsis thaliana
  peptide (1)..(202): Ceres Seq. ID no. 12668490
  misc_feature (1)..(196): Pfam Name: Protein of unknown function, DUF597 Pfam Description: Protein of unknown function, DUF597
  misc_feature (1)..(202): Homolog of NCBI NO: 15217560 NR Description: hypothetical protein; protein id: At1g43000.1 thaliana] >gi|12323060|gb|AAG51520.1|AC068324_8 hypothetical
  misc_feature (1)..(162): Homolog of NCBI NO: 18411153 NR Description: expressed protein; protein id: At1g76590.1,
  misc_feature (1)..(162): Homolog of NCBI NO: 25337904 NR Description: unknown protein F14G6.19 [imported] - Arabidopsis
  misc_feature (1)..(162): Homolog of NCBI NO: 18394936 NR Description: expressed protein; protein id: At1g21000.1, by cDNA: 119384., supported by cDNA: gi_14030626, supported by gi_16226406 [Arabidopsis thaliana]
  misc_feature (1)..(162): Homolog of NCBI NO: 25337907 NR Description: hypothetical protein F9H16.1 - Arabidopsis >gi|4836888|gb|AAD30591.1|AC007369_1 Unknown protein [Arabidopsis >gi|13877713|gb|AAK43934.1|AF370615_1 Unknown protein
  misc_feature (1)..(162): Homolog of NCBI NO: 21536890 NR Description: unknown [Arabidopsis thaliana]
  misc_feature (1)..(162): Homolog of NCBI NO: 21537073 NR Description: unknown [Arabidopsis thaliana]
  misc_feature (1)..(202): Homolog of NCBI NO: 38346725 NR Description: OSJNBa0086O06.23 [Oryza sativa (japonica
  misc_feature (1)..(202): Homolog of NCBI NO: 6714272 NR Description: F6N18.8 [Arabidopsis thaliana]
  misc_feature (1)..(202): Homolog of NCBI NO: 18398555 NR Description: expressed protein; protein id: At1g32700.1,
MLRADYFVTCSIHSQSSKSECNLFCLDCSGNAFCSSCLAHHRTHRVIQIRRSSYHNVVRVSEIQKHIDISCIQTYVINSAKIFFLNARPQCRTGKSLNKTCQICSRNLLDSFLFCSLACKLEGVKNGEDPNLTLFHSGKSDDSSKIINTGICSRLIDGISIAVDDQRSETAGVLSPETPSIESHRNYPMKSRRKGIPQRAPF

SEQ ID NO: 83044 - DNA, 1445 bp, Arabidopsis thaliana
  misc_feature (1)..(1445): Ceres Seq. ID no. 12668498
atggcatctttagattctcttccggcgatgaagctcgtgagattcatattatctacccttttggtcacttctgtgaactcgcaaacgcaatgccggaatttcaaatcaatcattagtttcggagattcaattgctgacactggaaacttgcttggtctctcggatcctaacgatcttcctgcttccgcgtttccgccatacggagaaaccttcttccaccacccaaccggtcgttactccgacggccgcctcatcattgatttcattgctgaattcttggggtttccgcttgtgcctcctttttatggatgtcaaaatgcaaactttaaaaagggagttaatttcgcggtcgcgggagcaactgcattagaaccttcctttctagaggagagaggaattcattctactatcaccaacgtcagtctaagcgttcagcttaggagcttcacggaaagtttacctaacttatgtggctcaccttcagattgtagagatatgattgaaaatgctttgatactcatgggagagatcggaggaaatgattataattttgcactcttccaacgcaaacccgttaaggaagttgaagagctggtaccgtttgtgatcgctactatttcttctgcaatcacggaattggtttgcatgggaggaagaacattcctagttcctggaaatttcccgatcggatactcagcatcctatttgacattatacaaaacatcaaacaaggaagagtatgatcctctaacaggatgtttgaaatggcttaacgatttctcagaatactacaataagcagcttcaggaagaactcaacggactcaggaagttgtaccctcatgtcaacatcatatatgctgattactacaacgctttgttgcgccttttccaagaaccagccaaattcgggtttatgaacagacccttgcccgcttgttgcggtgtaggaggatcttacaacttcaactttagtagaagatgtgggagtgtaggagttgaatactgcgatgatccttcacagtatgtgaattatgatggcattcatatgacggaggcggcatacagattgatatctgagggcttactcaagggaccgtatgctattcctcctttcaagtggtcttgcctcagctccgagattatgaataagatgtcattagatactcagattcttgatgaacagctactacaaggttgtctgaaagtttgagagacaagagaaagagtggaaaaaacatataggttcttaagtgtttgtgtcttcttcttttttgttccgggtaacggtgttaattagccttaggtgcatcatgcatgtgttggatcatgtattatctttgtattgtattgttttcgttagtttgggtaagagttagtatccttaattgttggaccatgtacactgtcatatataatttaactatatacaaaacaattaaatgc

SEQ ID NO: 83045 - protein, 403 aa, Arabidopsis thaliana
  peptide (1)..(403): Ceres Seq. ID no. 12668499
  misc_feature (37)..(362): Pfam Name: GDSL-like Lipase/Acylhydrolase Pfam Description: GDSL-like Lipase/Acylhydrolase
  misc_feature (1)..(403): Homolog of NCBI NO: 10764858 NR Description: F1K23.17 [Arabidopsis thaliana]
  misc_feature (1)..(403): Homolog of NCBI NO: 15218728 NR Description: lipase, putative; protein id: At1g28590.1
  misc_feature (1)..(403): Homolog of NCBI NO: 21593234 NR Description: lipase, putative [Arabidopsis thaliana]
  misc_feature (1)..(390): Homolog of NCBI NO: 15225872 NR Description: putative lipase; protein id: At2g27360.1
  misc_feature (1)..(389): Homolog of NCBI NO: 25336243 NR Description: pnrotein F1K23.16 [imported] - Arabidopsis >gi|10764857|gb|AAG22835.1|AC007508_11 F1K23.16 [Arabidopsis
  misc_feature (10)..(383): Homolog of NCBI NO: 15218723 NR Description: lipase, putative; protein id: At1g28570.1 thaliana] >gi|10764860|gb|AAG22837.1|AC007508_14 F1K23.19
  misc_feature (1)..(403): Homolog of NCBI NO: 15218731 NR Description: lipase, putative; protein id: At1g28600.1, by cDNA: 37307., supported by cDNA: gi_14326569 [Arabidopsis >gi|14326570|gb|AAK60329.1|AF385739_1 At1g28600/F1K23_6
  misc_feature (10)..(389): Homolog of NCBI NO: 15218725 NR Description: lipase, putative; protein id: At1g28580.1, by cDNA: gi_13605564, supported by cDNA: gi_15027914, supported cDNA: gi_18491140, supported by cDNA: gi_19310790 [Arabidopsis
  misc_feature (1)..(390): Homolog of NCBI NO: 10764858 NR Description: F1K23.17 [Arabidopsis thaliana]
  misc_feature (1)..(394): Homolog of NCBI NO: 12322540 NR Description: unknown protein [Arabidopsis thaliana]
MASLDSLPAMKLVRFILSTLLVTSVNSQTQCRNFKSIISFGDSIADTGNLLGLSDPNDLPASAFPPYGETFFHHPTGRYSDGRLIIDFIAEFLGFPLVPPFYGCQNANFKKGVNFAVAGATALEPSFLEERGIHSTITNVSLSVQLRSFTESLPNLCGSPSDCRDMIENALILMGEIGGNDYNFALFQRKPVKEVEELVPFVIATISSAITELVCMGGRTFLVPGNFPIGYSASYLTLYKTSNKEEYDPLTGCLKWLNDFSEYYNKQLQEELNGLRKLYPHVNIIYADYYNALLRLFQEPAKFGFMNRPLPACCGVGGSYNFNFSRRCGSVGVEYCDDPSQYVNYDGIHMTEAAYRLISEGLLKGPYAIPPFKWSCLSSEIMNKMSLDTQILDEQLLQGCLKV

SEQ ID NO: 83046 - protein, 394 aa, Arabidopsis thaliana
  peptide (1)..(394): Ceres Seq. ID no. 12668500
  misc_feature (28)..(353): Pfam Name: GDSL-like Lipase/Acylhydrolase Pfam Description: GDSL-like Lipase/Acylhydrolase
  misc_feature (1)..(394): Homolog of NCBI NO: 10764858 NR Description: F1K23.17 [Arabidopsis thaliana]
  misc_feature (1)..(394): Homolog of NCBI NO: 15218728 NR Description: lipase, putative; protein id: At1g28590.1
  misc_feature (1)..(394): Homolog of NCBI NO: 21593234 NR Description: lipase, putative [Arabidopsis thaliana]
  misc_feature (1)..(381): Homolog of NCBI NO: 15225872 NR Description: putative lipase; protein id: At2g27360.1
  misc_feature (1)..(380): Homolog of NCBI NO: 25336243 NR Description: pnrotein F1K23.16 [imported] - Arabidopsis >gi|10764857|gb|AAG22835.1|AC007508_11 F1K23.16 [Arabidopsis
  misc_feature (1)..(374): Homolog of NCBI NO: 15218723 NR Description: lipase, putative; protein id: At1g28570.1 thaliana] >gi|10764860|gb|AAG22837.1|AC007508_14 F1K23.19
  misc_feature (1)..(394): Homolog of NCBI NO: 15218731 NR Description: lipase, putative; protein id: At1g28600.1, by cDNA: 37307., supported by cDNA: gi_14326569 [Arabidopsis >gi|14326570|gb|AAK60329.1|AF385739_1 At1g28600/F1K23_6
  misc_feature (1)..(380): Homolog of NCBI NO: 15218725 NR Description: lipase, putative; protein id: At1g28580.1, by cDNA: gi_13605564, supported by cDNA: gi_15027914, supported cDNA: gi_18491140, supported by cDNA: gi_19310790 [Arabidopsis
  misc_feature (1)..(381): Homolog of NCBI NO: 10764858 NR Description: F1K23.17 [Arabidopsis thaliana]
  misc_feature (1)..(385): Homolog of NCBI NO: 12322540 NR Description: unknown protein [Arabidopsis thaliana]
MKLVRFILSTLLVTSVNSQTQCRNFKSIISFGDSIADTGNLLGLSDPNDLPASAFPPYGETFFHHPTGRYSDGRLIIDFIAEFLGFPLVPPFYGCQNANFKKGVNFAVAGATALEPSFLEERGIHSTITNVSLSVQLRSFTESLPNLCGSPSDCRDMIENALILMGEIGGNDYNFALFQRKPVKEVEELVPFVIATISSAITELVCMGGRTFLVPGNFPIGYSASYLTLYKTSNKEEYDPLTGCLKWLNDFSEYYNKQLQEELNGLRKLYPHVNIIYADYYNALLRLFQEPAKFGFMNRPLPACCGVGGSYNFNFSRRCGSVGVEYCDDPSQYVNYDGIHMTEAAYRLISEGLLKGPYAIPPFKWSCLSSEIMNKMSLDTQILDEQLLQGCLKV

SEQ ID NO: 83047 - protein, 238 aa, Arabidopsis thaliana
  peptide (1)..(238): Ceres Seq. ID no. 12668501
  misc_feature (1)..(197): Pfam Name: GDSL-like Lipase/Acylhydrolase Pfam Description: GDSL-like Lipase/Acylhydrolase
  misc_feature (1)..(238): Homolog of NCBI NO: 10764858 NR Description: F1K23.17 [Arabidopsis thaliana]
  misc_feature (1)..(238): Homolog of NCBI NO: 15218728 NR Description: lipase, putative; protein id: At1g28590.1
  misc_feature (1)..(238): Homolog of NCBI NO: 21593234 NR Description: lipase, putative [Arabidopsis thaliana]
  misc_feature (1)..(225): Homolog of NCBI NO: 15225872 NR Description: putative lipase; protein id: At2g27360.1
  misc_feature (1)..(224): Homolog of NCBI NO: 25336243 NR Description: pnrotein F1K23.16 [imported] - Arabidopsis >gi|10764857|gb|AAG22835.1|AC007508_11 F1K23.16 [Arabidopsis
  misc_feature (1)..(218): Homolog of NCBI NO: 15218723 NR Description: lipase, putative; protein id: At1g28570.1 thaliana] >gi|10764860|gb|AAG22837.1|AC007508_14 F1K23.19
  misc_feature (1)..(238): Homolog of NCBI NO: 15218731 NR Description: lipase, putative; protein id: At1g28600.1, by cDNA: 37307., supported by cDNA: gi_14326569 [Arabidopsis >gi|14326570|gb|AAK60329.1|AF385739_1 At1g28600/F1K23_6
  misc_feature (1)..(224): Homolog of NCBI NO: 15218725 NR Description: lipase, putative; protein id: At1g28580.1, by cDNA: gi_13605564, supported by cDNA: gi_15027914, supported cDNA: gi_18491140, supported by cDNA: gi_19310790 [Arabidopsis
  misc_feature (1)..(225): Homolog of NCBI NO: 10764858 NR Description: F1K23.17 [Arabidopsis thaliana]
  misc_feature (1)..(229): Homolog of NCBI NO: 12322540 NR Description: unknown protein [Arabidopsis thaliana]
MIENALILMGEIGGNDYNFALFQRKPVKEVEELVPFVIATISSAITELVCMGGRTFLVPGNFPIGYSASYLTLYKTSNKEEYDPLTGCLKWLNDFSEYYNKQLQEELNGLRKLYPHVNIIYADYYNALLRLFQEPAKFGFMNRPLPACCGVGGSYNFNFSRRCGSVGVEYCDDPSQYVNYDGIHMTEAAYRLISEGLLKGPYAIPPFKWSCLSSEIMNKMSLDTQILDEQLLQGCLKV

SEQ ID NO: 83048 - DNA, 1532 bp, Arabidopsis thaliana
  misc_feature (1)..(1532): Ceres Seq. ID no. 12668502
  misc_feature: MA Experiment ID: 20000171 Result: Down-regulated in Transcription
  misc_feature: MA Experiment 20000171 PARAMETER Experiment Name: At_42deg_Heat_P Parameter: Age (day) Value: 14
  misc_feature: MA Experiment 20000171 PARAMETER Experiment Name: At_42deg_Heat_P Parameter: Organism Value: A. thaliana
  misc_feature: MA Experiment 20000171 PARAMETER Experiment Name: At_42deg_Heat_P Parameter: Plant Line Value: WS
  misc_feature: MA Experiment 20000171 PARAMETER Experiment Name: At_42deg_Heat_P Parameter: Temperature (deg C) Value: 42 vs. 22
  misc_feature: MA Experiment 20000171 PARAMETER Experiment Name: At_42deg_Heat_P Parameter: Timepoint (hr) Value: 1
  misc_feature: MA Experiment 20000171 PARAMETER Experiment Name: At_42deg_Heat_P Parameter: Tissue Value: Aerial
  misc_feature: MA Experiment ID: 20000173 Result: Down-regulated in Transcription
  misc_feature: MA Experiment 20000173 PARAMETER Experiment Name: At_42deg_Heat_P Parameter: Age (day) Value: 14
  misc_feature: MA Experiment 20000173 PARAMETER Experiment Name: At_42deg_Heat_P Parameter: Organism Value: A. thaliana
  misc_feature: MA Experiment 20000173 PARAMETER Experiment Name: At_42deg_Heat_P Parameter: Plant Line Value: WS
  misc_feature: MA Experiment 20000173 PARAMETER Experiment Name: At_42deg_Heat_P Parameter: Temperature (deg C) Value: 42 vs. 22
  misc_feature: MA Experiment 20000173 PARAMETER Experiment Name: At_42deg_Heat_P Parameter: Timepoint (hr) Value: 6
  misc_feature: MA Experiment 20000173 PARAMETER Experiment Name: At_42deg_Heat_P Parameter: Tissue Value: Aerial
  misc_feature: MA Experiment ID: 20000184 Result: Down-regulated in Transcription
  misc_feature: MA Experiment 20000184 PARAMETER Experiment Name: At_Shoots__P Parameter: Age (day) Value: 7
  misc_feature: MA Experiment 20000184 PARAMETER Experiment Name: At_Shoots__P Parameter: Tissue Value: Shoots vs. Whole Plant
  misc_feature: MA Experiment ID: 20000264 Result: Up-regulated in Transcription
  misc_feature: MA Experiment 20000264 PARAMETER Experiment Name: At_Open_Flower_P Parameter: Age (day) Value: 21
  misc_feature: MA Experiment 20000264 PARAMETER Experiment Name: At_Open_Flower_P Parameter: Plant Line Value: WS
  misc_feature: MA Experiment 20000264 PARAMETER Experiment Name: At_Open_Flower_P Parameter: Tissue Value: Open Flower vs. Whole Plant
  misc_feature: MA Experiment ID: 20000441 Result: Down-regulated in Transcription
  misc_feature: MA Experiment 20000441 PARAMETER Experiment Name: At_1uM_BR-BRZ__P Parameter: Tissue Value: Shoot Apices
  misc_feature: MA Experiment 20000441 PARAMETER Experiment Name: At_1uM_BR-BRZ__P Parameter: Treatment Value: 1uM BR vs. No Treatment
  misc_feature: MA Experiment ID: 20001247 Result: Down-regulated in Transcription
  misc_feature: MA Experiment 20001247 PARAMETER Experiment Name: At_Far-red-induction_P Parameter: Age (day) Value: 7
  misc_feature: MA Experiment 20001247 PARAMETER Experiment Name: At_Far-red-induction_P Parameter: Light Value: Far-red vs. White
  misc_feature: MA Experiment 20001247 PARAMETER Experiment Name: At_Far-red-induction_P Parameter: Organism Value: A. thaliana
  misc_feature: MA Experiment 20001247 PARAMETER Experiment Name: At_Far-red-induction_P Parameter: Plant Line Value: Columbia
  misc_feature: MA Experiment 20001247 PARAMETER Experiment Name: At_Far-red-induction_P Parameter: Timepoint (hr) Value: 1
  misc_feature: MA Experiment 20001247 PARAMETER Experiment Name: At_Far-red-induction_P Parameter: Tissue Value: Whole Plant
  misc_feature: MA Experiment ID: 20001248 Result: Down-regulated in Transcription
  misc_feature: MA Experiment 20001248 PARAMETER Experiment Name: At_Far-red-induction_P Parameter: Age (day) Value: 7
  misc_feature: MA Experiment 20001248 PARAMETER Experiment Name: At_Far-red-induction_P Parameter: Light Value: Far-red vs. White
  misc_feature: MA Experiment 20001248 PARAMETER Experiment Name: At_Far-red-induction_P Parameter: Organism Value: A. thaliana
  misc_feature: MA Experiment 20001248 PARAMETER Experiment Name: At_Far-red-induction_P Parameter: Plant Line Value: Columbia
  misc_feature: MA Experiment 20001248 PARAMETER Experiment Name: At_Far-red-induction_P Parameter: Timepoint (hr) Value: 4
  misc_feature: MA Experiment 20001248 PARAMETER Experiment Name: At_Far-red-induction_P Parameter: Tissue Value: Whole Plant
  misc_feature: MA Experiment ID: 20001450 Result: Down-regulated in Transcription
  misc_feature: MA Experiment 20001450 PARAMETER Experiment Name: At_Far-red-induction_P Parameter: Age (day) Value: 7
  misc_feature: MA Experiment 20001450 PARAMETER Experiment Name: At_Far-red-induction_P Parameter: Light Value: Far-red vs. White
  misc_feature: MA Experiment 20001450 PARAMETER Experiment Name: At_Far-red-induction_P Parameter: Organism Value: A. thaliana
  misc_feature: MA Experiment 20001450 PARAMETER Experiment Name: At_Far-red-induction_P Parameter: Plant Line Value: Columbia
  misc_feature: MA Experiment 20001450 PARAMETER Experiment Name: At_Far-red-induction_P Parameter: Timepoint (hr) Value: 8
  misc_feature: MA Experiment 20001450 PARAMETER Experiment Name: At_Far-red-induction_P Parameter: Tissue Value: Whole Plant
  misc_feature: MA Experiment ID: 20001757 Result: Down-regulated in Transcription
  misc_feature: MA Experiment 20001757 PARAMETER Experiment Name: At_50mM_NH4NO3_L-to-H_P Parameter: Timepoint (hr) Value: 6
  misc_feature: MA Experiment 20001757 PARAMETER Experiment Name: At_50mM_NH4NO3_L-to-H_P Parameter: Tissue Value: Leaf
  misc_feature: MA Experiment 20001757 PARAMETER Experiment Name: At_50mM_NH4NO3_L-to-H_P Parameter: Treatment Value: 50mM NH4NO3 vs 100mM Mannitol
accgcggacttctcgtatggcgtcactagattctctagtgagcttctttttatctaccctttttgtcacaatcgtgagctcacaaacgcagtgccggaatctcgagtcgattatcagtttcggtgattcgattaccgacacaggaaacttggttggtctctcggatcgtaaccatcttcctgtgaccgcgtttctgccgtatggagaaaccttcttccaccacccaactggccgttcctgcaacggccgtatcatcatcgactttatcgctgaattcttagggttaccgcatgtgcctcctttttatggatctaaaaatggaaactttgagaaaggagttaatttcgctgttgcgggagcaacggcactagaaacttccattcttgagaagagaggaatttattatcctcacagcaacatcagtttgggaattcagcttaagaccttcaaggagagcttaccaaatctatgtggttcacctacagattgtagagatatgattggaaatgcttttattatcatgggagagattggagggaatgattttaatttcgcattctttgtgaacaaaaccagtgaggtcaaagagttggttccgttggtgatcactaaaatttcttctgcaattgtggtaaacattcttgatcagcgagtccctagaacgagtaattttttcaaaaaactgttatgttttttgttttgtttttgtgttttggtactgaatgttgaatctaggagttggtcgatatgggaggaagaacattcctagttcctggaaacttcccgctcggatgctcagcaacgtatttaacattataccaaacatcaaacaaggaagagtatgatcctctaacaggatgtttgacatggctgaacgatttttcagaatactacaacgagaagcttcaggcagaactcaacagactcagtaaactttaccctcatgtcaacatcatatatggtgactactttaatgctctgttgcgcctttaccaagaaccatccaaatttgggttcatggacagacccttacctgcttgttgcggtttaggaggaccgtacaacttcaccttaagtaaaaaatgtgggagtgtaggagtaaaatattgtagtgatccttcaaagtatgtgaattgggacggcgttcatatgactgaagctgcatacaaatggatagctgatggattactcaagggtccgtatacgattccttcgttccattggttatgcctcggctcaaaaattaagagcaaggagtcattagacacgtagtgttcttttgacaaacagctgaaacaagcttgttggagctctgagagataataagaaaacaaatacgttcttaagtgctttccatggatattttatatcattgtgtattgttgtttgagagagagagagagagtggttaagtgttagtagctaactcatgtgatatcttcagagagatcttagattagaccggtcggagatgcactgttccaaaaatggaccacttcatgagtggtagaaataacagaataggagatgat

SEQ ID NO: 83049 - protein, 255 aa, Arabidopsis thaliana
  peptide (1)..(255): Ceres Seq. ID no. 12668503
  misc_feature (37)..(210): Pfam Name: GDSL-like Lipase/Acylhydrolase Pfam Description: GDSL-like Lipase/Acylhydrolase
  misc_feature (6)..(210): Homolog of NCBI NO: 25336243 NR Description: pnrotein F1K23.16 [imported] - Arabidopsis >gi|10764857|gb|AAG22835.1|AC007508_11 F1K23.16 [Arabidopsis
  misc_feature (6)..(209): Homolog of NCBI NO: 10764858 NR Description: F1K23.17 [Arabidopsis thaliana]
  misc_feature (6)..(209): Homolog of NCBI NO: 15225872 NR Description: putative lipase; protein id: At2g27360.1
  misc_feature (6)..(209): Homolog of NCBI NO: 21593234 NR Description: lipase, putative [Arabidopsis thaliana]
  misc_feature (6)..(209): Homolog of NCBI NO: 15218731 NR Description: lipase, putative; protein id: At1g28600.1, by cDNA: 37307., supported by cDNA: gi_14326569 [Arabidopsis >gi|14326570|gb|AAK60329.1|AF385739_1 At1g28600/F1K23_6
  misc_feature (4)..(209): Homolog of NCBI NO: 10764858 NR Description: F1K23.17 [Arabidopsis thaliana]
  misc_feature (6)..(209): Homolog of NCBI NO: 15218728 NR Description: lipase, putative; protein id: At1g28590.1
  misc_feature (6)..(209): Homolog of NCBI NO: 12322540 NR Description: unknown protein [Arabidopsis thaliana]
  misc_feature (6)..(209): Homolog of NCBI NO: 30692564 NR Description: lipase, putative [Arabidopsis thaliana]
  misc_feature (6)..(209): Homolog of NCBI NO: 12597843 NR Description: lipase, putative [Arabidopsis thaliana]
PRTSRMASLDSLVSFFLSTLFVTIVSSQTQCRNLESIISFGDSITDTGNLVGLSDRNHLPVTAFLPYGETFFHHPTGRSCNGRIIIDFIAEFLGLPHVPPFYGSKNGNFEKGVNFAVAGATALETSILEKRGIYYPHSNISLGIQLKTFKESLPNLCGSPTDCRDMIGNAFIIMGEIGGNDFNFAFFVNKTSEVKELVPLVITKISSAIVVNILDQRVPRTSNFFKKLLCFLFCFCVLVLNVESRSWSIWEEEHS

SEQ ID NO: 83050 - protein, 250 aa, Arabidopsis thaliana
  peptide (1)..(250): Ceres Seq. ID no. 12668504
  misc_feature (32)..(205): Pfam Name: GDSL-like Lipase/Acylhydrolase Pfam Description: GDSL-like Lipase/Acylhydrolase
  misc_feature (1)..(205): Homolog of NCBI NO: 25336243 NR Description: pnrotein F1K23.16 [imported] - Arabidopsis >gi|10764857|gb|AAG22835.1|AC007508_11 F1K23.16 [Arabidopsis
  misc_feature (1)..(204): Homolog of NCBI NO: 10764858 NR Description: F1K23.17 [Arabidopsis thaliana]
  misc_feature (1)..(204): Homolog of NCBI NO: 15225872 NR Description: putative lipase; protein id: At2g27360.1
  misc_feature (1)..(204): Homolog of NCBI NO: 21593234 NR Description: lipase, putative [Arabidopsis thaliana]
  misc_feature (1)..(204): Homolog of NCBI NO: 15218731 NR Description: lipase, putative; protein id: At1g28600.1, by cDNA: 37307., supported by cDNA: gi_14326569 [Arabidopsis >gi|14326570|gb|AAK60329.1|AF385739_1 At1g28600/F1K23_6
  misc_feature (1)..(204): Homolog of NCBI NO: 10764858 NR Description: F1K23.17 [Arabidopsis thaliana]
  misc_feature (1)..(204): Homolog of NCBI NO: 15218728 NR Description: lipase, putative; protein id: At1g28590.1
  misc_feature (1)..(204): Homolog of NCBI NO: 12322540 NR Description: unknown protein [Arabidopsis thaliana]
  misc_feature (1)..(204): Homolog of NCBI NO: 30692564 NR Description: lipase, putative [Arabidopsis thaliana]
  misc_feature (1)..(204): Homolog of NCBI NO: 12597843 NR Description: lipase, putative [Arabidopsis thaliana]
MASLDSLVSFFLSTLFVTIVSSQTQCRNLESIISFGDSITDTGNLVGLSDRNHLPVTAFLPYGETFFHHPTGRSCNGRIIIDFIAEFLGLPHVPPFYGSKNGNFEKGVNFAVAGATALETSILEKRGIYYPHSNISLGIQLKTFKESLPNLCGSPTDCRDMIGNAFIIMGEIGGNDFNFAFFVNKTSEVKELVPLVITKISSAIVVNILDQRVPRTSNFFKKLLCFLFCFCVLVLNVESRSWSIWEEEHS

SEQ ID NO: 83051 - protein, 174 aa, Arabidopsis thaliana
  peptide (1)..(174): Ceres Seq. ID no. 12668505
  misc_feature (1)..(147): Pfam Name: GDSL-like Lipase/Acylhydrolase Pfam Description: GDSL-like Lipase/Acylhydrolase
  misc_feature (1)..(174): Homolog of NCBI NO: 25336243 NR Description: pnrotein F1K23.16 [imported] - Arabidopsis >gi|10764857|gb|AAG22835.1|AC007508_11 F1K23.16 [Arabidopsis
  misc_feature (1)..(174): Homolog of NCBI NO: 10764858 NR Description: F1K23.17 [Arabidopsis thaliana]
  misc_feature (1)..(174): Homolog of NCBI NO: 21593234 NR Description: lipase, putative [Arabidopsis thaliana]
  misc_feature (1)..(174): Homolog of NCBI NO: 15225872 NR Description: putative lipase; protein id: At2g27360.1
  misc_feature (1)..(174): Homolog of NCBI NO: 15218731 NR Description: lipase, putative; protein id: At1g28600.1, by cDNA: 37307., supported by cDNA: gi_14326569 [Arabidopsis >gi|14326570|gb|AAK60329.1|AF385739_1 At1g28600/F1K23_6
  misc_feature (1)..(172): Homolog of NCBI NO: 10764858 NR Description: F1K23.17 [Arabidopsis thaliana]
  misc_feature (1)..(174): Homolog of NCBI NO: 15218728 NR Description: lipase, putative; protein id: At1g28590.1
  misc_feature (1)..(174): Homolog of NCBI NO: 12322540 NR Description: unknown protein [Arabidopsis thaliana]
  misc_feature (1)..(174): Homolog of NCBI NO: 30692564 NR Description: lipase, putative [Arabidopsis thaliana]
  misc_feature (1)..(174): Homolog of NCBI NO: 12597843 NR Description: lipase, putative [Arabidopsis thaliana]
MGGRTFLVPGNFPLGCSATYLTLYQTSNKEEYDPLTGCLTWLNDFSEYYNEKLQAELNRLSKLYPHVNIIYGDYFNALLRLYQEPSKFGFMDRPLPACCGLGGPYNFTLSKKCGSVGVKYCSDPSKYVNWDGVHMTEAAYKWIADGLLKGPYTIPSFHWLCLGSKIKSKESLDT

SEQ ID NO: 83052 - DNA, 1173 bp, Arabidopsis thaliana
  misc_feature (1)..(1173): Ceres Seq. ID no. 12668506
  misc_feature: MA Experiment ID: 20000315 Result: Up-regulated in Transcription
  misc_feature: MA Experiment 20000315 PARAMETER Experiment Name: At_14day_Shoots-Roots_Sub_P Parameter: Age (day) Value: 14
  misc_feature: MA Experiment 20000315 PARAMETER Experiment Name: At_14day_Shoots-Roots_Sub_P Parameter: Organism Value: A. thaliana
  misc_feature: MA Experiment 20000315 PARAMETER Experiment Name: At_14day_Shoots-Roots_Sub_P Parameter: Plant Line Value: WS
  misc_feature: MA Experiment 20000315 PARAMETER Experiment Name: At_14day_Shoots-Roots_Sub_P Parameter: Tissue Value: Shoots vs. Whole Plant
  misc_feature: MA Experiment ID: 20000355 Result: Down-regulated in Transcription
  misc_feature: MA Experiment 20000355 PARAMETER Experiment Name: At_Siliques_Sub_P Parameter: Age (day) Value: 21
  misc_feature: MA Experiment 20000355 PARAMETER Experiment Name: At_Siliques_Sub_P Parameter: Organism Value: A. thaliana
  misc_feature: MA Experiment 20000355 PARAMETER Experiment Name: At_Siliques_Sub_P Parameter: Plant Line Value: WS
  misc_feature: MA Experiment 20000355 PARAMETER Experiment Name: At_Siliques_Sub_P Parameter: Tissue Value: Less Than 5mm Siliques vs. Whole Plant
atggcttcttcactggagaagcttatttcaagctttctacttgtcttgtactccaccaccatcattgttgcttcatcagaatctcgatgtaggcgttttaaatcgatcatcagctttggtgattccatcgccgacaccggaaattatctccatctctctgatgttaaccaccttcctcaatccgcctttcttccttatggcgaaagcttcttccatcctccctccggccgttactcggacggccgtctcatcatcgactttatagctgaattcttgggactaccgtacgtaccatcttattttggatcccaaaacgtgagctttgatcaaggtatcaatttcgcggtgtatggtgcaactgcattggatcgtgtgtttcttgtgggaaaaggaattgaatctgatttcaccaatgttagtttaagtgttcagcttaacatcttcaaacagattttacctaatctttgcacctcgtcttctcgtgattgcagagagatgcttggagactcgctgatacttatgggtgagattggagtaaatgactataattaccctttctttgaaggcaaaagtatcaatgaaatcaaacagcttgttcctctagtcatcaaagctatttcttctgctattgtggatttgattgatttagggggcaaaacgtttctggtccctggaaacttcccattaggatgctatcccgcgtatctcactctatttcagaccgcggcagaagaagaccacgaccctttcacaggttgtatcccacggctcaatgaattcggagagtaccacaacgaacagctcaagacagaactcaaaagactccaagaactatacgatcatgtcaatatcatttacgccgactactacaactctttgttccggttatatcaagaaccagtcaaatatgggtttaagaacagacctttggctgcttgttgcggagtcggaggtcaatacaacttcactattggtaaagagtgtggacacagaggagttagctgttgtcaaaatccttctgaatatgtgaattgggacggttatcatttaaccgaggccacacaccagaagatggctcaagttatactcaacggtacctatgcatcacctgctttcgactggtcctgctctggctctgaatcagtggataaagagtattctttcagcagttaa

SEQ ID NO: 83053 - protein, 390 aa, Arabidopsis thaliana
  peptide (1)..(390): Ceres Seq. ID no. 12668507
  misc_feature (36)..(362): Pfam Name: GDSL-like Lipase/Acylhydrolase Pfam Description: GDSL-like Lipase/Acylhydrolase
  misc_feature (1)..(390): Homolog of NCBI NO: 10764854 NR Description: F1K23.13 [Arabidopsis thaliana]
  misc_feature (1)..(390): Homolog of NCBI NO: 15218751 NR Description: lipase, putative; protein id: At1g28640.1
  misc_feature (1)..(383): Homolog of NCBI NO: 15218756 NR Description: lipase; protein id: At1g28670.1, supported by
  misc_feature (1)..(381): Homolog of NCBI NO: 10764854 NR Description: F1K23.13 [Arabidopsis thaliana]
  misc_feature (5)..(379): Homolog of NCBI NO: 15218753 NR Description: lipase, putative; protein id: At1g28650.1
  misc_feature (1)..(383): Homolog of NCBI NO: 18396873 NR Description: expressed protein; protein id: At1g28660.1, by cDNA: gi_11935182 [Arabidopsis thaliana] unknown protein [Arabidopsis thaliana]
  misc_feature (1)..(383): Homolog of NCBI NO: 30690523 NR Description: lipase, putative [Arabidopsis thaliana]
  misc_feature (26)..(366): Homolog of NCBI NO: 10764854 NR Description: F1K23.13 [Arabidopsis thaliana]
  misc_feature (217)..(386): Homolog of NCBI NO: 10764854 NR Description: F1K23.13 [Arabidopsis thaliana]
  misc_feature (44)..(178): Homolog of NCBI NO: 10764854 NR Description: F1K23.13 [Arabidopsis thaliana]
MASSLEKLISSFLLVLYSTTIIVASSESRCRRFKSIISFGDSIADTGNYLHLSDVNHLPQSAFLPYGESFFHPPSGRYSDGRLIIDFIAEFLGLPYVPSYFGSQNVSFDQGINFAVYGATALDRVFLVGKGIESDFTNVSLSVQLNIFKQILPNLCTSSSRDCREMLGDSLILMGEIGVNDYNYPFFEGKSINEIKQLVPLVIKAISSAIVDLIDLGGKTFLVPGNFPLGCYPAYLTLFQTAAEEDHDPFTGCIPRLNEFGEYHNEQLKTELKRLQELYDHVNIIYADYYNSLFRLYQEPVKYGFKNRPLAACCGVGGQYNFTIGKECGHRGVSCCQNPSEYVNWDGYHLTEATHQKMAQVILNGTYASPAFDWSCSGSESVDKEYSFSS

SEQ ID NO: 83054 - protein, 225 aa, Arabidopsis thaliana
  peptide (1)..(225): Ceres Seq. ID no. 12668508
  misc_feature (1)..(197): Pfam Name: GDSL-like Lipase/Acylhydrolase Pfam Description: GDSL-like Lipase/Acylhydrolase
  misc_feature (1)..(225): Homolog of NCBI NO: 10764854 NR Description: F1K23.13 [Arabidopsis thaliana]
  misc_feature (1)..(225): Homolog of NCBI NO: 15218751 NR Description: lipase, putative; protein id: At1g28640.1
  misc_feature (1)..(218): Homolog of NCBI NO: 15218756 NR Description: lipase; protein id: At1g28670.1, supported by
  misc_feature (1)..(216): Homolog of NCBI NO: 10764854 NR Description: F1K23.13 [Arabidopsis thaliana]
  misc_feature (1)..(214): Homolog of NCBI NO: 15218753 NR Description: lipase, putative; protein id: At1g28650.1
  misc_feature (1)..(218): Homolog of NCBI NO: 18396873 NR Description: expressed protein; protein id: At1g28660.1, by cDNA: gi_11935182 [Arabidopsis thaliana] unknown protein [Arabidopsis thaliana]
  misc_feature (1)..(218): Homolog of NCBI NO: 30690523 NR Description: lipase, putative [Arabidopsis thaliana]
  misc_feature (1)..(201): Homolog of NCBI NO: 10764854 NR Description: F1K23.13 [Arabidopsis thaliana]
  misc_feature (52)..(221): Homolog of NCBI NO: 10764854 NR Description: F1K23.13 [Arabidopsis thaliana]
  misc_feature (1)..(13): Homolog of NCBI NO: 10764854 NR Description: F1K23.13 [Arabidopsis thaliana]
MLGDSLILMGEIGVNDYNYPFFEGKSINEIKQLVPLVIKAISSAIVDLIDLGGKTFLVPGNFPLGCYPAYLTLFQTAAEEDHDPFTGCIPRLNEFGEYHNEQLKTELKRLQELYDHVNIIYADYYNSLFRLYQEPVKYGFKNRPLAACCGVGGQYNFTIGKECGHRGVSCCQNPSEYVNWDGYHLTEATHQKMAQVILNGTYASPAFDWSCSGSESVDKEYSFSS

SEQ ID NO: 83055 - protein, 217 aa, Arabidopsis thaliana
  peptide (1)..(217): Ceres Seq. ID no. 12668509
  misc_feature (1)..(189): Pfam Name: GDSL-like Lipase/Acylhydrolase Pfam Description: GDSL-like Lipase/Acylhydrolase
  misc_feature (1)..(217): Homolog of NCBI NO: 10764854 NR Description: F1K23.13 [Arabidopsis thaliana]
  misc_feature (1)..(217): Homolog of NCBI NO: 15218751 NR Description: lipase, putative; protein id: At1g28640.1
  misc_feature (1)..(210): Homolog of NCBI NO: 15218756 NR Description: lipase; protein id: At1g28670.1, supported by
  misc_feature (1)..(208): Homolog of NCBI NO: 10764854 NR Description: F1K23.13 [Arabidopsis thaliana]
  misc_feature (1)..(206): Homolog of NCBI NO: 15218753 NR Description: lipase, putative; protein id: At1g28650.1
  misc_feature (1)..(210): Homolog of NCBI NO: 18396873 NR Description: expressed protein; protein id: At1g28660.1, by cDNA: gi_11935182 [Arabidopsis thaliana] unknown protein [Arabidopsis thaliana]
  misc_feature (1)..(210): Homolog of NCBI NO: 30690523 NR Description: lipase, putative [Arabidopsis thaliana]
  misc_feature (1)..(193): Homolog of NCBI NO: 10764854 NR Description: F1K23.13 [Arabidopsis thaliana]
  misc_feature (44)..(213): Homolog of NCBI NO: 10764854 NR Description: F1K23.13 [Arabidopsis thaliana]
  misc_feature (1)..(207): Homolog of NCBI NO: 15218723 NR Description: lipase, putative; protein id: At1g28570.1 thaliana] >gi|10764860|gb|AAG22837.1|AC007508_14 F1K23.19
MGEIGVNDYNYPFFEGKSINEIKQLVPLVIKAISSAIVDLIDLGGKTFLVPGNFPLGCYPAYLTLFQTAAEEDHDPFTGCIPRLNEFGEYHNEQLKTELKRLQELYDHVNIIYADYYNSLFRLYQEPVKYGFKNRPLAACCGVGGQYNFTIGKECGHRGVSCCQNPSEYVNWDGYHLTEATHQKMAQVILNGTYASPAFDWSCSGSESVDKEYSFSS

SEQ ID NO: 83056 - DNA, 924 bp, Arabidopsis thaliana
  misc_feature (1)..(924): Ceres Seq. ID no. 12668522
  misc_feature: MA Experiment ID: 20000440 Result: Up-regulated in Transcription
  misc_feature: MA Experiment 20000440 PARAMETER Experiment Name: At_Closed-Flower__Sub_P Parameter: Tissue Value: Closed Flower vs. Whole Plant
atgacttcctacaataactcctccggcagtctcgccctggccgttgctcttctatttgccggcgccttatatatctacttctcatcacgttcagcttctgatcccatctccggtctcctacaaaatgtcaacactagattgatacagtatccggtggacgagctagagacggtgctggacaaggcgtcgacagggaacaacaagacggtgataatagcaatggtgaacaaagcttacgtggaggaggatggaggagggaggacgatgctggatctgtttttggagagtttttgggaaggagaggggacacgcccgcttcttaaccatctgatggtggttgcagcggatcagacggcctacgatcgctgcctcttcaggaggctccattgctacaagatggatacggaaggggttgacttggagggagagaaagatacggacgtgatgtggctaaggagtcccttgtcccggctaaacgtgagcttggatatgcatataagcgtggacagaaataacgtgagaggacaattgatcaacacgggattctaccatgcccggtccaacaacaagaccatctccctcttccagaaatggtacgacatgaggctcaagtctttgggcatgaaggaacaagacgtcctcaagaatctcctagactctggcttctttaaccagcttggtctcaacgttggcttcctcagtacggccgaattcagcggtttctgccaagacagccctgacatgggggctgtcacaaccgtccacgccaactgttgcgtccacatccctgctaagatctctgatctcagtcttgctcttcgtgactggaaacgctacaaagcctcccgtgtcaacagcaggtggagcccccatgttgagtgcaggcgttcatggaaggacgttcattatgtccccaagctctga

SEQ ID NO: 83057 - protein, 307 aa, Arabidopsis thaliana
  peptide (1)..(307): Ceres Seq. ID no. 12668523
  misc_feature (1)..(307): Homolog of NCBI NO: 15218762 NR Description: hypothetical protein common family; protein id:
  misc_feature (1)..(166): Homolog of NCBI NO: 25372968 NR Description: protein F1K23.10 [imported] - Arabidopsis >gi|10764853|gb|AAG22833.1|AC007508_6 F1K23.10 [Arabidopsis
  misc_feature (145)..(307): Homolog of NCBI NO: 25372968 NR Description: protein F1K23.10 [imported] - Arabidopsis >gi|10764853|gb|AAG22833.1|AC007508_6 F1K23.10 [Arabidopsis
  misc_feature (124)..(307): Homolog of NCBI NO: 18396892 NR Description: expressed protein; protein id: At1g28710.1, by cDNA: gi_15027990, supported by cDNA: gi_20259204 [Arabidopsis >gi|10764852|gb|AAG22832.1|AC007508_5 F1K23.9 [Arabidopsis
  misc_feature (1)..(155): Homolog of NCBI NO: 18396892 NR Description: expressed protein; protein id: At1g28710.1, by cDNA: gi_15027990, supported by cDNA: gi_20259204 [Arabidopsis >gi|10764852|gb|AAG22832.1|AC007508_5 F1K23.9 [Arabidopsis
  misc_feature (5)..(155): Homolog of NCBI NO: 6691205 NR Description: F1K23.11 [Arabidopsis thaliana]
  misc_feature (145)..(294): Homolog of NCBI NO: 6691205 NR Description: F1K23.11 [Arabidopsis thaliana]
  misc_feature (145)..(293): Homolog of NCBI NO: 15218760 NR Description: hypothetical protein; protein id: At1g28690.1
  misc_feature (74)..(155): Homolog of NCBI NO: 15218760 NR Description: hypothetical protein; protein id: At1g28690.1
  misc_feature (145)..(294): Homolog of NCBI NO: 21536907 NR Description: regulatory protein [Arabidopsis thaliana]
MTSYNNSSGSLALAVALLFAGALYIYFSSRSASDPISGLLQNVNTRLIQYPVDELETVLDKASTGNNKTVIIAMVNKAYVEEDGGGRTMLDLFLESFWEGEGTRPLLNHLMVVAADQTAYDRCLFRRLHCYKMDTEGVDLEGEKDTDVMWLRSPLSRLNVSLDMHISVDRNNVRGQLINTGFYHARSNNKTISLFQKWYDMRLKSLGMKEQDVLKNLLDSGFFNQLGLNVGFLSTAEFSGFCQDSPDMGAVTTVHANCCVHIPAKISDLSLALRDWKRYKASRVNSRWSPHVECRRSWKDVHYVPKL

SEQ ID NO: 83058 - protein, 234 aa, Arabidopsis thaliana
  peptide (1)..(234): Ceres Seq. ID no. 12668524
  misc_feature (1)..(234): Homolog of NCBI NO: 15218762 NR Description: hypothetical protein common family; protein id:
  misc_feature (1)..(93): Homolog of NCBI NO: 25372968 NR Description: protein F1K23.10 [imported] - Arabidopsis >gi|10764853|gb|AAG22833.1|AC007508_6 F1K23.10 [Arabidopsis
  misc_feature (72)..(234): Homolog of NCBI NO: 25372968 NR Description: protein F1K23.10 [imported] - Arabidopsis >gi|10764853|gb|AAG22833.1|AC007508_6 F1K23.10 [Arabidopsis
  misc_feature (51)..(234): Homolog of NCBI NO: 18396892 NR Description: expressed protein; protein id: At1g28710.1, by cDNA: gi_15027990, supported by cDNA: gi_20259204 [Arabidopsis >gi|10764852|gb|AAG22832.1|AC007508_5 F1K23.9 [Arabidopsis
  misc_feature (1)..(82): Homolog of NCBI NO: 18396892 NR Description: expressed protein; protein id: At1g28710.1, by cDNA: gi_15027990, supported by cDNA: gi_20259204 [Arabidopsis >gi|10764852|gb|AAG22832.1|AC007508_5 F1K23.9 [Arabidopsis
  misc_feature (1)..(82): Homolog of NCBI NO: 6691205 NR Description: F1K23.11 [Arabidopsis thaliana]
  misc_feature (72)..(221): Homolog of NCBI NO: 6691205 NR Description: F1K23.11 [Arabidopsis thaliana]
  misc_feature (72)..(220): Homolog of NCBI NO: 15218760 NR Description: hypothetical protein; protein id: At1g28690.1
  misc_feature (1)..(82): Homolog of NCBI NO: 15218760 NR Description: hypothetical protein; protein id: At1g28690.1
  misc_feature (72)..(221): Homolog of NCBI NO: 21536907 NR Description: regulatory protein [Arabidopsis thaliana]
MVNKAYVEEDGGGRTMLDLFLESFWEGEGTRPLLNHLMVVAADQTAYDRCLFRRLHCYKMDTEGVDLEGEKDTDVMWLRSPLSRLNVSLDMHISVDRNNVRGQLINTGFYHARSNNKTISLFQKWYDMRLKSLGMKEQDVLKNLLDSGFFNQLGLNVGFLSTAEFSGFCQDSPDMGAVTTVHANCCVHIPAKISDLSLALRDWKRYKASRVNSRWSPHVECRRSWKDVHYVPKL

SEQ ID NO: 83059 - protein, 219 aa, Arabidopsis thaliana
  peptide (1)..(219): Ceres Seq. ID no. 12668525
  misc_feature (1)..(219): Homolog of NCBI NO: 15218762 NR Description: hypothetical protein common family; protein id:
  misc_feature (1)..(78): Homolog of NCBI NO: 25372968 NR Description: protein F1K23.10 [imported] - Arabidopsis >gi|10764853|gb|AAG22833.1|AC007508_6 F1K23.10 [Arabidopsis
  misc_feature (57)..(219): Homolog of NCBI NO: 25372968 NR Description: protein F1K23.10 [imported] - Arabidopsis >gi|10764853|gb|AAG22833.1|AC007508_6 F1K23.10 [Arabidopsis
  misc_feature (36)..(219): Homolog of NCBI NO: 18396892 NR Description: expressed protein; protein id: At1g28710.1, by cDNA: gi_15027990, supported by cDNA: gi_20259204 [Arabidopsis >gi|10764852|gb|AAG22832.1|AC007508_5 F1K23.9 [Arabidopsis
  misc_feature (1)..(67): Homolog of NCBI NO: 18396892 NR Description: expressed protein; protein id: At1g28710.1, by cDNA: gi_15027990, supported by cDNA: gi_20259204 [Arabidopsis >gi|10764852|gb|AAG22832.1|AC007508_5 F1K23.9 [Arabidopsis
  misc_feature (1)..(67): Homolog of NCBI NO: 6691205 NR Description: F1K23.11 [Arabidopsis thaliana]
  misc_feature (57)..(206): Homolog of NCBI NO: 6691205 NR Description: F1K23.11 [Arabidopsis thaliana]
  misc_feature (57)..(205): Homolog of NCBI NO: 15218760 NR Description: hypothetical protein; protein id: At1g28690.1
  misc_feature (1)..(67): Homolog of NCBI NO: 15218760 NR Description: hypothetical protein; protein id: At1g28690.1
  misc_feature (57)..(206): Homolog of NCBI NO: 21536907 NR Description: regulatory protein [Arabidopsis thaliana]
MLDLFLESFWEGEGTRPLLNHLMVVAADQTAYDRCLFRRLHCYKMDTEGVDLEGEKDTDVMWLRSPLSRLNVSLDMHISVDRNNVRGQLINTGFYHARSNNKTISLFQKWYDMRLKSLGMKEQDVLKNLLDSGFFNQLGLNVGFLSTAEFSGFCQDSPDMGAVTTVHANCCVHIPAKISDLSLALRDWKRYKASRVNSRWSPHVECRRSWKDVHYVPKL

SEQ ID NO: 83060 - DNA, 1267 bp, Arabidopsis thaliana
  misc_feature (1)..(1267): Ceres Seq. ID no. 12668526
  misc_feature: MA Experiment ID: 20000264 Result: Up-regulated in Transcription
  misc_feature: MA Experiment 20000264 PARAMETER Experiment Name: At_Open_Flower_P Parameter: Age (day) Value: 21
  misc_feature: MA Experiment 20000264 PARAMETER Experiment Name: At_Open_Flower_P Parameter: Plant Line Value: WS
  misc_feature: MA Experiment 20000264 PARAMETER Experiment Name: At_Open_Flower_P Parameter: Tissue Value: Open Flower vs. Whole Plant
  misc_feature: MA Experiment ID: 20000265 Result: Up-regulated in Transcription
  misc_feature: MA Experiment 20000265 PARAMETER Experiment Name: At_Open_Flower_P Parameter: Age (day) Value: 21
  misc_feature: MA Experiment 20000265 PARAMETER Experiment Name: At_Open_Flower_P Parameter: Plant Line Value: WS
  misc_feature: MA Experiment 20000265 PARAMETER Experiment Name: At_Open_Flower_P Parameter: Tissue Value: Closed Flower vs. Whole Plant
  misc_feature: MA Experiment ID: 20000286 Result: Up-regulated in Transcription
  misc_feature: MA Experiment 20000286 PARAMETER Experiment Name: At_Open_Flower_P Parameter: Age (day) Value: 21
  misc_feature: MA Experiment 20000286 PARAMETER Experiment Name: At_Open_Flower_P Parameter: Plant Line Value: WS
  misc_feature: MA Experiment 20000286 PARAMETER Experiment Name: At_Open_Flower_P Parameter: Tissue Value: Half Open vs. Whole Plant
  misc_feature: MA Experiment ID: 20000495 Result: Up-regulated in Transcription
  misc_feature: MA Experiment 20000495 PARAMETER Experiment Name: At_Guard_Cells_P Parameter: Harvest Date Value: 8/2/2002
  misc_feature: MA Experiment 20000495 PARAMETER Experiment Name: At_Guard_Cells_P Parameter: Organism Value: A. thaliana
  misc_feature: MA Experiment 20000495 PARAMETER Experiment Name: At_Guard_Cells_P Parameter: Tissue Value: Guard Cells vs. Leaves
  misc_feature: MA Experiment ID: 20001451 Result: Down-regulated in Transcription
  misc_feature: MA Experiment 20001451 PARAMETER Experiment Name: At_Far-red-induction_P Parameter: Age (day) Value: 7
  misc_feature: MA Experiment 20001451 PARAMETER Experiment Name: At_Far-red-induction_P Parameter: Light Value: Far-red vs. White
  misc_feature: MA Experiment 20001451 PARAMETER Experiment Name: At_Far-red-induction_P Parameter: Organism Value: A. thaliana
  misc_feature: MA Experiment 20001451 PARAMETER Experiment Name: At_Far-red-induction_P Parameter: Plant Line Value: Columbia
  misc_feature: MA Experiment 20001451 PARAMETER Experiment Name: At_Far-red-induction_P Parameter: Timepoint (hr) Value: 24
  misc_feature: MA Experiment 20001451 PARAMETER Experiment Name: At_Far-red-induction_P Parameter: Tissue Value: Whole Plant
aaagggcacataaaataggtgagtctcctaaacatgccttccttcaactcctccggcaatctcgcggtggccgttgctcttctctttgcgggcgccttatatttctatttctcatcaattacggtttctgatcctatgtccgatctactacacaatgtcgaaactagatggacagagtatcctgtggacgagctagaggcggtcctagacaaggcagcaatgggaaacaacaaaacggtgattatagcaatggtgaacaaagcttacgtggaggaggttgaaggagggaggacaatgctggatctgtttttggagagtttttgggaaggagagggtactcggccgcttcttgaccatctgatgctagtggcagcggatcagacttcctacgatcgttgcctcttcaggaggctccactgctacaagatggataccgatggggttgacttggagggagagaaggtatatatgtcaaaagatttcattgagatgatgtggcggaggactcacttgctcctagacgtcctcagccgcggctacaatcttactttcacggacacggacgtgatgtggctaaggagcccttttccccgactaagctacaacgagagcttggatatgcagataagcgtggacagtattggcctggttggaggacacttgatcaacacgggattctaccacgtcaggtccaacaacaagaccatctccctcttccagaaatggtacgacatgaggctcaagtcgacgggcatgaaggaacaagatgtccttaagagtctcctagactctggtttctttaaccagcttggcctcaacgttggcttcctcaacactaccgaattcagtggcttctgccaagacagccatgacatgggcgttgtcaccaccgtccatgccaactgttgccgccacatccttgctaagatctctgatctaactcttgttcttcgtgactggaaacgctacaaagcctcccatgtcaacagcaattggagcccccatgttgagtgcgggcgttcatggagtgacactcactatatccccaagctctgaccttcttcgttcatatatgccaattaatgagattgctatagtatacacaacttcatcatctattaactgcatatgttcttcagattaatcctagctagctagaggaacaattctcttttgacaagtaattacaaaacatcatatatgtgtgttacaaccagattgtttttcgctcttcgttacagctacccaaataattgctgataattct

SEQ ID NO: 83061 - protein, 340 aa, Arabidopsis thaliana
  peptide (1)..(340): Ceres Seq. ID no. 12668527
  misc_feature (1)..(340): Homolog of NCBI NO: 18396892 NR Description: expressed protein; protein id: At1g28710.1, by cDNA: gi_15027990, supported by cDNA: gi_20259204 [Arabidopsis >gi|10764852|gb|AAG22832.1|AC007508_5 F1K23.9 [Arabidopsis
  misc_feature (1)..(340): Homolog of NCBI NO: 25372968 NR Description: protein F1K23.10 [imported] - Arabidopsis >gi|10764853|gb|AAG22833.1|AC007508_6 F1K23.10 [Arabidopsis
  misc_feature (154)..(340): Homolog of NCBI NO: 15218762 NR Description: hypothetical protein common family; protein id:
  misc_feature (1)..(160): Homolog of NCBI NO: 15218762 NR Description: hypothetical protein common family; protein id:
  misc_feature (1)..(340): Homolog of NCBI NO: 6691205 NR Description: F1K23.11 [Arabidopsis thaliana]
  misc_feature (73)..(326): Homolog of NCBI NO: 15218760 NR Description: hypothetical protein; protein id: At1g28690.1
  misc_feature (10)..(312): Homolog of NCBI NO: 15223826 NR Description: hypothetical protein common family; protein id:
  misc_feature (10)..(327): Homolog of NCBI NO: 15235236 NR Description: hypothetical protein common family; protein id:
  misc_feature (47)..(327): Homolog of NCBI NO: 21536907 NR Description: regulatory protein [Arabidopsis thaliana]
  misc_feature (53)..(332): Homolog of NCBI NO: 18395292 NR Description: unknown protein; protein id: At2g02060.1
MPSFNSSGNLAVAVALLFAGALYFYFSSITVSDPMSDLLHNVETRWTEYPVDELEAVLDKAAMGNNKTVIIAMVNKAYVEEVEGGRTMLDLFLESFWEGEGTRPLLDHLMLVAADQTSYDRCLFRRLHCYKMDTDGVDLEGEKVYMSKDFIEMMWRRTHLLLDVLSRGYNLTFTDTDVMWLRSPFPRLSYNESLDMQISVDSIGLVGGHLINTGFYHVRSNNKTISLFQKWYDMRLKSTGMKEQDVLKSLLDSGFFNQLGLNVGFLNTTEFSGFCQDSHDMGVVTTVHANCCRHILAKISDLTLVLRDWKRYKASHVNSNWSPHVECGRSWSDTHYIPKL

SEQ ID NO: 83062 - protein, 306 aa, Arabidopsis thaliana
  peptide (1)..(306): Ceres Seq. ID no. 12668528
  misc_feature (1)..(306): Homolog of NCBI NO: 18396892 NR Description: expressed protein; protein id: At1g28710.1, by cDNA: gi_15027990, supported by cDNA: gi_20259204 [Arabidopsis >gi|10764852|gb|AAG22832.1|AC007508_5 F1K23.9 [Arabidopsis
  misc_feature (1)..(306): Homolog of NCBI NO: 25372968 NR Description: protein F1K23.10 [imported] - Arabidopsis >gi|10764853|gb|AAG22833.1|AC007508_6 F1K23.10 [Arabidopsis
  misc_feature (120)..(306): Homolog of NCBI NO: 15218762 NR Description: hypothetical protein common family; protein id:
  misc_feature (1)..(126): Homolog of NCBI NO: 15218762 NR Description: hypothetical protein common family; protein id:
  misc_feature (1)..(306): Homolog of NCBI NO: 6691205 NR Description: F1K23.11 [Arabidopsis thaliana]
  misc_feature (39)..(292): Homolog of NCBI NO: 15218760 NR Description: hypothetical protein; protein id: At1g28690.1
  misc_feature (1)..(278): Homolog of NCBI NO: 15223826 NR Description: hypothetical protein common family; protein id:
  misc_feature (1)..(293): Homolog of NCBI NO: 15235236 NR Description: hypothetical protein common family; protein id:
  misc_feature (13)..(293): Homolog of NCBI NO: 21536907 NR Description: regulatory protein [Arabidopsis thaliana]
  misc_feature (19)..(298): Homolog of NCBI NO: 18395292 NR Description: unknown protein; protein id: At2g02060.1
MSDLLHNVETRWTEYPVDELEAVLDKAAMGNNKTVIIAMVNKAYVEEVEGGRTMLDLFLESFWEGEGTRPLLDHLMLVAADQTSYDRCLFRRLHCYKMDTDGVDLEGEKVYMSKDFIEMMWRRTHLLLDVLSRGYNLTFTDTDVMWLRSPFPRLSYNESLDMQISVDSIGLVGGHLINTGFYHVRSNNKTISLFQKWYDMRLKSTGMKEQDVLKSLLDSGFFNQLGLNVGFLNTTEFSGFCQDSHDMGVVTTVHANCCRHILAKISDLTLVLRDWKRYKASHVNSNWSPHVECGRSWSDTHYIPKL

SEQ ID NO: 83063 - protein, 278 aa, Arabidopsis thaliana
  peptide (1)..(278): Ceres Seq. ID no. 12668529
  misc_feature (1)..(278): Homolog of NCBI NO: 18396892 NR Description: expressed protein; protein id: At1g28710.1, by cDNA: gi_15027990, supported by cDNA: gi_20259204 [Arabidopsis >gi|10764852|gb|AAG22832.1|AC007508_5 F1K23.9 [Arabidopsis
  misc_feature (1)..(278): Homolog of NCBI NO: 25372968 NR Description: protein F1K23.10 [imported] - Arabidopsis >gi|10764853|gb|AAG22833.1|AC007508_6 F1K23.10 [Arabidopsis
  misc_feature (92)..(278): Homolog of NCBI NO: 15218762 NR Description: hypothetical protein common family; protein id:
  misc_feature (1)..(98): Homolog of NCBI NO: 15218762 NR Description: hypothetical protein common family; protein id:
  misc_feature (1)..(278): Homolog of NCBI NO: 6691205 NR Description: F1K23.11 [Arabidopsis thaliana]
  misc_feature (11)..(264): Homolog of NCBI NO: 15218760 NR Description: hypothetical protein; protein id: At1g28690.1
  misc_feature (1)..(250): Homolog of NCBI NO: 15223826 NR Description: hypothetical protein common family; protein id:
  misc_feature (1)..(265): Homolog of NCBI NO: 15235236 NR Description: hypothetical protein common family; protein id:
  misc_feature (1)..(265): Homolog of NCBI NO: 21536907 NR Description: regulatory protein [Arabidopsis thaliana]
  misc_feature (1)..(270): Homolog of NCBI NO: 18395292 NR Description: unknown protein; protein id: At2g02060.1
MGNNKTVIIAMVNKAYVEEVEGGRTMLDLFLESFWEGEGTRPLLDHLMLVAADQTSYDRCLFRRLHCYKMDTDGVDLEGEKVYMSKDFIEMMWRRTHLLLDVLSRGYNLTFTDTDVMWLRSPFPRLSYNESLDMQISVDSIGLVGGHLINTGFYHVRSNNKTISLFQKWYDMRLKSTGMKEQDVLKSLLDSGFFNQLGLNVGFLNTTEFSGFCQDSHDMGVVTTVHANCCRHILAKISDLTLVLRDWKRYKASHVNSNWSPHVECGRSWSDTHYIPKL

SEQ ID NO: 83064 - DNA, 864 bp, Arabidopsis thaliana
  misc_feature (1)..(864): Ceres Seq. ID no. 12668530
  misc_feature: MA Experiment ID: 20000314 Result: Up-regulated in Transcription
  misc_feature: MA Experiment 20000314 PARAMETER Experiment Name: At_14day_Shoots-Roots_Sub_P Parameter: Age (day) Value: 14
  misc_feature: MA Experiment 20000314 PARAMETER Experiment Name: At_14day_Shoots-Roots_Sub_P Parameter: Organism Value: A. thaliana
  misc_feature: MA Experiment 20000314 PARAMETER Experiment Name: At_14day_Shoots-Roots_Sub_P Parameter: Plant Line Value: WS
  misc_feature: MA Experiment 20000314 PARAMETER Experiment Name: At_14day_Shoots-Roots_Sub_P Parameter: Tissue Value: Roots vs. Whole Plant
  misc_feature: MA Experiment ID: 20000327 Result: Down-regulated in Transcription
  misc_feature: MA Experiment 20000327 PARAMETER Experiment Name: At_42deg_Heat_Sub_P Parameter: Age (day) Value: 14
  misc_feature: MA Experiment 20000327 PARAMETER Experiment Name: At_42deg_Heat_Sub_P Parameter: Organism Value: A. thaliana
  misc_feature: MA Experiment 20000327 PARAMETER Experiment Name: At_42deg_Heat_Sub_P Parameter: Plant Line Value: WS
  misc_feature: MA Experiment 20000327 PARAMETER Experiment Name: At_42deg_Heat_Sub_P Parameter: Temperature (deg C) Value: 42 vs. 22
  misc_feature: MA Experiment 20000327 PARAMETER Experiment Name: At_42deg_Heat_Sub_P Parameter: Timepoint (hr) Value: 1
  misc_feature: MA Experiment 20000327 PARAMETER Experiment Name: At_42deg_Heat_Sub_P Parameter: Tissue Value: Aerial
  misc_feature: MA Experiment ID: 20000328 Result: Down-regulated in Transcription
  misc_feature: MA Experiment 20000328 PARAMETER Experiment Name: At_42deg_Heat_Sub_P Parameter: Age (day) Value: 14
  misc_feature: MA Experiment 20000328 PARAMETER Experiment Name: At_42deg_Heat_Sub_P Parameter: Organism Value: A. thaliana
  misc_feature: MA Experiment 20000328 PARAMETER Experiment Name: At_42deg_Heat_Sub_P Parameter: Plant Line Value: WS
  misc_feature: MA Experiment 20000328 PARAMETER Experiment Name: At_42deg_Heat_Sub_P Parameter: Temperature (deg C) Value: 42 vs. 22
  misc_feature: MA Experiment 20000328 PARAMETER Experiment Name: At_42deg_Heat_Sub_P Parameter: Timepoint (hr) Value: 6
  misc_feature: MA Experiment 20000328 PARAMETER Experiment Name: At_42deg_Heat_Sub_P Parameter: Tissue Value: Aerial
  misc_feature: MA Experiment ID: 20000347 Result: Down-regulated in Transcription
  misc_feature: MA Experiment 20000347 PARAMETER Experiment Name: At_2mM_SA_Sub_P Parameter: Age (day) Value: 14
  misc_feature: MA Experiment 20000347 PARAMETER Experiment Name: At_2mM_SA_Sub_P Parameter: Organism Value: A. thaliana
  misc_feature: MA Experiment 20000347 PARAMETER Experiment Name: At_2mM_SA_Sub_P Parameter: Plant Line Value: WS
  misc_feature: MA Experiment 20000347 PARAMETER Experiment Name: At_2mM_SA_Sub_P Parameter: Timepoint (hr) Value: 6
  misc_feature: MA Experiment 20000347 PARAMETER Experiment Name: At_2mM_SA_Sub_P Parameter: Tissue Value: Aerial
  misc_feature: MA Experiment 20000347 PARAMETER Experiment Name: At_2mM_SA_Sub_P Parameter: Treatment Value: 2mM SA vs. No Treatment
  misc_feature: MA Experiment ID: 20000355 Result: Up-regulated in Transcription
  misc_feature: MA Experiment 20000355 PARAMETER Experiment Name: At_Siliques_Sub_P Parameter: Age (day) Value: 21
  misc_feature: MA Experiment 20000355 PARAMETER Experiment Name: At_Siliques_Sub_P Parameter: Organism Value: A. thaliana
  misc_feature: MA Experiment 20000355 PARAMETER Experiment Name: At_Siliques_Sub_P Parameter: Plant Line Value: WS
  misc_feature: MA Experiment 20000355 PARAMETER Experiment Name: At_Siliques_Sub_P Parameter: Tissue Value: Less Than 5mm Siliques vs. Whole Plant
  misc_feature: MA Experiment ID: 20000440 Result: Up-regulated in Transcription
  misc_feature: MA Experiment 20000440 PARAMETER Experiment Name: At_Closed-Flower__Sub_P Parameter: Tissue Value: Closed Flower vs. Whole Plant
atgggagaggaagaagaaaagaaagagaaaggcgatgaaatcatcacggccgtttacaaggttcaccttcactgccggaaatgtgcatgcgacatcaaaaagcctctccttcgattccaaggggttcaaaatgtggactttgatttggagaagaacgagatcaaagtaaaagggaaaatagaagtcgtgaagattcacaaacaaatcgagaaatggagcaagaaaaaagttgagctcatctctcccaaaccttctgaggttaagaaaaccaccactacaacaacaactacttctgtggtagaaaagaagaccaccgagattaaaaaggacgttattcgtacgacagtactaaaggtacacattcattgcgcacagtgtgacaaagatcttcagcacaaactcttgaaacataaagctatccacattgtcaaaaccgatacaaaggcgcaaactctaacggtacaagggacgatagaatccgcaaaactcttagcctatataaagaagaaagttcacaaacatgcagagatcataagctcaaagaccgaagaagagaagaagaaggaagaagaggataagaagaagaaggaagaagaggataagaagaagaaggaagatgagaagaagaaagaggaagagaagaagaaagaagaggagaataagaagaaggaaggagaaaaaaagaaagaagaagtaaaagtagaagtaacaaccaaaacgattactcaagttgtggagtataaagagatagtaaaagttgagggccaaaaagataaagatggaaacataccttactttgtccactacgtatacgctccacaattgttcagtgatgaaaaccctaatgcttgtcgcattgtctag

SEQ ID NO: 83065 - protein, 287 aa, Arabidopsis thaliana
  peptide (1)..(287): Ceres Seq. ID no. 12668531
  misc_feature (17)..(79): Pfam Name: Heavy-metal-associated domain Pfam Description: Heavy-metal-associated domain
  misc_feature (1)..(287): Homolog of NCBI NO: 15218784 NR Description: hypothetical protein; protein id: At1g29000.1 thaliana] >gi|10764865|gb|AAF24557.2|AC007508_20 F1K23.4
  misc_feature (18)..(287): Homolog of NCBI NO: 4097547 NR Description: ATFP3 [Arabidopsis thaliana]
  misc_feature (18)..(287): Homolog of NCBI NO: 9758294 NR Description: contains similarity to ATFP3~gene_id:MLE2.16
  misc_feature (18)..(287): Homolog of NCBI NO: 18424719 NR Description: copper chaperone (CCH)-related; protein id: supported by cDNA: gi_13430829, supported by cDNA: gi_15810596 thaliana] >gi|13430830|gb|AAK26037.1|AF360327_1 unknown protein
  misc_feature (18)..(235): Homolog of NCBI NO: 38344582 NR Description: OSJNBa0053B21.14 [Oryza sativa (japonica
  misc_feature (3)..(286): Homolog of NCBI NO: 21594005 NR Description: unknown [Arabidopsis thaliana]
  misc_feature (3)..(286): Homolog of NCBI NO: 18420811 NR Description: expressed protein; protein id: At5g24580.1, by cDNA: 6393., supported by cDNA: gi_18175600 [Arabidopsis >gi|10177858|dbj|BAB11210.1| gene_id:K18P6.11~unknown protein
  misc_feature (3)..(216): Homolog of NCBI NO: 37532382 NR Description: putative ATFP3 [Oryza sativa (japonica
  misc_feature (10)..(258): Homolog of NCBI NO: 38346717 NR Description: OSJNBa0086O06.15 [Oryza sativa (japonica
  misc_feature (5)..(197): Homolog of NCBI NO: 22327990 NR Description: expressed protein; protein id: At5g60800.1 thaliana] >gi|10176908|dbj|BAB10101.1| to unknown protein [Arabidopsis thaliana]
MGEEEEKKEKGDEIITAVYKVHLHCRKCACDIKKPLLRFQGVQNVDFDLEKNEIKVKGKIEVVKIHKQIEKWSKKKVELISPKPSEVKKTTTTTTTTSVVEKKTTEIKKDVIRTTVLKVHIHCAQCDKDLQHKLLKHKAIHIVKTDTKAQTLTVQGTIESAKLLAYIKKKVHKHAEIISSKTEEEKKKEEEDKKKKEEEDKKKKEDEKKKEEEKKKEEENKKKEGEKKKEEVKVEVTTKTITQVVEYKEIVKVEGQKDKDGNIPYFVHYVYAPQLFSDENPNACRIV

SEQ ID NO: 83066 - DNA, 1041 bp, Arabidopsis thaliana
  misc_feature (1)..(1041): Ceres Seq. ID no. 12668532
  misc_feature: MA Experiment ID: 20000179 Result: Up-regulated in Transcription
  misc_feature: MA Experiment 20000179 PARAMETER Experiment Name: At_Germinating_Seeds_P Parameter: Age (hr) Value: 6 vs. 0
  misc_feature: MA Experiment 20000179 PARAMETER Experiment Name: At_Germinating_Seeds_P Parameter: Tissue Value: Germinating Seeds
  misc_feature: MA Experiment ID: 20000180 Result: Up-regulated in Transcription
  misc_feature: MA Experiment 20000180 PARAMETER Experiment Name: At_Germinating_Seeds_P Parameter: Age (hr) Value: 24 vs. 0
  misc_feature: MA Experiment 20000180 PARAMETER Experiment Name: At_Germinating_Seeds_P Parameter: Tissue Value: Germinating Seeds
atggacttcgtagagtttgtgtgtgttgttctaaccatatttttcatggatctaaagatctctgaagctacatctcgtgtcgctttgtacaagccatcatccattgttgattaccaccagcaatggatgattcaattttctcgagtttatgacgatgaatttgagaaacagttgaggcttcaagtgctcacggaaaatttgaaattcattgagagcttcaataatatggggaatcaaagctacaaacttggtgttaacgagttcacagattggactaaagaggagttccttgccacctacaccggtctcagaggcgttaatgtaacttcaccattcgaagtggttaatgaaacgaagccagcttggaattggaccgtcagtgatgtccttggcacgaacaaagattggagaaacgaaggagccgtaacacctgtgaaatcccaaggagaatgtggaggttgttgggcattctcagcgatagcagcggtggaaggtctgacaaagattgcccgtggaaacctcatatcactatccgaacaacaacttctagattgcaccagagagcagaacaatggttgcaagggaggaacatttgtaaatgctttcaactacataattaaacaccgaggcatttcttcagaaaacgaatacccttaccaagtgaaagagggcccatgccggtccaacgctagacccgccatactaatcagagggttcgaaaacgttccaagcaacaacgagcgtgcgttactcgaagccgtgtcaagacaacctgtcgcagtggccattgatgccagtgaggccggtttcgttcattactctgggggagtgtacaatgcgcggaactgtgggactagtgtaaatcatgcagtgacgctcgttggctacggcacgagcccggaagggatgaagtactggttggctaagaactcttggggtaagacttggggagagaatggttacattagaattcgtagagatgtggagtggcctcaaggcatgtgtggtgtagctcagtatgcttcttatccggttgcgtaa

SEQ ID NO: 83067 - protein, 346 aa, Arabidopsis thaliana
  peptide (1)..(346): Ceres Seq. ID no. 12668533
  misc_feature (130)..(345): Pfam Name: Papain family cysteine protease Pfam Description: Papain family cysteine protease
  misc_feature (1)..(346): Homolog of NCBI NO: 18396939 NR Description: cysteine protease; protein id: At1g29080.1
  misc_feature (1)..(346): Homolog of NCBI NO: 30690594 NR Description: cysteine proteinase [Arabidopsis thaliana]
  misc_feature (16)..(346): Homolog of NCBI NO: 25289991 NR Description: cysteine proteinase (EC 3.4.22.-) [similarity] - thaliana >gi|9502421|gb|AAF88120.1|AC021043_13 Putative cysteine
  misc_feature (1)..(346): Homolog of NCBI NO: 18403438 NR Description: cysteine proteinase; protein id: At2g34080.1
  misc_feature (164)..(345): Homolog of NCBI NO: 25289992 NR Description: probable cysteine proteinase [imported] - thaliana >gi|9502426|gb|AAF88125.1|AC021043_18 Putative cysteine
  misc_feature (4)..(151): Homolog of NCBI NO: 25289992 NR Description: probable cysteine proteinase [imported] - thaliana >gi|9502426|gb|AAF88125.1|AC021043_18 Putative cysteine
  misc_feature (4)..(345): Homolog of NCBI NO: 18396952 NR Description: cysteine proteinase; protein id: At1g29110.1
  misc_feature (7)..(346): Homolog of NCBI NO: 18401420 NR Description: cysteine proteinase; protein id: At2g27420.1, by cDNA: gi_17381153, supported by cDNA: gi_20465848 [Arabidopsis >gi|25289995|pir||F84672 probable cysteine proteinase cysteine
  misc_feature (11)..(346): Homolog of NCBI NO: 18408828 NR Description: cysteine protease; protein id: At3g49340.1
  misc_feature (9)..(346): Homolog of NCBI NO: 37780051 NR Description: cysteine protease 12 [Trifolium repens]
MDFVEFVCVVLTIFFMDLKISEATSRVALYKPSSIVDYHQQWMIQFSRVYDDEFEKQLRLQVLTENLKFIESFNNMGNQSYKLGVNEFTDWTKEEFLATYTGLRGVNVTSPFEVVNETKPAWNWTVSDVLGTNKDWRNEGAVTPVKSQGECGGCWAFSAIAAVEGLTKIARGNLISLSEQQLLDCTREQNNGCKGGTFVNAFNYIIKHRGISSENEYPYQVKEGPCRSNARPAILIRGFENVPSNNERALLEAVSRQPVAVAIDASEAGFVHYSGGVYNARNCGTSVNHAVTLVGYGTSPEGMKYWLAKNSWGKTWGENGYIRIRRDVEWPQGMCGVAQYASYPVA

SEQ ID NO: 83068 - protein, 331 aa, Arabidopsis thaliana
  peptide (1)..(331): Ceres Seq. ID no. 12668534
  misc_feature (115)..(330): Pfam Name: Papain family cysteine protease Pfam Description: Papain family cysteine protease
  misc_feature (1)..(331): Homolog of NCBI NO: 18396939 NR Description: cysteine protease; protein id: At1g29080.1
  misc_feature (1)..(331): Homolog of NCBI NO: 30690594 NR Description: cysteine proteinase [Arabidopsis thaliana]
  misc_feature (1)..(331): Homolog of NCBI NO: 25289991 NR Description: cysteine proteinase (EC 3.4.22.-) [similarity] - thaliana >gi|9502421|gb|AAF88120.1|AC021043_13 Putative cysteine
  misc_feature (1)..(331): Homolog of NCBI NO: 18403438 NR Description: cysteine proteinase; protein id: At2g34080.1
  misc_feature (149)..(330): Homolog of NCBI NO: 25289992 NR Description: probable cysteine proteinase [imported] - thaliana >gi|9502426|gb|AAF88125.1|AC021043_18 Putative cysteine
  misc_feature (1)..(136): Homolog of NCBI NO: 25289992 NR Description: probable cysteine proteinase [imported] - thaliana >gi|9502426|gb|AAF88125.1|AC021043_18 Putative cysteine
  misc_feature (1)..(330): Homolog of NCBI NO: 18396952 NR Description: cysteine proteinase; protein id: At1g29110.1
  misc_feature (1)..(331): Homolog of NCBI NO: 18401420 NR Description: cysteine proteinase; protein id: At2g27420.1, by cDNA: gi_17381153, supported by cDNA: gi_20465848 [Arabidopsis >gi|25289995|pir||F84672 probable cysteine proteinase cysteine
  misc_feature (1)..(331): Homolog of NCBI NO: 18408828 NR Description: cysteine protease; protein id: At3g49340.1
  misc_feature (1)..(331): Homolog of NCBI NO: 37780051 NR Description: cysteine protease 12 [Trifolium repens]
MDLKISEATSRVALYKPSSIVDYHQQWMIQFSRVYDDEFEKQLRLQVLTENLKFIESFNNMGNQSYKLGVNEFTDWTKEEFLATYTGLRGVNVTSPFEVVNETKPAWNWTVSDVLGTNKDWRNEGAVTPVKSQGECGGCWAFSAIAAVEGLTKIARGNLISLSEQQLLDCTREQNNGCKGGTFVNAFNYIIKHRGISSENEYPYQVKEGPCRSNARPAILIRGFENVPSNNERALLEAVSRQPVAVAIDASEAGFVHYSGGVYNARNCGTSVNHAVTLVGYGTSPEGMKYWLAKNSWGKTWGENGYIRIRRDVEWPQGMCGVAQYASYPVA

SEQ ID NO: 83069 - protein, 304 aa, Arabidopsis thaliana
  peptide (1)..(304): Ceres Seq. ID no. 12668535
  misc_feature (88)..(303): Pfam Name: Papain family cysteine protease Pfam Description: Papain family cysteine protease
  misc_feature (1)..(304): Homolog of NCBI NO: 18396939 NR Description: cysteine protease; protein id: At1g29080.1
  misc_feature (1)..(304): Homolog of NCBI NO: 30690594 NR Description: cysteine proteinase [Arabidopsis thaliana]
  misc_feature (1)..(304): Homolog of NCBI NO: 25289991 NR Description: cysteine proteinase (EC 3.4.22.-) [similarity] - thaliana >gi|9502421|gb|AAF88120.1|AC021043_13 Putative cysteine
  misc_feature (1)..(304): Homolog of NCBI NO: 18403438 NR Description: cysteine proteinase; protein id: At2g34080.1
  misc_feature (122)..(303): Homolog of NCBI NO: 25289992 NR Description: probable cysteine proteinase [imported] - thaliana >gi|9502426|gb|AAF88125.1|AC021043_18 Putative cysteine
  misc_feature (1)..(109): Homolog of NCBI NO: 25289992 NR Description: probable cysteine proteinase [imported] - thaliana >gi|9502426|gb|AAF88125.1|AC021043_18 Putative cysteine
  misc_feature (1)..(303): Homolog of NCBI NO: 18396952 NR Description: cysteine proteinase; protein id: At1g29110.1
  misc_feature (1)..(304): Homolog of NCBI NO: 18401420 NR Description: cysteine proteinase; protein id: At2g27420.1, by cDNA: gi_17381153, supported by cDNA: gi_20465848 [Arabidopsis >gi|25289995|pir||F84672 probable cysteine proteinase cysteine
  misc_feature (1)..(304): Homolog of NCBI NO: 18408828 NR Description: cysteine protease; protein id: At3g49340.1
  misc_feature (1)..(304): Homolog of NCBI NO: 37780051 NR Description: cysteine protease 12 [Trifolium repens]
MIQFSRVYDDEFEKQLRLQVLTENLKFIESFNNMGNQSYKLGVNEFTDWTKEEFLATYTGLRGVNVTSPFEVVNETKPAWNWTVSDVLGTNKDWRNEGAVTPVKSQGECGGCWAFSAIAAVEGLTKIARGNLISLSEQQLLDCTREQNNGCKGGTFVNAFNYIIKHRGISSENEYPYQVKEGPCRSNARPAILIRGFENVPSNNERALLEAVSRQPVAVAIDASEAGFVHYSGGVYNARNCGTSVNHAVTLVGYGTSPEGMKYWLAKNSWGKTWGENGYIRIRRDVEWPQGMCGVAQYASYPVA

SEQ ID NO: 83070 - DNA, 1215 bp, Arabidopsis thaliana
  misc_feature (1)..(1215): Ceres Seq. ID no. 12668548
  misc_feature: MA Experiment ID: 20000171 Result: Up-regulated in Transcription
  misc_feature: MA Experiment 20000171 PARAMETER Experiment Name: At_42deg_Heat_P Parameter: Age (day) Value: 14
  misc_feature: MA Experiment 20000171 PARAMETER Experiment Name: At_42deg_Heat_P Parameter: Organism Value: A. thaliana
  misc_feature: MA Experiment 20000171 PARAMETER Experiment Name: At_42deg_Heat_P Parameter: Plant Line Value: WS
  misc_feature: MA Experiment 20000171 PARAMETER Experiment Name: At_42deg_Heat_P Parameter: Temperature (deg C) Value: 42 vs. 22
  misc_feature: MA Experiment 20000171 PARAMETER Experiment Name: At_42deg_Heat_P Parameter: Timepoint (hr) Value: 1
  misc_feature: MA Experiment 20000171 PARAMETER Experiment Name: At_42deg_Heat_P Parameter: Tissue Value: Aerial
  misc_feature: MA Experiment ID: 20000173 Result: Up-regulated in Transcription
  misc_feature: MA Experiment 20000173 PARAMETER Experiment Name: At_42deg_Heat_P Parameter: Age (day) Value: 14
  misc_feature: MA Experiment 20000173 PARAMETER Experiment Name: At_42deg_Heat_P Parameter: Organism Value: A. thaliana
  misc_feature: MA Experiment 20000173 PARAMETER Experiment Name: At_42deg_Heat_P Parameter: Plant Line Value: WS
  misc_feature: MA Experiment 20000173 PARAMETER Experiment Name: At_42deg_Heat_P Parameter: Temperature (deg C) Value: 42 vs. 22
  misc_feature: MA Experiment 20000173 PARAMETER Experiment Name: At_42deg_Heat_P Parameter: Timepoint (hr) Value: 6
  misc_feature: MA Experiment 20000173 PARAMETER Experiment Name: At_42deg_Heat_P Parameter: Tissue Value: Aerial
  misc_feature: MA Experiment ID: 20000180 Result: Up-regulated in Transcription
  misc_feature: MA Experiment 20000180 PARAMETER Experiment Name: At_Germinating_Seeds_P Parameter: Age (hr) Value: 24 vs. 0
  misc_feature: MA Experiment 20000180 PARAMETER Experiment Name: At_Germinating_Seeds_P Parameter: Tissue Value: Germinating Seeds
  misc_feature: MA Experiment ID: 20000227 Result: Up-regulated in Transcription
  misc_feature: MA Experiment 20000227 PARAMETER Experiment Name: At_Root-Tips-vs-Tops_P Parameter: Tissue Value: Root Tips vs. Root Tops
  misc_feature: MA Experiment ID: 20000439 Result: Up-regulated in Transcription
  misc_feature: MA Experiment 20000439 PARAMETER Experiment Name: At_Roots__P Parameter: Age (day) Value: 14 vs. 21
  misc_feature: MA Experiment 20000439 PARAMETER Experiment Name: At_Roots__P Parameter: Organism Value: A. thaliana
  misc_feature: MA Experiment 20000439 PARAMETER Experiment Name: At_Roots__P Parameter: Tissue Value: Roots vs. Whole Plant
  misc_feature: MA Experiment ID: 20000460 Result: Down-regulated in Transcription
  misc_feature: MA Experiment 20000460 PARAMETER Experiment Name: At_10percent_PEG_P Parameter: Age (day) Value: 12
  misc_feature: MA Experiment 20000460 PARAMETER Experiment Name: At_10percent_PEG_P Parameter: Organism Value: A. thaliana
  misc_feature: MA Experiment 20000460 PARAMETER Experiment Name: At_10percent_PEG_P Parameter: Plant Line Value: WS
  misc_feature: MA Experiment 20000460 PARAMETER Experiment Name: At_10percent_PEG_P Parameter: Timepoint (day) Value: 12
  misc_feature: MA Experiment 20000460 PARAMETER Experiment Name: At_10percent_PEG_P Parameter: Tissue Value: Whole Plant
  misc_feature: MA Experiment 20000460 PARAMETER Experiment Name: At_10percent_PEG_P Parameter: Treatment Value: 10percent PEG vs. No Treatment
  misc_feature: MA Experiment ID: 20000527 Result: Down-regulated in Transcription
  misc_feature: MA Experiment 20000527 PARAMETER Experiment Name: At_10percent_PEG_P Parameter: Age (day) Value: 20
  misc_feature: MA Experiment 20000527 PARAMETER Experiment Name: At_10percent_PEG_P Parameter: Organism Value: A. thaliana
  misc_feature: MA Experiment 20000527 PARAMETER Experiment Name: At_10percent_PEG_P Parameter: Plant Line Value: WS
  misc_feature: MA Experiment 20000527 PARAMETER Experiment Name: At_10percent_PEG_P Parameter: Timepoint (day) Value: 20
  misc_feature: MA Experiment 20000527 PARAMETER Experiment Name: At_10percent_PEG_P Parameter: Tissue Value: Whole Plant
  misc_feature: MA Experiment 20000527 PARAMETER Experiment Name: At_10percent_PEG_P Parameter: Treatment Value: 10percent PEG vs. No Treatment
  misc_feature: MA Experiment ID: 20001450 Result: Down-regulated in Transcription
  misc_feature: MA Experiment 20001450 PARAMETER Experiment Name: At_Far-red-induction_P Parameter: Age (day) Value: 7
  misc_feature: MA Experiment 20001450 PARAMETER Experiment Name: At_Far-red-induction_P Parameter: Light Value: Far-red vs. White
  misc_feature: MA Experiment 20001450 PARAMETER Experiment Name: At_Far-red-induction_P Parameter: Organism Value: A. thaliana
  misc_feature: MA Experiment 20001450 PARAMETER Experiment Name: At_Far-red-induction_P Parameter: Plant Line Value: Columbia
  misc_feature: MA Experiment 20001450 PARAMETER Experiment Name: At_Far-red-induction_P Parameter: Timepoint (hr) Value: 8
  misc_feature: MA Experiment 20001450 PARAMETER Experiment Name: At_Far-red-induction_P Parameter: Tissue Value: Whole Plant
atcacaaaacttgcaagtatcattcacaggagagggaagggagagctcatcatacgaaatgaggtcaatcacagctttgtttttccttttctgtttccttgctccttctgctttggcgcagctccgaactgggttctacagccgctcatgcccccgtgccgaatctatcgtggctagtgttgttgccaaccgtttcagaagtgacaagtccattactgcagcatttcttcgtatgcagtttcatgattgctttgtcaggggttgtgatgcttccctcttgatcgacccaagacctggaaggccatcagagaaaagcactggaccaaatgcaagcgtgagaggctacgagatcattgatgaggctaagagacagctcgaggctgcatgtccccgaactgtctcatgcgcagacattgtaactcttgccacaagagactcggtcgcattagctggtggtccaaggttctcagtaccaacaggaagacgtgatggattaaggtcaaaccccaatgatgtgaacttacccggaccaacaattccggttagcgcatctatccaattgtttgcagctcaaggtatgaataccaacgatatggttacacttattggtggtggccacagcgtcggtgttgcacattgcagtctcttccaggacaggctttccgaccgtgcaatggaaccctcattgaagtctagcttgaggaggaaatgcagttcccctaacgacccaacaacgtttttggaccaaaagacttcatttactgtggataacgcaatctatggagagatccgaagacaaagaggaattctaagaattgatcaaaacttgggtcttgatagatcaaccagtgggattgtgtctggttatgcatcaagcaatacactcttcagaaagagatttgccgaagcattggtgaaaatgggtaccattaaggttcttaccggacgttctggagagatcaggagaaactgcagagtcttcaacaactgaggacgttgattcttgcacacattctttacaattattcacggagagatccaaagactgagcggaatcctacgttttttcttttctttgctttttttcttacaaatcaaatcggaaagtgtgtttgttccggtatcatgttttatttttccctaaaaattgattcgcgtgtttcattttcatgaactatatattgttctaatttgatattaacttctttttttggc

SEQ ID NO: 83071 - protein, 329 aa, Arabidopsis thaliana
  peptide (1)..(329): Ceres Seq. ID no. 12668549
  misc_feature (57)..(292): Pfam Name: Peroxidase Pfam Description: Peroxidase
  misc_feature (20)..(329): Homolog of NCBI NO: 18416663 NR Description: peroxidase, putative; protein id: At4g26010.1, by cDNA: gi_15724251, supported by cDNA: gi_16226554, supported cDNA: gi_17530565, supported by cDNA: gi_19699109 [Arabidopsis
  misc_feature (20)..(329): Homolog of NCBI NO: 7433094 NR Description: peroxidase homolog F20B18.120 - Arabidopsis >gi|4538930|emb|CAB39666.1| putative peroxidase [Arabidopsis >gi|7269452|emb|CAB79456.1| putative peroxidase [Arabidopsis
  misc_feature (20)..(329): Homolog of NCBI NO: 15218665 NR Description: peroxidase, putative; protein id: At1g34510.1 thaliana] >gi|25453210|sp|Q9LNL0|PER8_ARATH Peroxidase 8 (Atperox P8) >gi|25285599|pir||A86469 protein F12K21.18
  misc_feature (178)..(329): Homolog of NCBI NO: 25285597 NR Description: probable peroxidase, 81098-80059 [imported] -
  misc_feature (20)..(151): Homolog of NCBI NO: 25285597 NR Description: probable peroxidase, 81098-80059 [imported] -
  misc_feature (178)..(329): Homolog of NCBI NO: 5091615 NR Description: Similar to gb|X98322 peroxidase (prxr10) from
  misc_feature (20)..(152): Homolog of NCBI NO: 5091615 NR Description: Similar to gb|X98322 peroxidase (prxr10) from
  misc_feature (178)..(329): Homolog of NCBI NO: 15218596 NR Description: peroxidase, putative; protein id: At1g34330.1
  misc_feature (20)..(151): Homolog of NCBI NO: 15218596 NR Description: peroxidase, putative; protein id: At1g34330.1
  misc_feature (22)..(328): Homolog of NCBI NO: 15238030 NR Description: peroxidase, putative; protein id: At5g17820.1, by cDNA: 39195. [Arabidopsis thaliana] Peroxidase 57 precursor (Atperox P57) (PRXR10) (ATP13a)
SQNLQVSFTGEGRESSSYEMRSITALFFLFCFLAPSALAQLRTGFYSRSCPRAESIVASVVANRFRSDKSITAAFLRMQFHDCFVRGCDASLLIDPRPGRPSEKSTGPNASVRGYEIIDEAKRQLEAACPRTVSCADIVTLATRDSVALAGGPRFSVPTGRRDGLRSNPNDVNLPGPTIPVSASIQLFAAQGMNTNDMVTLIGGGHSVGVAHCSLFQDRLSDRAMEPSLKSSLRRKCSSPNDPTTFLDQKTSFTVDNAIYGEIRRQRGILRIDQNLGLDRSTSGIVSGYASSNTLFRKRFAEALVKMGTIKVLTGRSGEIRRNCRVFNN

SEQ ID NO: 83072 - protein, 310 aa, Arabidopsis thaliana
  peptide (1)..(310): Ceres Seq. ID no. 12668550
  misc_feature (38)..(273): Pfam Name: Peroxidase Pfam Description: Peroxidase
  misc_feature (1)..(310): Homolog of NCBI NO: 18416663 NR Description: peroxidase, putative; protein id: At4g26010.1, by cDNA: gi_15724251, supported by cDNA: gi_16226554, supported cDNA: gi_17530565, supported by cDNA: gi_19699109 [Arabidopsis
  misc_feature (1)..(310): Homolog of NCBI NO: 7433094 NR Description: peroxidase homolog F20B18.120 - Arabidopsis >gi|4538930|emb|CAB39666.1| putative peroxidase [Arabidopsis >gi|7269452|emb|CAB79456.1| putative peroxidase [Arabidopsis
  misc_feature (1)..(310): Homolog of NCBI NO: 15218665 NR Description: peroxidase, putative; protein id: At1g34510.1 thaliana] >gi|25453210|sp|Q9LNL0|PER8_ARATH Peroxidase 8 (Atperox P8) >gi|25285599|pir||A86469 protein F12K21.18
  misc_feature (159)..(310): Homolog of NCBI NO: 25285597 NR Description: probable peroxidase, 81098-80059 [imported] -
  misc_feature (1)..(132): Homolog of NCBI NO: 25285597 NR Description: probable peroxidase, 81098-80059 [imported] -
  misc_feature (159)..(310): Homolog of NCBI NO: 5091615 NR Description: Similar to gb|X98322 peroxidase (prxr10) from
  misc_feature (1)..(133): Homolog of NCBI NO: 5091615 NR Description: Similar to gb|X98322 peroxidase (prxr10) from
  misc_feature (159)..(310): Homolog of NCBI NO: 15218596 NR Description: peroxidase, putative; protein id: At1g34330.1
  misc_feature (1)..(132): Homolog of NCBI NO: 15218596 NR Description: peroxidase, putative; protein id: At1g34330.1
  misc_feature (3)..(309): Homolog of NCBI NO: 15238030 NR Description: peroxidase, putative; protein id: At5g17820.1, by cDNA: 39195. [Arabidopsis thaliana] Peroxidase 57 precursor (Atperox P57) (PRXR10) (ATP13a)
MRSITALFFLFCFLAPSALAQLRTGFYSRSCPRAESIVASVVANRFRSDKSITAAFLRMQFHDCFVRGCDASLLIDPRPGRPSEKSTGPNASVRGYEIIDEAKRQLEAACPRTVSCADIVTLATRDSVALAGGPRFSVPTGRRDGLRSNPNDVNLPGPTIPVSASIQLFAAQGMNTNDMVTLIGGGHSVGVAHCSLFQDRLSDRAMEPSLKSSLRRKCSSPNDPTTFLDQKTSFTVDNAIYGEIRRQRGILRIDQNLGLDRSTSGIVSGYASSNTLFRKRFAEALVKMGTIKVLTGRSGEIRRNCRVFNN

SEQ ID NO: 83073 - protein, 252 aa, Arabidopsis thaliana
  peptide (1)..(252): Ceres Seq. ID no. 12668551
  misc_feature (1)..(215): Pfam Name: Peroxidase Pfam Description: Peroxidase
  misc_feature (1)..(252): Homolog of NCBI NO: 18416663 NR Description: peroxidase, putative; protein id: At4g26010.1, by cDNA: gi_15724251, supported by cDNA: gi_16226554, supported cDNA: gi_17530565, supported by cDNA: gi_19699109 [Arabidopsis
  misc_feature (1)..(252): Homolog of NCBI NO: 7433094 NR Description: peroxidase homolog F20B18.120 - Arabidopsis >gi|4538930|emb|CAB39666.1| putative peroxidase [Arabidopsis >gi|7269452|emb|CAB79456.1| putative peroxidase [Arabidopsis
  misc_feature (1)..(252): Homolog of NCBI NO: 15218665 NR Description: peroxidase, putative; protein id: At1g34510.1 thaliana] >gi|25453210|sp|Q9LNL0|PER8_ARATH Peroxidase 8 (Atperox P8) >gi|25285599|pir||A86469 protein F12K21.18
  misc_feature (101)..(252): Homolog of NCBI NO: 25285597 NR Description: probable peroxidase, 81098-80059 [imported] -
  misc_feature (1)..(74): Homolog of NCBI NO: 25285597 NR Description: probable peroxidase, 81098-80059 [imported] -
  misc_feature (101)..(252): Homolog of NCBI NO: 5091615 NR Description: Similar to gb|X98322 peroxidase (prxr10) from
  misc_feature (1)..(75): Homolog of NCBI NO: 5091615 NR Description: Similar to gb|X98322 peroxidase (prxr10) from
  misc_feature (101)..(252): Homolog of NCBI NO: 15218596 NR Description: peroxidase, putative; protein id: At1g34330.1
  misc_feature (1)..(74): Homolog of NCBI NO: 15218596 NR Description: peroxidase, putative; protein id: At1g34330.1
  misc_feature (1)..(251): Homolog of NCBI NO: 15238030 NR Description: peroxidase, putative; protein id: At5g17820.1, by cDNA: 39195. [Arabidopsis thaliana] Peroxidase 57 precursor (Atperox P57) (PRXR10) (ATP13a)
MQFHDCFVRGCDASLLIDPRPGRPSEKSTGPNASVRGYEIIDEAKRQLEAACPRTVSCADIVTLATRDSVALAGGPRFSVPTGRRDGLRSNPNDVNLPGPTIPVSASIQLFAAQGMNTNDMVTLIGGGHSVGVAHCSLFQDRLSDRAMEPSLKSSLRRKCSSPNDPTTFLDQKTSFTVDNAIYGEIRRQRGILRIDQNLGLDRSTSGIVSGYASSNTLFRKRFAEALVKMGTIKVLTGRSGEIRRNCRVFNN

SEQ ID NO: 83074 - DNA, 2533 bp, Arabidopsis thaliana
  misc_feature (1)..(2533): Ceres Seq. ID no. 12668568
  misc_feature: MA Experiment ID: 20000315 Result: Down-regulated in Transcription
  misc_feature: MA Experiment 20000315 PARAMETER Experiment Name: At_14day_Shoots-Roots_Sub_P Parameter: Age (day) Value: 14
  misc_feature: MA Experiment 20000315 PARAMETER Experiment Name: At_14day_Shoots-Roots_Sub_P Parameter: Organism Value: A. thaliana
  misc_feature: MA Experiment 20000315 PARAMETER Experiment Name: At_14day_Shoots-Roots_Sub_P Parameter: Plant Line Value: WS
  misc_feature: MA Experiment 20000315 PARAMETER Experiment Name: At_14day_Shoots-Roots_Sub_P Parameter: Tissue Value: Shoots vs. Whole Plant
aacccaataatacccaatacataacattttcggtggaatcttcttttctccacacacaccaaagaaaaaaaaaacatccaaaggtttgcaaataaggaaaaagatggggttaaatttcagggaaaaggcatggatacttctggggattctttgttgttcatctttgatttgttcagttaaagcaattgtcacttacgatcgtaaagctgtgatcatcaatggtcagagaaggatccttctctctggctccattcactacccaagaagcacacctgagatgtggcctgaccttatacaaaaagccaaagatggagggttggatgttatacagacttatgttttctggaatgggcatgaaccttctcctggacaatattattttgaggacagatatgatctagttaagttcatcaaggtggtacaacaagctggtctttacgttcatctcaggattggtccctatgtttgcgctgaatggaactttggagggtttcctgtgtggctcaaatatgttcccggtatggtatttaggaccgacaatgaacctttcaaggctgcaatgcaaaaattcactgagaagattgtgaggatgatgaaagaagaaaaattatttgagactcaaggaggacccatcattctgtcacagatagagaatgagtatggaccaatagagtgggagataggagcaccagggaaggcatacacaaaatgggtagctgaaatggcacaaggactctccactggtgtcccatggattatgtgcaagcaagatgatgctcctaactctattataaacacatgtaatgggttttattgtgagaatttcaaaccaaactcggacaataagccgaaaatgtggacagagaactggactggttggtttacagagtttggaggtgcagtaccatacaggccagccgaagacattgccttatccgtggctcgcttcatacagaacggtggctctttcatcaactattatatgtaccatggaggaaccaacttcgacagaacagccggtgaattcatcgccaccagctatgactatgatgctcctcttgatgaatacgggttaccgagagaacctaagtatagtcacttgaaaaggctgcataaggtcatcaagctctgcgaaccggcattggtctctgctgatcctacagtcacatcactcggggataaacaagaagctcacgtgttcaagtctaagtcatcttgcgctgcttttctctcaaactacaacacaagttctgctgcaagagtcttgtttggcggatctacatatgatctgcctccttggtctgtcagtattctacccgactgcaaaactgagtattacaacactgccaaggtccgtacatcaagcatacacatgaagatggttcctacaaacacaccattctcttggggttcatacaacgaagagattccttctgcaaatgacaatggtaccttttcacaagatgggcttgtggaacagataagtatcaccagagacaagacagactatttctggtatctgacagatattacaatcagtcctgatgaaaagttcctaactggtgaagaccctcttcttactattgggtcagctgggcatgctcttcatgtattcgttaatggccagcttgcaggaactgcatatggatcactggagaagccaaagctaacatttagtcagaagatcaaattacatgcaggggtcaacaaacttgctctattgagtactgcagcgggtctgccgaacgttggcgtgcattatgagacttggaatactggagttcttggcccagtgacactgaatggagttaactccggaacatgggacatgactaaatggaaatggtcttacaagattggtactaagggtgaagctctgagcgttcataccttagccgggagttcaacggtagaatggaaagaaggatcattagtggctaaaaagcagcccttgacctggtacaaggtaagagaaacagaggaatcaatgaatcatgaccaccaacaaagttagatcaatataatgaaaaccgaaatccacagggcagaattttcaccatctctttttgcagtctacttttgactcaccaacaggcaatgaaccattggctttagacatgaacacaatggggaaaggtcaaatgtggataaatgggcagaacatcggacgccactggccagcatatacagctcgtgggaaatgcgaacgctgcagctatgccgggactttcacagagaagaaatgtttgagtaactgtggagaagcttcacaaagatggtaccatgtgcctcgttcatggctgaagccaactaataaccttgtcattgtacttgaagaatggggtggtgaacccaatgggatctctcttgtaaaaagaacagccaaataatagctttctgactccatttttttcaggataaaatctgtttctttgtgacaaatttaaggctctctgcaagtcattgatagaatacagatataaatgtacatataaactgggaattattggctcatatagatgaaaattatctc

SEQ ID NO: 83075 - protein, 636 aa, Arabidopsis thaliana
  peptide (1)..(636): Ceres Seq. ID no. 12668569
  misc_feature (8)..(621): Homolog of NCBI NO: 3869280 NR Description: beta-galactosidase precursor [Carica papaya]
  misc_feature (1)..(621): Homolog of NCBI NO: 1352078 NR Description: Beta-galactosidase precursor (Lactase) (Acid beta-
  misc_feature (1)..(621): Homolog of NCBI NO: 12583687 NR Description: beta-D-galactosidase [Pyrus pyrifolia]
  misc_feature (1)..(621): Homolog of NCBI NO: 20384648 NR Description: beta-galactosidase [Citrus sinensis]
  misc_feature (13)..(621): Homolog of NCBI NO: 14970839 NR Description: beta-galactosidase [Fragaria x ananassa]
  misc_feature (11)..(621): Homolog of NCBI NO: 1352077 NR Description: Beta-galactosidase precursor (Lactase) (Acid beta-
  misc_feature (11)..(621): Homolog of NCBI NO: 4138137 NR Description: ss-galactosidase [Lycopersicon esculentum]
  misc_feature (21)..(621): Homolog of NCBI NO: 15231354 NR Description: glycosyl hydrolase family 35 protein id: At3g13750.1, supported by cDNA: gi_20260595
  misc_feature (21)..(621): Homolog of NCBI NO: 20260596 NR Description: galactosidase, putative [Arabidopsis thaliana]
  misc_feature (24)..(621): Homolog of NCBI NO: 1168654 NR Description: Beta-galactosidase precursor (Lactase)
MGLNFREKAWILLGILCCSSLICSVKAIVTYDRKAVIINGQRRILLSGSIHYPRSTPEMWPDLIQKAKDGGLDVIQTYVFWNGHEPSPGQYYFEDRYDLVKFIKVVQQAGLYVHLRIGPYVCAEWNFGGFPVWLKYVPGMVFRTDNEPFKAAMQKFTEKIVRMMKEEKLFETQGGPIILSQIENEYGPIEWEIGAPGKAYTKWVAEMAQGLSTGVPWIMCKQDDAPNSIINTCNGFYCENFKPNSDNKPKMWTENWTGWFTEFGGAVPYRPAEDIALSVARFIQNGGSFINYYMYHGGTNFDRTAGEFIATSYDYDAPLDEYGLPREPKYSHLKRLHKVIKLCEPALVSADPTVTSLGDKQEAHVFKSKSSCAAFLSNYNTSSAARVLFGGSTYDLPPWSVSILPDCKTEYYNTAKVRTSSIHMKMVPTNTPFSWGSYNEEIPSANDNGTFSQDGLVEQISITRDKTDYFWYLTDITISPDEKFLTGEDPLLTIGSAGHALHVFVNGQLAGTAYGSLEKPKLTFSQKIKLHAGVNKLALLSTAAGLPNVGVHYETWNTGVLGPVTLNGVNSGTWDMTKWKWSYKIGTKGEALSVHTLAGSSTVEWKEGSLVAKKQPLTWYKVRETEESMNHDHQQS

SEQ ID NO: 83076 - protein, 578 aa, Arabidopsis thaliana
  peptide (1)..(578): Ceres Seq. ID no. 12668570
  misc_feature (1)..(563): Homolog of NCBI NO: 3869280 NR Description: beta-galactosidase precursor [Carica papaya]
  misc_feature (1)..(563): Homolog of NCBI NO: 1352078 NR Description: Beta-galactosidase precursor (Lactase) (Acid beta-
  misc_feature (1)..(563): Homolog of NCBI NO: 12583687 NR Description: beta-D-galactosidase [Pyrus pyrifolia]
  misc_feature (1)..(563): Homolog of NCBI NO: 20384648 NR Description: beta-galactosidase [Citrus sinensis]
  misc_feature (1)..(563): Homolog of NCBI NO: 14970839 NR Description: beta-galactosidase [Fragaria x ananassa]
  misc_feature (1)..(563): Homolog of NCBI NO: 1352077 NR Description: Beta-galactosidase precursor (Lactase) (Acid beta-
  misc_feature (1)..(563): Homolog of NCBI NO: 4138137 NR Description: ss-galactosidase [Lycopersicon esculentum]
  misc_feature (1)..(563): Homolog of NCBI NO: 15231354 NR Description: glycosyl hydrolase family 35 protein id: At3g13750.1, supported by cDNA: gi_20260595
  misc_feature (1)..(563): Homolog of NCBI NO: 20260596 NR Description: galactosidase, putative [Arabidopsis thaliana]
  misc_feature (1)..(563): Homolog of NCBI NO: 1168654 NR Description: Beta-galactosidase precursor (Lactase)
MWPDLIQKAKDGGLDVIQTYVFWNGHEPSPGQYYFEDRYDLVKFIKVVQQAGLYVHLRIGPYVCAEWNFGGFPVWLKYVPGMVFRTDNEPFKAAMQKFTEKIVRMMKEEKLFETQGGPIILSQIENEYGPIEWEIGAPGKAYTKWVAEMAQGLSTGVPWIMCKQDDAPNSIINTCNGFYCENFKPNSDNKPKMWTENWTGWFTEFGGAVPYRPAEDIALSVARFIQNGGSFINYYMYHGGTNFDRTAGEFIATSYDYDAPLDEYGLPREPKYSHLKRLHKVIKLCEPALVSADPTVTSLGDKQEAHVFKSKSSCAAFLSNYNTSSAARVLFGGSTYDLPPWSVSILPDCKTEYYNTAKVRTSSIHMKMVPTNTPFSWGSYNEEIPSANDNGTFSQDGLVEQISITRDKTDYFWYLTDITISPDEKFLTGEDPLLTIGSAGHALHVFVNGQLAGTAYGSLEKPKLTFSQKIKLHAGVNKLALLSTAAGLPNVGVHYETWNTGVLGPVTLNGVNSGTWDMTKWKWSYKIGTKGEALSVHTLAGSSTVEWKEGSLVAKKQPLTWYKVRETEESMNHDHQQS

SEQ ID NO: 83077 - protein, 497 aa, Arabidopsis thaliana
  peptide (1)..(497): Ceres Seq. ID no. 12668571
  misc_feature (1)..(482): Homolog of NCBI NO: 3869280 NR Description: beta-galactosidase precursor [Carica papaya]
  misc_feature (1)..(482): Homolog of NCBI NO: 1352078 NR Description: Beta-galactosidase precursor (Lactase) (Acid beta-
  misc_feature (1)..(482): Homolog of NCBI NO: 12583687 NR Description: beta-D-galactosidase [Pyrus pyrifolia]
  misc_feature (1)..(482): Homolog of NCBI NO: 20384648 NR Description: beta-galactosidase [Citrus sinensis]
  misc_feature (1)..(482): Homolog of NCBI NO: 14970839 NR Description: beta-galactosidase [Fragaria x ananassa]
  misc_feature (1)..(482): Homolog of NCBI NO: 1352077 NR Description: Beta-galactosidase precursor (Lactase) (Acid beta-
  misc_feature (1)..(482): Homolog of NCBI NO: 4138137 NR Description: ss-galactosidase [Lycopersicon esculentum]
  misc_feature (1)..(482): Homolog of NCBI NO: 15231354 NR Description: glycosyl hydrolase family 35 protein id: At3g13750.1, supported by cDNA: gi_20260595
  misc_feature (1)..(482): Homolog of NCBI NO: 20260596 NR Description: galactosidase, putative [Arabidopsis thaliana]
  misc_feature (1)..(482): Homolog of NCBI NO: 1168654 NR Description: Beta-galactosidase precursor (Lactase)
MVFRTDNEPFKAAMQKFTEKIVRMMKEEKLFETQGGPIILSQIENEYGPIEWEIGAPGKAYTKWVAEMAQGLSTGVPWIMCKQDDAPNSIINTCNGFYCENFKPNSDNKPKMWTENWTGWFTEFGGAVPYRPAEDIALSVARFIQNGGSFINYYMYHGGTNFDRTAGEFIATSYDYDAPLDEYGLPREPKYSHLKRLHKVIKLCEPALVSADPTVTSLGDKQEAHVFKSKSSCAAFLSNYNTSSAARVLFGGSTYDLPPWSVSILPDCKTEYYNTAKVRTSSIHMKMVPTNTPFSWGSYNEEIPSANDNGTFSQDGLVEQISITRDKTDYFWYLTDITISPDEKFLTGEDPLLTIGSAGHALHVFVNGQLAGTAYGSLEKPKLTFSQKIKLHAGVNKLALLSTAAGLPNVGVHYETWNTGVLGPVTLNGVNSGTWDMTKWKWSYKIGTKGEALSVHTLAGSSTVEWKEGSLVAKKQPLTWYKVRETEESMNHDHQQS

SEQ ID NO: 83078 - DNA, 981 bp, Arabidopsis thaliana
  misc_feature (1)..(981): Ceres Seq. ID no. 12668592
  misc_feature: MA Experiment ID: 20000265 Result: Up-regulated in Transcription
  misc_feature: MA Experiment 20000265 PARAMETER Experiment Name: At_Open_Flower_P Parameter: Age (day) Value: 21
  misc_feature: MA Experiment 20000265 PARAMETER Experiment Name: At_Open_Flower_P Parameter: Plant Line Value: WS
  misc_feature: MA Experiment 20000265 PARAMETER Experiment Name: At_Open_Flower_P Parameter: Tissue Value: Closed Flower vs. Whole Plant
atgtcttcggttataaatgttctcttcgtcgtcctagtctttgtcccgtctatatactcggcaccaccaccaaatttaacaaaagattattaccaaaaaacatgtcccgatttcaataaaatcgtacgtgaaaccgttacaccaaagcaaggccagcagccaacgacagctgctggaacactccgtctctttttccatgattgtttcatggaaggatgtgatgcttccgtccttatcgctacaaattctttcaacaaagccgaacgtgacgatgacctcaacgagtcgcttccgggagatgcattcgacattgtgactcgcatcaaaaccgctcttgaattgtcttgtcccggggtggtgtcctgcgcagacatcctggctcaggccacacgtgaccttgtcacaatggttggtgggcctttctatgaagtcaaactgggccgtaaagatggttttgagtcaaaagcccataaagtcaaaggaaatttacctttagcgaaccaatccgtccccgacatgttatcgatattcaagaagaatggtttcactctaaaggagctggttgcgttaagtggcgggcacacaatcggattctcacactgcaaagaattcagcaaccggatattcccgaaggttgatccagaactcaacgcgaaattcgcaggagttcttaaagatctatgcaagaatttcgaaaccaataagacgatggcagcatttctcgatccggtgacaccgggaaaattcgataatatgtatttcaagaacttgaaacgaggtcttggactgttagcttccgaccatatattgtttaaagatcctagcacgagaccgtttgtagaattatatgcgaataatcagacggctttcttcgaggattttgcacgtgccatggagaaactaggcagggttggtgttaaaggcgaaaaagatggagaagtgagacgtagatgtgatcacttcaacaagcttaacgtataa

SEQ ID NO: 83079 - protein, 326 aa, Arabidopsis thaliana
  peptide (1)..(326): Ceres Seq. ID no. 12668593
  misc_feature (42)..(286): Pfam Name: Peroxidase Pfam Description: Peroxidase
  misc_feature (1)..(326): Homolog of NCBI NO: 15236620 NR Description: peroxidase, putative; protein id: At4g17690.1 thaliana] >gi|26397556|sp|O23609|PE41_ARATH Peroxidase 41
  misc_feature (7)..(326): Homolog of NCBI NO: 21593687 NR Description: peroxidase [Arabidopsis thaliana]
  misc_feature (7)..(326): Homolog of NCBI NO: 9759442 NR Description: peroxidase [Arabidopsis thaliana]
  misc_feature (7)..(326): Homolog of NCBI NO: 18422742 NR Description: peroxidase, putative; protein id: At5g47000.1, by cDNA: 41397., supported by cDNA: gi_20260463 [Arabidopsis >gi|26397788|sp|Q9FJR1|PE65_ARATH Peroxidase 65 precursor
  misc_feature (7)..(322): Homolog of NCBI NO: 15242580 NR Description: peroxidase, putative; protein id: At5g40150.1 thaliana] >gi|26397798|sp|Q9FL16|PE63_ARATH Peroxidase 63 (Atperox P63) (ATP26a) >gi|10177502|dbj|BAB10896.1| peroxidase
  misc_feature (8)..(322): Homolog of NCBI NO: 15221670 NR Description: peroxidase, putative; protein id: At1g24110.1 thaliana] >gi|25453192|sp|O48677|PER6_ARATH Peroxidase 6
  misc_feature (1)..(322): Homolog of NCBI NO: 15232929 NR Description: peroxidase, putative; protein id: At3g28200.1, by cDNA: gi_14334599 [Arabidopsis thaliana] Peroxidase 31 precursor (Atperox P31) (ATP41)
  misc_feature (1)..(322): Homolog of NCBI NO: 14334600 NR Description: putative peroxidase [Arabidopsis thaliana]
  misc_feature (47)..(322): Homolog of NCBI NO: 1890317 NR Description: peroxidase ATP26a [Arabidopsis thaliana]
  misc_feature (3)..(322): Homolog of NCBI NO: 7433082 NR Description: probable peroxidase (EC 1.11.1.7) (clone PC55) - (fragment) >gi|1781336|emb|CAA71495.1| peroxidase [Spinacia
MSSVINVLFVVLVFVPSIYSAPPPNLTKDYYQKTCPDFNKIVRETVTPKQGQQPTTAAGTLRLFFHDCFMEGCDASVLIATNSFNKAERDDDLNESLPGDAFDIVTRIKTALELSCPGVVSCADILAQATRDLVTMVGGPFYEVKLGRKDGFESKAHKVKGNLPLANQSVPDMLSIFKKNGFTLKELVALSGGHTIGFSHCKEFSNRIFPKVDPELNAKFAGVLKDLCKNFETNKTMAAFLDPVTPGKFDNMYFKNLKRGLGLLASDHILFKDPSTRPFVELYANNQTAFFEDFARAMEKLGRVGVKGEKDGEVRRRCDHFNKLNV

SEQ ID NO: 83080 - protein, 257 aa, Arabidopsis thaliana
  peptide (1)..(257): Ceres Seq. ID no. 12668594
  misc_feature (1)..(217): Pfam Name: Peroxidase Pfam Description: Peroxidase
  misc_feature (1)..(257): Homolog of NCBI NO: 15236620 NR Description: peroxidase, putative; protein id: At4g17690.1 thaliana] >gi|26397556|sp|O23609|PE41_ARATH Peroxidase 41
  misc_feature (1)..(257): Homolog of NCBI NO: 21593687 NR Description: peroxidase [Arabidopsis thaliana]
  misc_feature (1)..(257): Homolog of NCBI NO: 9759442 NR Description: peroxidase [Arabidopsis thaliana]
  misc_feature (1)..(257): Homolog of NCBI NO: 18422742 NR Description: peroxidase, putative; protein id: At5g47000.1, by cDNA: 41397., supported by cDNA: gi_20260463 [Arabidopsis >gi|26397788|sp|Q9FJR1|PE65_ARATH Peroxidase 65 precursor
  misc_feature (1)..(253): Homolog of NCBI NO: 15242580 NR Description: peroxidase, putative; protein id: At5g40150.1 thaliana] >gi|26397798|sp|Q9FL16|PE63_ARATH Peroxidase 63 (Atperox P63) (ATP26a) >gi|10177502|dbj|BAB10896.1| peroxidase
  misc_feature (1)..(253): Homolog of NCBI NO: 15221670 NR Description: peroxidase, putative; protein id: At1g24110.1 thaliana] >gi|25453192|sp|O48677|PER6_ARATH Peroxidase 6
  misc_feature (1)..(253): Homolog of NCBI NO: 15232929 NR Description: peroxidase, putative; protein id: At3g28200.1, by cDNA: gi_14334599 [Arabidopsis thaliana] Peroxidase 31 precursor (Atperox P31) (ATP41)
  misc_feature (1)..(253): Homolog of NCBI NO: 14334600 NR Description: putative peroxidase [Arabidopsis thaliana]
  misc_feature (1)..(253): Homolog of NCBI NO: 1890317 NR Description: peroxidase ATP26a [Arabidopsis thaliana]
  misc_feature (1)..(253): Homolog of NCBI NO: 7433082 NR Description: probable peroxidase (EC 1.11.1.7) (clone PC55) - (fragment) >gi|1781336|emb|CAA71495.1| peroxidase [Spinacia
MEGCDASVLIATNSFNKAERDDDLNESLPGDAFDIVTRIKTALELSCPGVVSCADILAQATRDLVTMVGGPFYEVKLGRKDGFESKAHKVKGNLPLANQSVPDMLSIFKKNGFTLKELVALSGGHTIGFSHCKEFSNRIFPKVDPELNAKFAGVLKDLCKNFETNKTMAAFLDPVTPGKFDNMYFKNLKRGLGLLASDHILFKDPSTRPFVELYANNQTAFFEDFARAMEKLGRVGVKGEKDGEVRRRCDHFNKLNV

SEQ ID NO: 83081 - protein, 191 aa, Arabidopsis thaliana
  peptide (1)..(191): Ceres Seq. ID no. 12668595
  misc_feature (1)..(151): Pfam Name: Peroxidase Pfam Description: Peroxidase
  misc_feature (1)..(191): Homolog of NCBI NO: 15236620 NR Description: peroxidase, putative; protein id: At4g17690.1 thaliana] >gi|26397556|sp|O23609|PE41_ARATH Peroxidase 41
  misc_feature (1)..(191): Homolog of NCBI NO: 21593687 NR Description: peroxidase [Arabidopsis thaliana]
  misc_feature (1)..(191): Homolog of NCBI NO: 9759442 NR Description: peroxidase [Arabidopsis thaliana]
  misc_feature (1)..(191): Homolog of NCBI NO: 18422742 NR Description: peroxidase, putative; protein id: At5g47000.1, by cDNA: 41397., supported by cDNA: gi_20260463 [Arabidopsis >gi|26397788|sp|Q9FJR1|PE65_ARATH Peroxidase 65 precursor
  misc_feature (1)..(187): Homolog of NCBI NO: 15242580 NR Description: peroxidase, putative; protein id: At5g40150.1 thaliana] >gi|26397798|sp|Q9FL16|PE63_ARATH Peroxidase 63 (Atperox P63) (ATP26a) >gi|10177502|dbj|BAB10896.1| peroxidase
  misc_feature (1)..(187): Homolog of NCBI NO: 15221670 NR Description: peroxidase, putative; protein id: At1g24110.1 thaliana] >gi|25453192|sp|O48677|PER6_ARATH Peroxidase 6
  misc_feature (1)..(187): Homolog of NCBI NO: 15232929 NR Description: peroxidase, putative; protein id: At3g28200.1, by cDNA: gi_14334599 [Arabidopsis thaliana] Peroxidase 31 precursor (Atperox P31) (ATP41)
  misc_feature (1)..(187): Homolog of NCBI NO: 14334600 NR Description: putative peroxidase [Arabidopsis thaliana]
  misc_feature (1)..(187): Homolog of NCBI NO: 1890317 NR Description: peroxidase ATP26a [Arabidopsis thaliana]
  misc_feature (1)..(187): Homolog of NCBI NO: 7433082 NR Description: probable peroxidase (EC 1.11.1.7) (clone PC55) - (fragment) >gi|1781336|emb|CAA71495.1| peroxidase [Spinacia
MVGGPFYEVKLGRKDGFESKAHKVKGNLPLANQSVPDMLSIFKKNGFTLKELVALSGGHTIGFSHCKEFSNRIFPKVDPELNAKFAGVLKDLCKNFETNKTMAAFLDPVTPGKFDNMYFKNLKRGLGLLASDHILFKDPSTRPFVELYANNQTAFFEDFARAMEKLGRVGVKGEKDGEVRRRCDHFNKLNV

SEQ ID NO: 83082 - DNA, 980 bp, Arabidopsis thaliana
  misc_feature (1)..(980): Ceres Seq. ID no. 12668596
  misc_feature: MA Experiment ID: 20000182 Result: Up-regulated in Transcription
  misc_feature: MA Experiment 20000182 PARAMETER Experiment Name: At_2mM_SA_P Parameter: Age (day) Value: 14
  misc_feature: MA Experiment 20000182 PARAMETER Experiment Name: At_2mM_SA_P Parameter: Organism Value: A. thaliana
  misc_feature: MA Experiment 20000182 PARAMETER Experiment Name: At_2mM_SA_P Parameter: Plant Line Value: WS
  misc_feature: MA Experiment 20000182 PARAMETER Experiment Name: At_2mM_SA_P Parameter: Timepoint (hr) Value: 6
  misc_feature: MA Experiment 20000182 PARAMETER Experiment Name: At_2mM_SA_P Parameter: Tissue Value: Aerial
  misc_feature: MA Experiment 20000182 PARAMETER Experiment Name: At_2mM_SA_P Parameter: Treatment Value: 2mM SA vs. No Treatment
  misc_feature: MA Experiment ID: 20000439 Result: Down-regulated in Transcription
  misc_feature: MA Experiment 20000439 PARAMETER Experiment Name: At_Roots__P Parameter: Age (day) Value: 14 vs. 21
  misc_feature: MA Experiment 20000439 PARAMETER Experiment Name: At_Roots__P Parameter: Organism Value: A. thaliana
  misc_feature: MA Experiment 20000439 PARAMETER Experiment Name: At_Roots__P Parameter: Tissue Value: Roots vs. Whole Plant
cttcttatggagcttttcccttcacaacctgacttgtacttgaagatcagccgaagaagagaagaagaacaagaaaaagaaagtcaagaactacaagaacaagaagtcgaaaggagattagggtttcagagtaaagcctcagatttagacaacaagtcttcaaataatctcatccacactctccagttcacttcaaacaatgaagccaccaagattaatagtaatcaagaacacaaggaatctctcgatcaagacttgagatctatttttatgatgagaccaataagaggaatccctctttaccagaatcaagtccttgaccactactactactcatctacctctcccaatcctttcttcttcagtgaagtcaacggtcaacatgctagtcgtcgcttaatcacaaaccctaattgtagttttaatctccacaaccgtcatcggcgtcaagctcaaccgcagccgccaagattcaccgccaaaagaggagtaagggctccaaggatgcggtggacgacgaccctccacgcccattttgtacacgctgttcaattattgggtggtcatgaaagagcaaccccaaaatcagtacttgagctgatggatgtgcaagatctcacattggctcatgttaaatcccatctacagatgtatcgaaccatcaagtctactgaaaaacctacaacgtcatcagggcagtcagattgtgagaatggatcacaagtaaacagtgagagagaagcaagaaatctcacgggtctatggaataactcctcaagtgaagctcggttccagttgaaggcaaaggcatcatcaggtgtagacatttcatccaatgagaatgaatggaagaatcgaagatgtccaagcaacgaacggttgtcgtcagattcgtcaagccttacagggacaagaccagagactgaaactcccaatcttgatttcactttagctacaccaaacctctctccctaattttc

SEQ ID NO: 83083 - protein, 324 aa, Arabidopsis thaliana
  peptide (1)..(324): Ceres Seq. ID no. 12668597
  misc_feature (168)..(219): Pfam Name: Myb-like DNA-binding domain Pfam Description: Myb-like DNA-binding domain
  misc_feature (3)..(324): Homolog of NCBI NO: 18414945 NR Description: Expressed protein; protein id: At4g17695.1,
  misc_feature (49)..(240): Homolog of NCBI NO: 18398337 NR Description: expressed protein; protein id: At1g32240.1, by cDNA: gi_15723594 [Arabidopsis thaliana]
  misc_feature (160)..(324): Homolog of NCBI NO: 34905232 NR Description: P0672D01.18 [Oryza sativa (japonica
  misc_feature (144)..(304): Homolog of NCBI NO: 18418011 NR Description: putative protein; protein id: At5g16560.1, by cDNA: gi_14345994, supported by cDNA: gi_15723590 [Arabidopsis >gi|14345995|gb|AAK59989.1| KANADI protein [Arabidopsis thaliana]
  misc_feature (161)..(321): Homolog of NCBI NO: 15239014 NR Description: putative protein; protein id: At5g42630.1, by cDNA: 114074., supported by cDNA: gi_15723592 [Arabidopsis >gi|10177141|dbj|BAB10501.1|
  misc_feature (156)..(314): Homolog of NCBI NO: 29837235 NR Description: OSJNBb0032E15.1 [Oryza sativa (japonica
  misc_feature (161)..(232): Homolog of NCBI NO: 40737024 NR Description: putative transfactor [Oryza sativa (japonica
  misc_feature (144)..(217): Homolog of NCBI NO: 9759140 NR Description: gb|AAD20098.1~gene_id:MQK4.31~similar to unknown
  misc_feature (167)..(245): Homolog of NCBI NO: 7527727 NR Description: T5E21.10 [Arabidopsis thaliana]
  misc_feature (167)..(234): Homolog of NCBI NO: 30793861 NR Description: unknown protein [Arabidopsis thaliana]
LLMELFPSQPDLYLKISRRREEEQEKESQELQEQEVERRLGFQSKASDLDNKSSNNLIHTLQFTSNNEATKINSNQEHKESLDQDLRSIFMMRPIRGIPLYQNQVLDHYYYSSTSPNPFFFSEVNGQHASRRLITNPNCSFNLHNRHRRQAQPQPPRFTAKRGVRAPRMRWTTTLHAHFVHAVQLLGGHERATPKSVLELMDVQDLTLAHVKSHLQMYRTIKSTEKPTTSSGQSDCENGSQVNSEREARNLTGLWNNSSSEARFQLKAKASSGVDISSNENEWKNRRCPSNERLSSDSSSLTGTRPETETPNLDFTLATPNLSP

SEQ ID NO: 83084 - protein, 322 aa, Arabidopsis thaliana
  peptide (1)..(322): Ceres Seq. ID no. 12668598
  misc_feature (166)..(217): Pfam Name: Myb-like DNA-binding domain Pfam Description: Myb-like DNA-binding domain
  misc_feature (1)..(322): Homolog of NCBI NO: 18414945 NR Description: Expressed protein; protein id: At4g17695.1,
  misc_feature (47)..(238): Homolog of NCBI NO: 18398337 NR Description: expressed protein; protein id: At1g32240.1, by cDNA: gi_15723594 [Arabidopsis thaliana]
  misc_feature (158)..(322): Homolog of NCBI NO: 34905232 NR Description: P0672D01.18 [Oryza sativa (japonica
  misc_feature (142)..(302): Homolog of NCBI NO: 18418011 NR Description: putative protein; protein id: At5g16560.1, by cDNA: gi_14345994, supported by cDNA: gi_15723590 [Arabidopsis >gi|14345995|gb|AAK59989.1| KANADI protein [Arabidopsis thaliana]
  misc_feature (159)..(319): Homolog of NCBI NO: 15239014 NR Description: putative protein; protein id: At5g42630.1, by cDNA: 114074., supported by cDNA: gi_15723592 [Arabidopsis >gi|10177141|dbj|BAB10501.1|
  misc_feature (154)..(312): Homolog of NCBI NO: 29837235 NR Description: OSJNBb0032E15.1 [Oryza sativa (japonica
  misc_feature (159)..(230): Homolog of NCBI NO: 40737024 NR Description: putative transfactor [Oryza sativa (japonica
  misc_feature (142)..(215): Homolog of NCBI NO: 9759140 NR Description: gb|AAD20098.1~gene_id:MQK4.31~similar to unknown
  misc_feature (165)..(243): Homolog of NCBI NO: 7527727 NR Description: T5E21.10 [Arabidopsis thaliana]
  misc_feature (165)..(232): Homolog of NCBI NO: 30793861 NR Description: unknown protein [Arabidopsis thaliana]
MELFPSQPDLYLKISRRREEEQEKESQELQEQEVERRLGFQSKASDLDNKSSNNLIHTLQFTSNNEATKINSNQEHKESLDQDLRSIFMMRPIRGIPLYQNQVLDHYYYSSTSPNPFFFSEVNGQHASRRLITNPNCSFNLHNRHRRQAQPQPPRFTAKRGVRAPRMRWTTTLHAHFVHAVQLLGGHERATPKSVLELMDVQDLTLAHVKSHLQMYRTIKSTEKPTTSSGQSDCENGSQVNSEREARNLTGLWNNSSSEARFQLKAKASSGVDISSNENEWKNRRCPSNERLSSDSSSLTGTRPETETPNLDFTLATPNLSP

SEQ ID NO: 83085 - protein, 234 aa, Arabidopsis thaliana
  peptide (1)..(234): Ceres Seq. ID no. 12668599
  misc_feature (78)..(129): Pfam Name: Myb-like DNA-binding domain Pfam Description: Myb-like DNA-binding domain
  misc_feature (1)..(234): Homolog of NCBI NO: 18414945 NR Description: Expressed protein; protein id: At4g17695.1,
  misc_feature (1)..(150): Homolog of NCBI NO: 18398337 NR Description: expressed protein; protein id: At1g32240.1, by cDNA: gi_15723594 [Arabidopsis thaliana]
  misc_feature (70)..(234): Homolog of NCBI NO: 34905232 NR Description: P0672D01.18 [Oryza sativa (japonica
  misc_feature (54)..(214): Homolog of NCBI NO: 18418011 NR Description: putative protein; protein id: At5g16560.1, by cDNA: gi_14345994, supported by cDNA: gi_15723590 [Arabidopsis >gi|14345995|gb|AAK59989.1| KANADI protein [Arabidopsis thaliana]
  misc_feature (71)..(231): Homolog of NCBI NO: 15239014 NR Description: putative protein; protein id: At5g42630.1, by cDNA: 114074., supported by cDNA: gi_15723592 [Arabidopsis >gi|10177141|dbj|BAB10501.1|
  misc_feature (66)..(224): Homolog of NCBI NO: 29837235 NR Description: OSJNBb0032E15.1 [Oryza sativa (japonica
  misc_feature (71)..(142): Homolog of NCBI NO: 40737024 NR Description: putative transfactor [Oryza sativa (japonica
  misc_feature (54)..(127): Homolog of NCBI NO: 9759140 NR Description: gb|AAD20098.1~gene_id:MQK4.31~similar to unknown
  misc_feature (77)..(155): Homolog of NCBI NO: 7527727 NR Description: T5E21.10 [Arabidopsis thaliana]
  misc_feature (77)..(144): Homolog of NCBI NO: 30793861 NR Description: unknown protein [Arabidopsis thaliana]
MMRPIRGIPLYQNQVLDHYYYSSTSPNPFFFSEVNGQHASRRLITNPNCSFNLHNRHRRQAQPQPPRFTAKRGVRAPRMRWTTTLHAHFVHAVQLLGGHERATPKSVLELMDVQDLTLAHVKSHLQMYRTIKSTEKPTTSSGQSDCENGSQVNSEREARNLTGLWNNSSSEARFQLKAKASSGVDISSNENEWKNRRCPSNERLSSDSSSLTGTRPETETPNLDFTLATPNLSP

SEQ ID NO: 83086 - DNA, 738 bp, Arabidopsis thaliana
  misc_feature (1)..(738): Ceres Seq. ID no. 12668612
  misc_feature: MA Experiment ID: 20000437 Result: Down-regulated in Transcription
  misc_feature: MA Experiment 20000437 PARAMETER Experiment Name: At_Drought_P Parameter: Age (day) Value: 8
  misc_feature: MA Experiment 20000437 PARAMETER Experiment Name: At_Drought_P Parameter: Organism Value: A. thaliana
  misc_feature: MA Experiment 20000437 PARAMETER Experiment Name: At_Drought_P Parameter: Plant Line Value: WS
  misc_feature: MA Experiment 20000437 PARAMETER Experiment Name: At_Drought_P Parameter: Timepoint (hr) Value: 24
  misc_feature: MA Experiment 20000437 PARAMETER Experiment Name: At_Drought_P Parameter: Tissue Value: Whole Plant
  misc_feature: MA Experiment 20000437 PARAMETER Experiment Name: At_Drought_P Parameter: Treatment Value: Drought vs. No Drought
  misc_feature: MA Experiment ID: 20000439 Result: Up-regulated in Transcription
  misc_feature: MA Experiment 20000439 PARAMETER Experiment Name: At_Roots__P Parameter: Age (day) Value: 14 vs. 21
  misc_feature: MA Experiment 20000439 PARAMETER Experiment Name: At_Roots__P Parameter: Organism Value: A. thaliana
  misc_feature: MA Experiment 20000439 PARAMETER Experiment Name: At_Roots__P Parameter: Tissue Value: Roots vs. Whole Plant
atggtcgatgcactcacttgcgtccgatggaaacgccaccagctattcacgaaatacgagtatggagctcaaggtaggccgagattcggaatcagcttagggcttcttgttgattgcttgaacacattttcatcacctggacattctaatactatagaaatcaagtatccaggacctgatatggagcttcttctcaaatctgttgataccttaaactcttgcatctactctgagataagaactagaattcccgaaactgttacttgggactacaactttgagcaggcgggaatcgcgccacttacttttacagtaaagtcagcggcgttgaaggaagcaatagatgatcttgaatggcctggttcaagtgtacagatcagtcttcaaaaggaacccccttgtgtaatctttagaggagaaggacatggagacttgcagatagacttcatgtattatgccaacacagatcttctccttgcctttcattgtgataccgaagtctcttacgggtacaaatacaagtttttgaaagcaacaacggcaaacataccgggaaacgtagtgagagaaaacaggggaagcaaactaacaataggaagaggaggaatgttgaaagttcagcacttggtttcagtttctaaagctttagctccacaagtggaatccgcagggtatcagccaccgagtcggattgcttatatagagttctttgtgaagcctgaagagcctgctgattaa

SEQ ID NO: 83087 - protein, 245 aa, Arabidopsis thaliana
  peptide (1)..(245): Ceres Seq. ID no. 12668613
  misc_feature (58)..(180): Pfam Name: Repair protein Rad1/Rec1/Rad17 Pfam Description: Repair protein Rad1/Rec1/Rad17
  misc_feature (1)..(245): Homolog of NCBI NO: 7452416 NR Description: hypothetical protein dl4915w - Arabidopsis >gi|2245135|emb|CAB10556.1| hypothetical protein [Arabidopsis >gi|7268529|emb|CAB78779.1| hypothetical protein [Arabidopsis
  misc_feature (1)..(245): Homolog of NCBI NO: 30684177 NR Description: expressed protein [Arabidopsis thaliana]
  misc_feature (1)..(14): Homolog of NCBI NO: 30684177 NR Description: expressed protein [Arabidopsis thaliana]
  misc_feature (1)..(242): Homolog of NCBI NO: 11875164 NR Description: hypothetical protein [Oryza sativa (japonica
  misc_feature (1)..(14): Homolog of NCBI NO: 11875164 NR Description: hypothetical protein [Oryza sativa (japonica
MVDALTCVRWKRHQLFTKYEYGAQGRPRFGISLGLLVDCLNTFSSPGHSNTIEIKYPGPDMELLLKSVDTLNSCIYSEIRTRIPETVTWDYNFEQAGIAPLTFTVKSAALKEAIDDLEWPGSSVQISLQKEPPCVIFRGEGHGDLQIDFMYYANTDLLLAFHCDTEVSYGYKYKFLKATTANIPGNVVRENRGSKLTIGRGGMLKVQHLVSVSKALAPQVESAGYQPPSRIAYIEFFVKPEEPAD

SEQ ID NO: 83088 - protein, 185 aa, Arabidopsis thaliana
  peptide (1)..(185): Ceres Seq. ID no. 12668614
  misc_feature (1)..(120): Pfam Name: Repair protein Rad1/Rec1/Rad17 Pfam Description: Repair protein Rad1/Rec1/Rad17
  misc_feature (1)..(185): Homolog of NCBI NO: 7452416 NR Description: hypothetical protein dl4915w - Arabidopsis >gi|2245135|emb|CAB10556.1| hypothetical protein [Arabidopsis >gi|7268529|emb|CAB78779.1| hypothetical protein [Arabidopsis
  misc_feature (1)..(185): Homolog of NCBI NO: 30684177 NR Description: expressed protein [Arabidopsis thaliana]
  misc_feature (1)..(182): Homolog of NCBI NO: 11875164 NR Description: hypothetical protein [Oryza sativa (japonica
MELLLKSVDTLNSCIYSEIRTRIPETVTWDYNFEQAGIAPLTFTVKSAALKEAIDDLEWPGSSVQISLQKEPPCVIFRGEGHGDLQIDFMYYANTDLLLAFHCDTEVSYGYKYKFLKATTANIPGNVVRENRGSKLTIGRGGMLKVQHLVSVSKALAPQVESAGYQPPSRIAYIEFFVKPEEPAD

SEQ ID NO: 83089 - DNA, 1242 bp, Arabidopsis thaliana
  misc_feature (1)..(1242): Ceres Seq. ID no. 12668677
  misc_feature: MA Experiment ID: 20000179 Result: Down-regulated in Transcription
  misc_feature: MA Experiment 20000179 PARAMETER Experiment Name: At_Germinating_Seeds_P Parameter: Age (hr) Value: 6 vs. 0
  misc_feature: MA Experiment 20000179 PARAMETER Experiment Name: At_Germinating_Seeds_P Parameter: Tissue Value: Germinating Seeds
  misc_feature: MA Experiment ID: 20000180 Result: Down-regulated in Transcription
  misc_feature: MA Experiment 20000180 PARAMETER Experiment Name: At_Germinating_Seeds_P Parameter: Age (hr) Value: 24 vs. 0
  misc_feature: MA Experiment 20000180 PARAMETER Experiment Name: At_Germinating_Seeds_P Parameter: Tissue Value: Germinating Seeds
  misc_feature: MA Experiment ID: 20000182 Result: Up-regulated in Transcription
  misc_feature: MA Experiment 20000182 PARAMETER Experiment Name: At_2mM_SA_P Parameter: Age (day) Value: 14
  misc_feature: MA Experiment 20000182 PARAMETER Experiment Name: At_2mM_SA_P Parameter: Organism Value: A. thaliana
  misc_feature: MA Experiment 20000182 PARAMETER Experiment Name: At_2mM_SA_P Parameter: Plant Line Value: WS
  misc_feature: MA Experiment 20000182 PARAMETER Experiment Name: At_2mM_SA_P Parameter: Timepoint (hr) Value: 6
  misc_feature: MA Experiment 20000182 PARAMETER Experiment Name: At_2mM_SA_P Parameter: Tissue Value: Aerial
  misc_feature: MA Experiment 20000182 PARAMETER Experiment Name: At_2mM_SA_P Parameter: Treatment Value: 2mM SA vs. No Treatment
  misc_feature: MA Experiment ID: 20000185 Result: Down-regulated in Transcription
  misc_feature: MA Experiment 20000185 PARAMETER Experiment Name: At_Roots__P Parameter: Age (day) Value: 7 vs. 21
  misc_feature: MA Experiment 20000185 PARAMETER Experiment Name: At_Roots__P Parameter: Organism Value: A. thaliana
  misc_feature: MA Experiment 20000185 PARAMETER Experiment Name: At_Roots__P Parameter: Tissue Value: Roots vs. Whole Plant
  misc_feature: MA Experiment ID: 20000213 Result: Up-regulated in Transcription
  misc_feature: MA Experiment 20000213 PARAMETER Experiment Name: At_4deg_Cold_P Parameter: Timepoint (hr) Value: 2
  misc_feature: MA Experiment ID: 20000234 Result: Down-regulated in Transcription
  misc_feature: MA Experiment 20000234 PARAMETER Experiment Name: At_Siliques_P Parameter: Age (day) Value: 21
  misc_feature: MA Experiment 20000234 PARAMETER Experiment Name: At_Siliques_P Parameter: Organism Value: A. thaliana
  misc_feature: MA Experiment 20000234 PARAMETER Experiment Name: At_Siliques_P Parameter: Plant Line Value: WS
  misc_feature: MA Experiment 20000234 PARAMETER Experiment Name: At_Siliques_P Parameter: Tissue Value: Less Than 5mm Siliques vs. Whole Plant
  misc_feature: MA Experiment ID: 20000286 Result: Down-regulated in Transcription
  misc_feature: MA Experiment 20000286 PARAMETER Experiment Name: At_Open_Flower_P Parameter: Age (day) Value: 21
  misc_feature: MA Experiment 20000286 PARAMETER Experiment Name: At_Open_Flower_P Parameter: Plant Line Value: WS
  misc_feature: MA Experiment 20000286 PARAMETER Experiment Name: At_Open_Flower_P Parameter: Tissue Value: Half Open vs. Whole Plant
  misc_feature: MA Experiment ID: 20000436 Result: Up-regulated in Transcription
  misc_feature: MA Experiment 20000436 PARAMETER Experiment Name: At_Drought_P Parameter: Age (day) Value: 7
  misc_feature: MA Experiment 20000436 PARAMETER Experiment Name: At_Drought_P Parameter: Organism Value: A. thaliana
  misc_feature: MA Experiment 20000436 PARAMETER Experiment Name: At_Drought_P Parameter: Plant Line Value: WS
  misc_feature: MA Experiment 20000436 PARAMETER Experiment Name: At_Drought_P Parameter: Timepoint (hr) Value: 12
  misc_feature: MA Experiment 20000436 PARAMETER Experiment Name: At_Drought_P Parameter: Tissue Value: Whole Plant
  misc_feature: MA Experiment 20000436 PARAMETER Experiment Name: At_Drought_P Parameter: Treatment Value: Drought vs. No Drought
  misc_feature: MA Experiment ID: 20000437 Result: Up-regulated in Transcription
  misc_feature: MA Experiment 20000437 PARAMETER Experiment Name: At_Drought_P Parameter: Age (day) Value: 8
  misc_feature: MA Experiment 20000437 PARAMETER Experiment Name: At_Drought_P Parameter: Organism Value: A. thaliana
  misc_feature: MA Experiment 20000437 PARAMETER Experiment Name: At_Drought_P Parameter: Plant Line Value: WS
  misc_feature: MA Experiment 20000437 PARAMETER Experiment Name: At_Drought_P Parameter: Timepoint (hr) Value: 24
  misc_feature: MA Experiment 20000437 PARAMETER Experiment Name: At_Drought_P Parameter: Tissue Value: Whole Plant
  misc_feature: MA Experiment 20000437 PARAMETER Experiment Name: At_Drought_P Parameter: Treatment Value: Drought vs. No Drought
  misc_feature: MA Experiment ID: 20000439 Result: Down-regulated in Transcription
  misc_feature: MA Experiment 20000439 PARAMETER Experiment Name: At_Roots__P Parameter: Age (day) Value: 14 vs. 21
  misc_feature: MA Experiment 20000439 PARAMETER Experiment Name: At_Roots__P Parameter: Organism Value: A. thaliana
  misc_feature: MA Experiment 20000439 PARAMETER Experiment Name: At_Roots__P Parameter: Tissue Value: Roots vs. Whole Plant
  misc_feature: MA Experiment ID: 20000451 Result: Up-regulated in Transcription
  misc_feature: MA Experiment 20000451 PARAMETER Experiment Name: At_CS6879_Shoots-Roots_P Parameter: Age (day) Value: 14
  misc_feature: MA Experiment 20000451 PARAMETER Experiment Name: At_CS6879_Shoots-Roots_P Parameter: Organism Value: A. thaliana
  misc_feature: MA Experiment 20000451 PARAMETER Experiment Name: At_CS6879_Shoots-Roots_P Parameter: Plant Line Value: CS6879 vs. WS
  misc_feature: MA Experiment 20000451 PARAMETER Experiment Name: At_CS6879_Shoots-Roots_P Parameter: Tissue Value: Roots
  misc_feature: MA Experiment ID: 20000453 Result: Up-regulated in Transcription
  misc_feature: MA Experiment 20000453 PARAMETER Experiment Name: At_100uM_ABA_P Parameter: Age (day) Value: 15
  misc_feature: MA Experiment 20000453 PARAMETER Experiment Name: At_100uM_ABA_P Parameter: Organism Value: A. thaliana
  misc_feature: MA Experiment 20000453 PARAMETER Experiment Name: At_100uM_ABA_P Parameter: Plant Line Value: WS
  misc_feature: MA Experiment 20000453 PARAMETER Experiment Name: At_100uM_ABA_P Parameter: Timepoint (hr) Value: 24
  misc_feature: MA Experiment 20000453 PARAMETER Experiment Name: At_100uM_ABA_P Parameter: Tissue Value: Aerial
  misc_feature: MA Experiment 20000453 PARAMETER Experiment Name: At_100uM_ABA_P Parameter: Treatment Value: 100uM ABA vs. No Treatment
  misc_feature: MA Experiment ID: 20000573 Result: Up-regulated in Transcription
  misc_feature: MA Experiment 20000573 PARAMETER Experiment Name: At_100uM_ABA_Mutants__P Parameter: Organism Value: A. thaliana
  misc_feature: MA Experiment 20000573 PARAMETER Experiment Name: At_100uM_ABA_Mutants__P Parameter: Plant Line Value: CS22 vs. Ler wt
  misc_feature: MA Experiment 20000573 PARAMETER Experiment Name: At_100uM_ABA_Mutants__P Parameter: Timepoint (hr) Value: N/A
  misc_feature: MA Experiment 20000573 PARAMETER Experiment Name: At_100uM_ABA_Mutants__P Parameter: Tissue Value: Whole Plant
  misc_feature: MA Experiment 20000573 PARAMETER Experiment Name: At_100uM_ABA_Mutants__P Parameter: Treatment Value: None
  misc_feature: MA Experiment ID: 20000574 Result: Up-regulated in Transcription
  misc_feature: MA Experiment 20000574 PARAMETER Experiment Name: At_100uM_ABA_Mutants__P Parameter: Organism Value: A. thaliana
  misc_feature: MA Experiment 20000574 PARAMETER Experiment Name: At_100uM_ABA_Mutants__P Parameter: Plant Line Value: CS23 vs. Ler wt
  misc_feature: MA Experiment 20000574 PARAMETER Experiment Name: At_100uM_ABA_Mutants__P Parameter: Timepoint (hr) Value: N/A
  misc_feature: MA Experiment 20000574 PARAMETER Experiment Name: At_100uM_ABA_Mutants__P Parameter: Tissue Value: Whole Plant
  misc_feature: MA Experiment 20000574 PARAMETER Experiment Name: At_100uM_ABA_Mutants__P Parameter: Treatment Value: None
  misc_feature: MA Experiment ID: 20000575 Result: Down-regulated in Transcription
  misc_feature: MA Experiment 20000575 PARAMETER Experiment Name: At_100uM_ABA_Mutants__P Parameter: Organism Value: A. thaliana
  misc_feature: MA Experiment 20000575 PARAMETER Experiment Name: At_100uM_ABA_Mutants__P Parameter: Plant Line Value: CS22
  misc_feature: MA Experiment 20000575 PARAMETER Experiment Name: At_100uM_ABA_Mutants__P Parameter: Timepoint (hr) Value: 6
  misc_feature: MA Experiment 20000575 PARAMETER Experiment Name: At_100uM_ABA_Mutants__P Parameter: Tissue Value: Whole Plant
  misc_feature: MA Experiment 20000575 PARAMETER Experiment Name: At_100uM_ABA_Mutants__P Parameter: Treatment Value: 1uM ABA vs. No Treatment
  misc_feature: MA Experiment ID: 20001247 Result: Up-regulated in Transcription
  misc_feature: MA Experiment 20001247 PARAMETER Experiment Name: At_Far-red-induction_P Parameter: Age (day) Value: 7
  misc_feature: MA Experiment 20001247 PARAMETER Experiment Name: At_Far-red-induction_P Parameter: Light Value: Far-red vs. White
  misc_feature: MA Experiment 20001247 PARAMETER Experiment Name: At_Far-red-induction_P Parameter: Organism Value: A. thaliana
  misc_feature: MA Experiment 20001247 PARAMETER Experiment Name: At_Far-red-induction_P Parameter: Plant Line Value: Columbia
  misc_feature: MA Experiment 20001247 PARAMETER Experiment Name: At_Far-red-induction_P Parameter: Timepoint (hr) Value: 1
  misc_feature: MA Experiment 20001247 PARAMETER Experiment Name: At_Far-red-induction_P Parameter: Tissue Value: Whole Plant
  misc_feature: MA Experiment ID: 20001248 Result: Up-regulated in Transcription
  misc_feature: MA Experiment 20001248 PARAMETER Experiment Name: At_Far-red-induction_P Parameter: Age (day) Value: 7
  misc_feature: MA Experiment 20001248 PARAMETER Experiment Name: At_Far-red-induction_P Parameter: Light Value: Far-red vs. White
  misc_feature: MA Experiment 20001248 PARAMETER Experiment Name: At_Far-red-induction_P Parameter: Organism Value: A. thaliana
  misc_feature: MA Experiment 20001248 PARAMETER Experiment Name: At_Far-red-induction_P Parameter: Plant Line Value: Columbia
  misc_feature: MA Experiment 20001248 PARAMETER Experiment Name: At_Far-red-induction_P Parameter: Timepoint (hr) Value: 4
  misc_feature: MA Experiment 20001248 PARAMETER Experiment Name: At_Far-red-induction_P Parameter: Tissue Value: Whole Plant
  misc_feature: MA Experiment ID: 20001773 Result: Down-regulated in Transcription
  misc_feature: MA Experiment 20001773 PARAMETER Experiment Name: At_Far-red-enriched-adult_P Parameter: Age (day) Value: 30
  misc_feature: MA Experiment 20001773 PARAMETER Experiment Name: At_Far-red-enriched-adult_P Parameter: Light Value: Far-red enriched vs. White
  misc_feature: MA Experiment 20001773 PARAMETER Experiment Name: At_Far-red-enriched-adult_P Parameter: Organism Value: A. thaliana
  misc_feature: MA Experiment 20001773 PARAMETER Experiment Name: At_Far-red-enriched-adult_P Parameter: Plant Line Value: Columbia
  misc_feature: MA Experiment 20001773 PARAMETER Experiment Name: At_Far-red-enriched-adult_P Parameter: Timepoint (hr) Value: 48
  misc_feature: MA Experiment 20001773 PARAMETER Experiment Name: At_Far-red-enriched-adult_P Parameter: Tissue Value: Aerial
  misc_feature: MA Experiment ID: 20001905 Result: Up-regulated in Transcription
  misc_feature: MA Experiment 20001905 PARAMETER Experiment Name: At_Drought_Reproduction_P Parameter: Age (day) Value: 40
  misc_feature: MA Experiment 20001905 PARAMETER Experiment Name: At_Drought_Reproduction_P Parameter: Organism Value: A. thaliana
  misc_feature: MA Experiment 20001905 PARAMETER Experiment Name: At_Drought_Reproduction_P Parameter: Plant Line Value: WS
  misc_feature: MA Experiment 20001905 PARAMETER Experiment Name: At_Drought_Reproduction_P Parameter: Timepoint (day) Value: 10
  misc_feature: MA Experiment 20001905 PARAMETER Experiment Name: At_Drought_Reproduction_P Parameter: Tissue Value: Rosettes
  misc_feature: MA Experiment 20001905 PARAMETER Experiment Name: At_Drought_Reproduction_P Parameter: Treatment Value: Drought vs. No Drought
aaagtccaagcaccaatctagacctcttaggaaaaaaacctaaaaacctaatccccaaacctaaaaggcttatctcatctcttcttctttgtcttctttactctttttttacctctctcttcattgttcttcaccatgtctaatgaaaccagagatctctacaactaccaatacccttcatcgttttcgttgcacgaaatgatgaatctgcctacttcaaatccatcttcttatggaaacctcccatcacaaaacggttttaatccatctacttattccttcaccgattgtctccaaagttctccagcagcgtatgaatctctacttcagaaaacttttggtctttctccctcttcctcagaggttttcaattcttcgatcgatcaagaaccgaaccgtgatgttactaatgacgtaatcaatggtggtgcatgcaacgagactgaaactagggtttctccttctaattcttcctctagtgaggctgatcaccccggtgaagattccggtaagagccggaggaaacgagagttagtcggtgaagaagatcaaatttccaaaaaagttgggaaaacgaaaaagactgaggtgaagaaacaaagagagccacgagtctcgtttatgactaaaagtgaagttgatcatcttgaagatggttatagatggagaaaatacggccaaaaggctgtaaaaaatagcccttatccaaggagttactatagatgtacaacacaaaagtgcaacgtgaagaaacgagtggagagatcgttccaagatccaacggttgtgattacaacttacgagggtcaacacaaccacccgattccgactaatcttcgaggaagttctgccgcggctgctatgttctccgcagacctcatgactccaagaagctttgcacatgatatgtttaggacggcagcttatactaacggcggttctgtggcggcggctttggattatggatatggacaaagtggttatggtagtgtgaattcaaaccctagttctcaccaagtgtatcatcaagggggtgagtatgagctcttgagggagatttttccttcaattttctttaagcaagagccttgatcgatcattgttataactacatatattatatatattgagagagagaggtagagaaaaaaaaaacttatatgtaacttaagatcttattttgtctctcttatttgcatgtacatattttttcatgaaagaatgagacagttgggcttgctt

SEQ ID NO: 83090 - protein, 318 aa, Arabidopsis thaliana
  peptide (1)..(318): Ceres Seq. ID no. 12668678
  misc_feature (171)..(230): Pfam Name: WRKY DNA -binding domain Pfam Description: WRKY DNA -binding domain
  misc_feature (1)..(318): Homolog of NCBI NO: 15236785 NR Description: WRKY family transcription factor; protein id: supported by cDNA: gi_17064157, supported by cDNA: gi_17979527 thaliana] >gi|17064158|gb|AAL35286.1|AF442393_1 WRKY
  misc_feature (1)..(318): Homolog of NCBI NO: 7484934 NR Description: DNA-binding protein homolog T9A21.10 -
  misc_feature (1)..(318): Homolog of NCBI NO: 15237428 NR Description: WRKY family transcription factor; protein id: supported by cDNA: gi_15384212, supported by cDNA: gi_20465324
  misc_feature (48)..(317): Homolog of NCBI NO: 15220582 NR Description: WRKY family transcription factor; protein id: supported by cDNA: gi_15991739 [Arabidopsis thaliana]
  misc_feature (60)..(317): Homolog of NCBI NO: 25518132 NR Description: F1N18.10 protein - Arabidopsis thaliana
  misc_feature (48)..(243): Homolog of NCBI NO: 34912866 NR Description: putative DNA-binding protein homolog [Oryza
  misc_feature (110)..(279): Homolog of NCBI NO: 34910900 NR Description: P0003E08.17 [Oryza sativa (japonica
  misc_feature (10)..(242): Homolog of NCBI NO: 15226550 NR Description: WRKY family transcription factor; protein id: supported by cDNA: 114256., supported by cDNA: gi_15990583
  misc_feature (10)..(242): Homolog of NCBI NO: 21536889 NR Description: putative WRKY-type DNA binding protein
  misc_feature (18)..(236): Homolog of NCBI NO: 15239913 NR Description: WRKY family transcription factor; protein id: supported by cDNA: gi_17064165, supported by cDNA: gi_17380791, by cDNA: gi_20259612 [Arabidopsis thaliana]
MSNETRDLYNYQYPSSFSLHEMMNLPTSNPSSYGNLPSQNGFNPSTYSFTDCLQSSPAAYESLLQKTFGLSPSSSEVFNSSIDQEPNRDVTNDVINGGACNETETRVSPSNSSSSEADHPGEDSGKSRRKRELVGEEDQISKKVGKTKKTEVKKQREPRVSFMTKSEVDHLEDGYRWRKYGQKAVKNSPYPRSYYRCTTQKCNVKKRVERSFQDPTVVITTYEGQHNHPIPTNLRGSSAAAAMFSADLMTPRSFAHDMFRTAAYTNGGSVAAALDYGYGQSGYGSVNSNPSSHQVYHQGGEYELLREIFPSIFFKQEP

SEQ ID NO: 83091 - protein, 297 aa, Arabidopsis thaliana
  peptide (1)..(297): Ceres Seq. ID no. 12668679
  misc_feature (150)..(209): Pfam Name: WRKY DNA -binding domain Pfam Description: WRKY DNA -binding domain
  misc_feature (1)..(297): Homolog of NCBI NO: 15236785 NR Description: WRKY family transcription factor; protein id: supported by cDNA: gi_17064157, supported by cDNA: gi_17979527 thaliana] >gi|17064158|gb|AAL35286.1|AF442393_1 WRKY
  misc_feature (1)..(297): Homolog of NCBI NO: 7484934 NR Description: DNA-binding protein homolog T9A21.10 -
  misc_feature (1)..(297): Homolog of NCBI NO: 15237428 NR Description: WRKY family transcription factor; protein id: supported by cDNA: gi_15384212, supported by cDNA: gi_20465324
  misc_feature (27)..(296): Homolog of NCBI NO: 15220582 NR Description: WRKY family transcription factor; protein id: supported by cDNA: gi_15991739 [Arabidopsis thaliana]
  misc_feature (39)..(296): Homolog of NCBI NO: 25518132 NR Description: F1N18.10 protein - Arabidopsis thaliana
  misc_feature (27)..(222): Homolog of NCBI NO: 34912866 NR Description: putative DNA-binding protein homolog [Oryza
  misc_feature (89)..(258): Homolog of NCBI NO: 34910900 NR Description: P0003E08.17 [Oryza sativa (japonica
  misc_feature (1)..(221): Homolog of NCBI NO: 15226550 NR Description: WRKY family transcription factor; protein id: supported by cDNA: 114256., supported by cDNA: gi_15990583
  misc_feature (1)..(221): Homolog of NCBI NO: 21536889 NR Description: putative WRKY-type DNA binding protein
  misc_feature (1)..(215): Homolog of NCBI NO: 15239913 NR Description: WRKY family transcription factor; protein id: supported by cDNA: gi_17064165, supported by cDNA: gi_17380791, by cDNA: gi_20259612 [Arabidopsis thaliana]
MMNLPTSNPSSYGNLPSQNGFNPSTYSFTDCLQSSPAAYESLLQKTFGLSPSSSEVFNSSIDQEPNRDVTNDVINGGACNETETRVSPSNSSSSEADHPGEDSGKSRRKRELVGEEDQISKKVGKTKKTEVKKQREPRVSFMTKSEVDHLEDGYRWRKYGQKAVKNSPYPRSYYRCTTQKCNVKKRVERSFQDPTVVITTYEGQHNHPIPTNLRGSSAAAAMFSADLMTPRSFAHDMFRTAAYTNGGSVAAALDYGYGQSGYGSVNSNPSSHQVYHQGGEYELLREIFPSIFFKQEP

SEQ ID NO: 83092 - protein, 296 aa, Arabidopsis thaliana
  peptide (1)..(296): Ceres Seq. ID no. 12668680
  misc_feature (149)..(208): Pfam Name: WRKY DNA -binding domain Pfam Description: WRKY DNA -binding domain
  misc_feature (1)..(296): Homolog of NCBI NO: 15236785 NR Description: WRKY family transcription factor; protein id: supported by cDNA: gi_17064157, supported by cDNA: gi_17979527 thaliana] >gi|17064158|gb|AAL35286.1|AF442393_1 WRKY
  misc_feature (1)..(296): Homolog of NCBI NO: 7484934 NR Description: DNA-binding protein homolog T9A21.10 -
  misc_feature (1)..(296): Homolog of NCBI NO: 15237428 NR Description: WRKY family transcription factor; protein id: supported by cDNA: gi_15384212, supported by cDNA: gi_20465324
  misc_feature (26)..(295): Homolog of NCBI NO: 15220582 NR Description: WRKY family transcription factor; protein id: supported by cDNA: gi_15991739 [Arabidopsis thaliana]
  misc_feature (38)..(295): Homolog of NCBI NO: 25518132 NR Description: F1N18.10 protein - Arabidopsis thaliana
  misc_feature (26)..(221): Homolog of NCBI NO: 34912866 NR Description: putative DNA-binding protein homolog [Oryza
  misc_feature (88)..(257): Homolog of NCBI NO: 34910900 NR Description: P0003E08.17 [Oryza sativa (japonica
  misc_feature (1)..(220): Homolog of NCBI NO: 15226550 NR Description: WRKY family transcription factor; protein id: supported by cDNA: 114256., supported by cDNA: gi_15990583
  misc_feature (1)..(220): Homolog of NCBI NO: 21536889 NR Description: putative WRKY-type DNA binding protein
  misc_feature (1)..(214): Homolog of NCBI NO: 15239913 NR Description: WRKY family transcription factor; protein id: supported by cDNA: gi_17064165, supported by cDNA: gi_17380791, by cDNA: gi_20259612 [Arabidopsis thaliana]
MNLPTSNPSSYGNLPSQNGFNPSTYSFTDCLQSSPAAYESLLQKTFGLSPSSSEVFNSSIDQEPNRDVTNDVINGGACNETETRVSPSNSSSSEADHPGEDSGKSRRKRELVGEEDQISKKVGKTKKTEVKKQREPRVSFMTKSEVDHLEDGYRWRKYGQKAVKNSPYPRSYYRCTTQKCNVKKRVERSFQDPTVVITTYEGQHNHPIPTNLRGSSAAAAMFSADLMTPRSFAHDMFRTAAYTNGGSVAAALDYGYGQSGYGSVNSNPSSHQVYHQGGEYELLREIFPSIFFKQEP

SEQ ID NO: 83093 - DNA, 654 bp, Arabidopsis thaliana
  misc_feature (1)..(654): Ceres Seq. ID no. 12668713
  misc_feature: MA Experiment ID: 20000307 Result: Up-regulated in Transcription
  misc_feature: MA Experiment 20000307 PARAMETER Experiment Name: At_Germinating_Seeds_Sub_P Parameter: Age (hr) Value: 24 vs. 0
  misc_feature: MA Experiment 20000307 PARAMETER Experiment Name: At_Germinating_Seeds_Sub_P Parameter: Organism Value: A. thaliana
  misc_feature: MA Experiment 20000307 PARAMETER Experiment Name: At_Germinating_Seeds_Sub_P Parameter: Plant Line Value: WS
  misc_feature: MA Experiment 20000307 PARAMETER Experiment Name: At_Germinating_Seeds_Sub_P Parameter: Tissue Value: Germinating Seeds
  misc_feature: MA Experiment ID: 20000314 Result: Up-regulated in Transcription
  misc_feature: MA Experiment 20000314 PARAMETER Experiment Name: At_14day_Shoots-Roots_Sub_P Parameter: Age (day) Value: 14
  misc_feature: MA Experiment 20000314 PARAMETER Experiment Name: At_14day_Shoots-Roots_Sub_P Parameter: Organism Value: A. thaliana
  misc_feature: MA Experiment 20000314 PARAMETER Experiment Name: At_14day_Shoots-Roots_Sub_P Parameter: Plant Line Value: WS
  misc_feature: MA Experiment 20000314 PARAMETER Experiment Name: At_14day_Shoots-Roots_Sub_P Parameter: Tissue Value: Roots vs. Whole Plant
  misc_feature: MA Experiment ID: 20000328 Result: Down-regulated in Transcription
  misc_feature: MA Experiment 20000328 PARAMETER Experiment Name: At_42deg_Heat_Sub_P Parameter: Age (day) Value: 14
  misc_feature: MA Experiment 20000328 PARAMETER Experiment Name: At_42deg_Heat_Sub_P Parameter: Organism Value: A. thaliana
  misc_feature: MA Experiment 20000328 PARAMETER Experiment Name: At_42deg_Heat_Sub_P Parameter: Plant Line Value: WS
  misc_feature: MA Experiment 20000328 PARAMETER Experiment Name: At_42deg_Heat_Sub_P Parameter: Temperature (deg C) Value: 42 vs. 22
  misc_feature: MA Experiment 20000328 PARAMETER Experiment Name: At_42deg_Heat_Sub_P Parameter: Timepoint (hr) Value: 6
  misc_feature: MA Experiment 20000328 PARAMETER Experiment Name: At_42deg_Heat_Sub_P Parameter: Tissue Value: Aerial
  misc_feature: MA Experiment ID: 20000347 Result: Up-regulated in Transcription
  misc_feature: MA Experiment 20000347 PARAMETER Experiment Name: At_2mM_SA_Sub_P Parameter: Age (day) Value: 14
  misc_feature: MA Experiment 20000347 PARAMETER Experiment Name: At_2mM_SA_Sub_P Parameter: Organism Value: A. thaliana
  misc_feature: MA Experiment 20000347 PARAMETER Experiment Name: At_2mM_SA_Sub_P Parameter: Plant Line Value: WS
  misc_feature: MA Experiment 20000347 PARAMETER Experiment Name: At_2mM_SA_Sub_P Parameter: Timepoint (hr) Value: 6
  misc_feature: MA Experiment 20000347 PARAMETER Experiment Name: At_2mM_SA_Sub_P Parameter: Tissue Value: Aerial
  misc_feature: MA Experiment 20000347 PARAMETER Experiment Name: At_2mM_SA_Sub_P Parameter: Treatment Value: 2mM SA vs. No Treatment
  misc_feature: MA Experiment ID: 20000440 Result: Down-regulated in Transcription
  misc_feature: MA Experiment 20000440 PARAMETER Experiment Name: At_Closed-Flower__Sub_P Parameter: Tissue Value: Closed Flower vs. Whole Plant
  misc_feature: MA Experiment ID: 20000634 Result: Down-regulated in Transcription
  misc_feature: MA Experiment 20000634 PARAMETER Experiment Name: At_10percent_PEG_Sub_P Parameter: Age (day) Value: 12
  misc_feature: MA Experiment 20000634 PARAMETER Experiment Name: At_10percent_PEG_Sub_P Parameter: Organism Value: A. thaliana
  misc_feature: MA Experiment 20000634 PARAMETER Experiment Name: At_10percent_PEG_Sub_P Parameter: Plant Line Value: WS
  misc_feature: MA Experiment 20000634 PARAMETER Experiment Name: At_10percent_PEG_Sub_P Parameter: Timepoint (day) Value: 12
  misc_feature: MA Experiment 20000634 PARAMETER Experiment Name: At_10percent_PEG_Sub_P Parameter: Tissue Value: Whole Plant
  misc_feature: MA Experiment 20000634 PARAMETER Experiment Name: At_10percent_PEG_Sub_P Parameter: Treatment Value: 10% PEG vs. No Treatment
atgggagcctacagagccgacgacgactacgattatctcttcaaactagtcttgattggagattccggcgtcggaaaatccaatcttttgtctcgcttcaccagaaacgaattcagcatcgagtcaaagtcaaccatcggtgtcgagttcgccacaagaagtgttcatgtcgacgaaaaaatcatcaaagctcagctttgggacaccgctggtcaagaaagatacagagcaatcacgagtgcatactacagaggagcagtgggggcacttctagtatacgacataactcgacacataacgttcgaaaacgttgaaagatggctcaaggagcttcgtgaccataccgatgccaacgttgtaatcatgcttgttggaaacaaagccgatcttcgtcaccttcgtgcagttcccacagaagaagctagatcattctctgaaagagaaaacatgtttttcatggagacttctgctttggatgctacaaatgtcgaacaagctttcactcatgtcttgactcaaatctatcgtgtaatgagccgtaaagctcttgatggtactggagatccgatgtctttacctaaaggacaaaccattgatatcggaaataaggatgatgttactgctgttaaatcttctggttgttgctcaggttga

SEQ ID NO: 83094 - protein, 217 aa, Arabidopsis thaliana
  peptide (1)..(217): Ceres Seq. ID no. 12668714
  misc_feature (15)..(176): Pfam Name: Ras family Pfam Description: Ras family
  misc_feature (1)..(217): Homolog of NCBI NO: 15233873 NR Description: membrane-bound small GTP-binding - like protein;
  misc_feature (1)..(216): Homolog of NCBI NO: 15239462 NR Description: GTP-binding protein, putative; protein id:
  misc_feature (1)..(216): Homolog of NCBI NO: 7438432 NR Description: GTP-binding protein - garden pea
  misc_feature (1)..(216): Homolog of NCBI NO: 15232477 NR Description: Ras family GTP-binding protein, putative; protein
  misc_feature (2)..(216): Homolog of NCBI NO: 3024504 NR Description: RAS-RELATED PROTEIN RAB11B
  misc_feature (1)..(216): Homolog of NCBI NO: 15218719 NR Description: GTP-binding protein, putative; protein id: [Arabidopsis thaliana] >gi|6560749|gb|AAF16749.1|AC010155_2
  misc_feature (1)..(216): Homolog of NCBI NO: 1370156 NR Description: RAB11H [Lotus japonicus]
  misc_feature (1)..(216): Homolog of NCBI NO: 15226182 NR Description: GTP-binding protein, putative; protein id:
  misc_feature (11)..(216): Homolog of NCBI NO: 7438389 NR Description: GTP-binding protein, ras-like (clone vfa-ypt3a) - bean (fragment) >gi|452357|emb|CAA82708.1| guanine nucleotide
  misc_feature (1)..(216): Homolog of NCBI NO: 10764861 NR Description: F1K23.21 [Arabidopsis thaliana]
MGAYRADDDYDYLFKLVLIGDSGVGKSNLLSRFTRNEFSIESKSTIGVEFATRSVHVDEKIIKAQLWDTAGQERYRAITSAYYRGAVGALLVYDITRHITFENVERWLKELRDHTDANVVIMLVGNKADLRHLRAVPTEEARSFSERENMFFMETSALDATNVEQAFTHVLTQIYRVMSRKALDGTGDPMSLPKGQTIDIGNKDDVTAVKSSGCCSG

SEQ ID NO: 83095 - DNA, 519 bp, Arabidopsis thaliana
  misc_feature (1)..(519): Ceres Seq. ID no. 12668727
  misc_feature: MA Experiment ID: 20000315 Result: Down-regulated in Transcription
  misc_feature: MA Experiment 20000315 PARAMETER Experiment Name: At_14day_Shoots-Roots_Sub_P Parameter: Age (day) Value: 14
  misc_feature: MA Experiment 20000315 PARAMETER Experiment Name: At_14day_Shoots-Roots_Sub_P Parameter: Organism Value: A. thaliana
  misc_feature: MA Experiment 20000315 PARAMETER Experiment Name: At_14day_Shoots-Roots_Sub_P Parameter: Plant Line Value: WS
  misc_feature: MA Experiment 20000315 PARAMETER Experiment Name: At_14day_Shoots-Roots_Sub_P Parameter: Tissue Value: Shoots vs. Whole Plant
  misc_feature: MA Experiment ID: 20000355 Result: Up-regulated in Transcription
  misc_feature: MA Experiment 20000355 PARAMETER Experiment Name: At_Siliques_Sub_P Parameter: Age (day) Value: 21
  misc_feature: MA Experiment 20000355 PARAMETER Experiment Name: At_Siliques_Sub_P Parameter: Organism Value: A. thaliana
  misc_feature: MA Experiment 20000355 PARAMETER Experiment Name: At_Siliques_Sub_P Parameter: Plant Line Value: WS
  misc_feature: MA Experiment 20000355 PARAMETER Experiment Name: At_Siliques_Sub_P Parameter: Tissue Value: Less Than 5mm Siliques vs. Whole Plant
  misc_feature: MA Experiment ID: 20000440 Result: Up-regulated in Transcription
  misc_feature: MA Experiment 20000440 PARAMETER Experiment Name: At_Closed-Flower__Sub_P Parameter: Tissue Value: Closed Flower vs. Whole Plant
atggcgtccaaagccatcttcttcttctttgtctctgccgtgtgcctgtcctctctcgccggtgtggccatcgctgatgccgatgactttgaccgtttccaaattcagggatcggtttattgtgacacatgccgtgtccaattcgttacccgtctcagcaagttccttgaaggcgcgaaagtgaagctagaatgcaggagcagaacaaacggaaccgtaacattgacaaaagaagccgtaacggacaaaacagggagctacagaatggaagtgaccggtgaccatgaggaggaagtttgcgagcttgtgctcgtcgaatcaccagacagtggttgcagtgacgttagcaaagaggcttacctacgtaacgccgctaagatcagcctgaccgcgaatgacggaatcgtctctcacgagacacgtatcgttaaccctctcggtttcatggttcaaactccgtcagctgaatgtcccgctgctttcaaggagctcgggatcgttcctgatgtcaccttctaa

SEQ ID NO: 83096 - protein, 172 aa, Arabidopsis thaliana
  peptide (1)..(172): Ceres Seq. ID no. 12668728
  misc_feature (35)..(159): Pfam Name: Pollen proteins Ole e I family Pfam Description: Pollen proteins Ole e I family
  misc_feature (1)..(172): Homolog of NCBI NO: 18415132 NR Description: similar to Ole e I (main olive allergen)-like
  misc_feature (1)..(169): Homolog of NCBI NO: 7486300 NR Description: hypothetical protein F28J12.250 - Arabidopsis
  misc_feature (1)..(172): Homolog of NCBI NO: 18422603 NR Description: Ole e I (main olive allergen)-like protein;
  misc_feature (1)..(172): Homolog of NCBI NO: 21593871 NR Description: Ole e I (main olive allergen)-like protein
  misc_feature (16)..(172): Homolog of NCBI NO: 9758935 NR Description: Ole e I (main olive allergen)-like protein
  misc_feature (3)..(172): Homolog of NCBI NO: 15218844 NR Description: hypothetical protein; protein id: At1g29140.1
  misc_feature (58)..(172): Homolog of NCBI NO: 28393099 NR Description: unknown protein [Arabidopsis thaliana]
  misc_feature (1)..(166): Homolog of NCBI NO: 22074346 NR Description: Che a 1 allergen precursor [Chenopodium album]
  misc_feature (13)..(169): Homolog of NCBI NO: 28380096 NR Description: Olee1-like protein precursor
  misc_feature (3)..(168): Homolog of NCBI NO: 125887 NR Description: Anther specific LAT52 protein precursor
MASKAIFFFFVSAVCLSSLAGVAIADADDFDRFQIQGSVYCDTCRVQFVTRLSKFLEGAKVKLECRSRTNGTVTLTKEAVTDKTGSYRMEVTGDHEEEVCELVLVESPDSGCSDVSKEAYLRNAAKISLTANDGIVSHETRIVNPLGFMVQTPSAECPAAFKELGIVPDVTF

SEQ ID NO: 83097 - DNA, 576 bp, Arabidopsis thaliana
  misc_feature (1)..(576): Ceres Seq. ID no. 12668729
  misc_feature: MA Experiment ID: 20000185 Result: Up-regulated in Transcription
  misc_feature: MA Experiment 20000185 PARAMETER Experiment Name: At_Roots__P Parameter: Age (day) Value: 7 vs. 21
  misc_feature: MA Experiment 20000185 PARAMETER Experiment Name: At_Roots__P Parameter: Organism Value: A. thaliana
  misc_feature: MA Experiment 20000185 PARAMETER Experiment Name: At_Roots__P Parameter: Tissue Value: Roots vs. Whole Plant
  misc_feature: MA Experiment ID: 20000227 Result: Down-regulated in Transcription
  misc_feature: MA Experiment 20000227 PARAMETER Experiment Name: At_Root-Tips-vs-Tops_P Parameter: Tissue Value: Root Tips vs. Root Tops
  misc_feature: MA Experiment ID: 20000439 Result: Up-regulated in Transcription
  misc_feature: MA Experiment 20000439 PARAMETER Experiment Name: At_Roots__P Parameter: Age (day) Value: 14 vs. 21
  misc_feature: MA Experiment 20000439 PARAMETER Experiment Name: At_Roots__P Parameter: Organism Value: A. thaliana
  misc_feature: MA Experiment 20000439 PARAMETER Experiment Name: At_Roots__P Parameter: Tissue Value: Roots vs. Whole Plant
atgtcttcggatcgtcacacaccgacgaaagatccaccggatcatccgtcttcttcctccaaccaccacaagcaaccacttcctcctcaaccgcagcaaccactcagccgctatgaatcgcagaaacgccgcgactggaacacgttcgtccaatacctaaaatcacaaaatccaccgttgatgatgtctcaattcgactacacgcacgtgctaagtttcctaaggtacttagatcagtttggtaagaccaaagtacatcatcaagcttgtgtcttcttcggacaaccggatccaccaggtccgtgcacgtgtcctctcaaacaagcttggggaagcctagatgctttgatcggacggctaagagctgcttacgaggaacacggtggcgggtcacctgatactaacccgtttgcaaacgggtcgatccgggttcacttgagggaagtgagagaatctcaagccaaggctcgtgggattccgtacaggaagaagaaaaggaggaagactaaaaacgaggtcgttgttgtcaagaaggatgttgcaaactcttcgactcctaatcagtcgttcacttga

SEQ ID NO: 83098 - protein, 191 aa, Arabidopsis thaliana
  peptide (1)..(191): Ceres Seq. ID no. 12668730
  misc_feature (19)..(152): Pfam Name: Protein of unknown function (DUF640) Pfam Description: Protein of unknown function (DUF640)
  misc_feature (1)..(191): Homolog of NCBI NO: 15233942 NR Description: putative protein; protein id: At4g18610.1
  misc_feature (31)..(191): Homolog of NCBI NO: 18406012 NR Description: expressed protein; protein id: At2g42610.1, by cDNA: gi_6691164 [Arabidopsis thaliana]
  misc_feature (17)..(171): Homolog of NCBI NO: 18412120 NR Description: Expressed protein; protein id: At1g78815.1, by cDNA: 230925. [Arabidopsis thaliana] >gi|25341951|pir||D96817
  misc_feature (29)..(170): Homolog of NCBI NO: 34907938 NR Description: B1088C09.17 [Oryza sativa (japonica
  misc_feature (17)..(171): Homolog of NCBI NO: 21592379 NR Description: unknown [Arabidopsis thaliana]
  misc_feature (3)..(183): Homolog of NCBI NO: 18390725 NR Description: expressed protein; protein id: At1g07090.1, by cDNA: 28780. [Arabidopsis thaliana] >gi|25341953|pir||G86205
  misc_feature (36)..(168): Homolog of NCBI NO: 15237680 NR Description: putative protein; protein id: At5g58500.1 thaliana] >gi|10177027|dbj|BAB10265.1|
  misc_feature (17)..(172): Homolog of NCBI NO: 38344650 NR Description: OSJNBb0072M01.12 [Oryza sativa (japonica
  misc_feature (36)..(188): Homolog of NCBI NO: 15229310 NR Description: unknown protein; protein id: At3g04510.1 thaliana] >gi|7547110|gb|AAF63782.1| unknown protein [Arabidopsis
  misc_feature (16)..(172): Homolog of NCBI NO: 15241821 NR Description: putative protein; protein id: At5g28490.1
MSSDRHTPTKDPPDHPSSSSNHHKQPLPPQPQQPLSRYESQKRRDWNTFVQYLKSQNPPLMMSQFDYTHVLSFLRYLDQFGKTKVHHQACVFFGQPDPPGPCTCPLKQAWGSLDALIGRLRAAYEEHGGGSPDTNPFANGSIRVHLREVRESQAKARGIPYRKKKRRKTKNEVVVVKKDVANSSTPNQSFT

SEQ ID NO: 83099 - protein, 131 aa, Arabidopsis thaliana
  peptide (1)..(131): Ceres Seq. ID no. 12668731
  misc_feature (1)..(92): Pfam Name: Protein of unknown function (DUF640) Pfam Description: Protein of unknown function (DUF640)
  misc_feature (1)..(131): Homolog of NCBI NO: 15233942 NR Description: putative protein; protein id: At4g18610.1
  misc_feature (1)..(131): Homolog of NCBI NO: 18406012 NR Description: expressed protein; protein id: At2g42610.1, by cDNA: gi_6691164 [Arabidopsis thaliana]
  misc_feature (1)..(111): Homolog of NCBI NO: 18412120 NR Description: Expressed protein; protein id: At1g78815.1, by cDNA: 230925. [Arabidopsis thaliana] >gi|25341951|pir||D96817
  misc_feature (1)..(110): Homolog of NCBI NO: 34907938 NR Description: B1088C09.17 [Oryza sativa (japonica
  misc_feature (1)..(111): Homolog of NCBI NO: 21592379 NR Description: unknown [Arabidopsis thaliana]
  misc_feature (1)..(123): Homolog of NCBI NO: 18390725 NR Description: expressed protein; protein id: At1g07090.1, by cDNA: 28780. [Arabidopsis thaliana] >gi|25341953|pir||G86205
  misc_feature (1)..(108): Homolog of NCBI NO: 15237680 NR Description: putative protein; protein id: At5g58500.1 thaliana] >gi|10177027|dbj|BAB10265.1|
  misc_feature (1)..(112): Homolog of NCBI NO: 38344650 NR Description: OSJNBb0072M01.12 [Oryza sativa (japonica
  misc_feature (1)..(128): Homolog of NCBI NO: 15229310 NR Description: unknown protein; protein id: At3g04510.1 thaliana] >gi|7547110|gb|AAF63782.1| unknown protein [Arabidopsis
  misc_feature (1)..(112): Homolog of NCBI NO: 15241821 NR Description: putative protein; protein id: At5g28490.1
MMSQFDYTHVLSFLRYLDQFGKTKVHHQACVFFGQPDPPGPCTCPLKQAWGSLDALIGRLRAAYEEHGGGSPDTNPFANGSIRVHLREVRESQAKARGIPYRKKKRRKTKNEVVVVKKDVANSSTPNQSFT

SEQ ID NO: 83100 - protein, 130 aa, Arabidopsis thaliana
  peptide (1)..(130): Ceres Seq. ID no. 12668732
  misc_feature (1)..(91): Pfam Name: Protein of unknown function (DUF640) Pfam Description: Protein of unknown function (DUF640)
  misc_feature (1)..(130): Homolog of NCBI NO: 15233942 NR Description: putative protein; protein id: At4g18610.1
  misc_feature (1)..(130): Homolog of NCBI NO: 18406012 NR Description: expressed protein; protein id: At2g42610.1, by cDNA: gi_6691164 [Arabidopsis thaliana]
  misc_feature (1)..(110): Homolog of NCBI NO: 18412120 NR Description: Expressed protein; protein id: At1g78815.1, by cDNA: 230925. [Arabidopsis thaliana] >gi|25341951|pir||D96817
  misc_feature (1)..(109): Homolog of NCBI NO: 34907938 NR Description: B1088C09.17 [Oryza sativa (japonica
  misc_feature (1)..(110): Homolog of NCBI NO: 21592379 NR Description: unknown [Arabidopsis thaliana]
  misc_feature (1)..(122): Homolog of NCBI NO: 18390725 NR Description: expressed protein; protein id: At1g07090.1, by cDNA: 28780. [Arabidopsis thaliana] >gi|25341953|pir||G86205
  misc_feature (1)..(107): Homolog of NCBI NO: 15237680 NR Description: putative protein; protein id: At5g58500.1 thaliana] >gi|10177027|dbj|BAB10265.1|
  misc_feature (1)..(111): Homolog of NCBI NO: 38344650 NR Description: OSJNBb0072M01.12 [Oryza sativa (japonica
  misc_feature (1)..(127): Homolog of NCBI NO: 15229310 NR Description: unknown protein; protein id: At3g04510.1 thaliana] >gi|7547110|gb|AAF63782.1| unknown protein [Arabidopsis
  misc_feature (1)..(111): Homolog of NCBI NO: 15241821 NR Description: putative protein; protein id: At5g28490.1
MSQFDYTHVLSFLRYLDQFGKTKVHHQACVFFGQPDPPGPCTCPLKQAWGSLDALIGRLRAAYEEHGGGSPDTNPFANGSIRVHLREVRESQAKARGIPYRKKKRRKTKNEVVVVKKDVANSSTPNQSFT

SEQ ID NO: 83101 - DNA, 495 bp, Arabidopsis thaliana
  misc_feature (1)..(495): Ceres Seq. ID no. 12668733
  misc_feature: MA Experiment ID: 20000306 Result: Down-regulated in Transcription
  misc_feature: MA Experiment 20000306 PARAMETER Experiment Name: At_Germinating_Seeds_Sub_P Parameter: Age (hr) Value: 6 vs. 0
  misc_feature: MA Experiment 20000306 PARAMETER Experiment Name: At_Germinating_Seeds_Sub_P Parameter: Organism Value: A. thaliana
  misc_feature: MA Experiment 20000306 PARAMETER Experiment Name: At_Germinating_Seeds_Sub_P Parameter: Plant Line Value: WS
  misc_feature: MA Experiment 20000306 PARAMETER Experiment Name: At_Germinating_Seeds_Sub_P Parameter: Tissue Value: Germinating Seeds
  misc_feature: MA Experiment ID: 20000307 Result: Down-regulated in Transcription
  misc_feature: MA Experiment 20000307 PARAMETER Experiment Name: At_Germinating_Seeds_Sub_P Parameter: Age (hr) Value: 24 vs. 0
  misc_feature: MA Experiment 20000307 PARAMETER Experiment Name: At_Germinating_Seeds_Sub_P Parameter: Organism Value: A. thaliana
  misc_feature: MA Experiment 20000307 PARAMETER Experiment Name: At_Germinating_Seeds_Sub_P Parameter: Plant Line Value: WS
  misc_feature: MA Experiment 20000307 PARAMETER Experiment Name: At_Germinating_Seeds_Sub_P Parameter: Tissue Value: Germinating Seeds
  misc_feature: MA Experiment ID: 20000352 Result: Up-regulated in Transcription
  misc_feature: MA Experiment 20000352 PARAMETER Experiment Name: At_Drought_Sub_P Parameter: Age (day) Value: 7
  misc_feature: MA Experiment 20000352 PARAMETER Experiment Name: At_Drought_Sub_P Parameter: Organism Value: A. thaliana
  misc_feature: MA Experiment 20000352 PARAMETER Experiment Name: At_Drought_Sub_P Parameter: Plant Line Value: WS
  misc_feature: MA Experiment 20000352 PARAMETER Experiment Name: At_Drought_Sub_P Parameter: Timepoint (hr) Value: 6
  misc_feature: MA Experiment 20000352 PARAMETER Experiment Name: At_Drought_Sub_P Parameter: Tissue Value: Whole Plant
  misc_feature: MA Experiment 20000352 PARAMETER Experiment Name: At_Drought_Sub_P Parameter: Treatment Value: Drought vs. No Drought
atggaaagttctaagcaaaaacgatgtcgctctagcgtagtcgagaccattgaagcaccattaccactagtgtggtccatcctacgtagtttcgacaaaccacaagcttatcaacgtttcgtcaaaagttgcaccatgcgctctggcggcggcggcggcaaaggaggagaaggaaaaggctccgtccgggacgtgacgttagtctccggcttcccggcggatttcagcacggagaggctcgaagagctagatgatgagtctcacgtgatggtggtaagtattattggcggtaaccataggcttgttaattacaaatcgaaaacgaaggtggtcgcgtcgccggaggatatggcaaagaagacggtggtggtggagagttacgtggtggatgtgccggaaggaactagcgaggaagatacaatattttttgttgataacattattcggtataaccttacttcacttgctaagctcacaaagaaaatgatgaagtaa

SEQ ID NO: 83102 - protein, 164 aa, Arabidopsis thaliana
  peptide (1)..(164): Ceres Seq. ID no. 12668734
  misc_feature (9)..(157): Pfam Name: Pathogenesis-related protein Bet v I family Pfam Description: Pathogenesis-related protein Bet v I family
  misc_feature (1)..(164): Homolog of NCBI NO: 15233962 NR Description: putative protein; protein id: At4g18620.1
  misc_feature (3)..(164): Homolog of NCBI NO: 15242531 NR Description: putative protein; protein id: At5g45870.1 thaliana] >gi|9758934|dbj|BAB09315.1|
  misc_feature (1)..(162): Homolog of NCBI NO: 15242529 NR Description: putative protein; protein id: At5g45860.1 thaliana] >gi|9758933|dbj|BAB09314.1|
  misc_feature (8)..(164): Homolog of NCBI NO: 18405351 NR Description: expressed protein; protein id: At2g40330.1, by cDNA: 6787. [Arabidopsis thaliana] >gi|20198019|gb|AAD25668.2| protein [Arabidopsis thaliana] >gi|21594278|gb|AAM65989.1|
  misc_feature (8)..(164): Homolog of NCBI NO: 25348262 NR Description: hypothetical protein At2g40330 [imported] - thaliana >gi|4588009|gb|AAD25950.1|AF085279_23 hypothetical
  misc_feature (8)..(160): Homolog of NCBI NO: 18404709 NR Description: expressed protein; protein id: At2g38310.1, by cDNA: 32244., supported by cDNA: gi_14517501, supported by gi_15809747 [Arabidopsis thaliana] >gi|7487162|pir||T02514
  misc_feature (8)..(162): Homolog of NCBI NO: 34907924 NR Description: B1088C09.9 [Oryza sativa (japonica
  misc_feature (8)..(161): Homolog of NCBI NO: 15239114 NR Description: putative protein; protein id: At5g05440.1, by cDNA: 117347., supported by cDNA: gi_15529253, supported by gi_16974394 [Arabidopsis thaliana] >gi|10176756|dbj|BAB09987.1|
  misc_feature (6)..(162): Homolog of NCBI NO: 30687786 NR Description: expressed protein [Arabidopsis thaliana]
  misc_feature (9)..(164): Homolog of NCBI NO: 15236689 NR Description: putative protein; protein id: At4g17870.1, by cDNA: gi_14596204, supported by cDNA: gi_20148394 [Arabidopsis
MESSKQKRCRSSVVETIEAPLPLVWSILRSFDKPQAYQRFVKSCTMRSGGGGGKGGEGKGSVRDVTLVSGFPADFSTERLEELDDESHVMVVSIIGGNHRLVNYKSKTKVVASPEDMAKKTVVVESYVVDVPEGTSEEDTIFFVDNIIRYNLTSLAKLTKKMMK

SEQ ID NO: 83103 - protein, 119 aa, Arabidopsis thaliana
  peptide (1)..(119): Ceres Seq. ID no. 12668735
  misc_feature (1)..(112): Pfam Name: Pathogenesis-related protein Bet v I family Pfam Description: Pathogenesis-related protein Bet v I family
  misc_feature (1)..(119): Homolog of NCBI NO: 15233962 NR Description: putative protein; protein id: At4g18620.1
  misc_feature (1)..(119): Homolog of NCBI NO: 15242531 NR Description: putative protein; protein id: At5g45870.1 thaliana] >gi|9758934|dbj|BAB09315.1|
  misc_feature (1)..(117): Homolog of NCBI NO: 15242529 NR Description: putative protein; protein id: At5g45860.1 thaliana] >gi|9758933|dbj|BAB09314.1|
  misc_feature (1)..(119): Homolog of NCBI NO: 18405351 NR Description: expressed protein; protein id: At2g40330.1, by cDNA: 6787. [Arabidopsis thaliana] >gi|20198019|gb|AAD25668.2| protein [Arabidopsis thaliana] >gi|21594278|gb|AAM65989.1|
  misc_feature (1)..(119): Homolog of NCBI NO: 25348262 NR Description: hypothetical protein At2g40330 [imported] - thaliana >gi|4588009|gb|AAD25950.1|AF085279_23 hypothetical
  misc_feature (1)..(115): Homolog of NCBI NO: 18404709 NR Description: expressed protein; protein id: At2g38310.1, by cDNA: 32244., supported by cDNA: gi_14517501, supported by gi_15809747 [Arabidopsis thaliana] >gi|7487162|pir||T02514
  misc_feature (1)..(117): Homolog of NCBI NO: 34907924 NR Description: B1088C09.9 [Oryza sativa (japonica
  misc_feature (1)..(116): Homolog of NCBI NO: 15239114 NR Description: putative protein; protein id: At5g05440.1, by cDNA: 117347., supported by cDNA: gi_15529253, supported by gi_16974394 [Arabidopsis thaliana] >gi|10176756|dbj|BAB09987.1|
  misc_feature (1)..(117): Homolog of NCBI NO: 30687786 NR Description: expressed protein [Arabidopsis thaliana]
  misc_feature (1)..(119): Homolog of NCBI NO: 15236689 NR Description: putative protein; protein id: At4g17870.1, by cDNA: gi_14596204, supported by cDNA: gi_20148394 [Arabidopsis
MRSGGGGGKGGEGKGSVRDVTLVSGFPADFSTERLEELDDESHVMVVSIIGGNHRLVNYKSKTKVVASPEDMAKKTVVVESYVVDVPEGTSEEDTIFFVDNIIRYNLTSLAKLTKKMMK

SEQ ID NO: 83104 - DNA, 846 bp, Arabidopsis thaliana
  misc_feature (1)..(846): Ceres Seq. ID no. 12668740
  misc_feature: MA Experiment ID: 20000307 Result: Down-regulated in Transcription
  misc_feature: MA Experiment 20000307 PARAMETER Experiment Name: At_Germinating_Seeds_Sub_P Parameter: Age (hr) Value: 24 vs. 0
  misc_feature: MA Experiment 20000307 PARAMETER Experiment Name: At_Germinating_Seeds_Sub_P Parameter: Organism Value: A. thaliana
  misc_feature: MA Experiment 20000307 PARAMETER Experiment Name: At_Germinating_Seeds_Sub_P Parameter: Plant Line Value: WS
  misc_feature: MA Experiment 20000307 PARAMETER Experiment Name: At_Germinating_Seeds_Sub_P Parameter: Tissue Value: Germinating Seeds
atggagaatccaagctcaaacttagaaaaactgcaacaagattgttataacgaatggatgagtttacaagccaaacgcataacggagcttaaagaagccatatccaccggtgaaaaagacgataacaagcttctagatttgatacgaacggcgatcagagattttggagactacgcccgaaaacggtcagaacattcccggcgatttagttcaaactatttcgctccgacatggaacacttgtcttgaaaacgcacttctttggatgggaggttgtcgtccttcttcgtttatacgactcgtatacgccatgtgtgggtctcaaaccgaacaccggttaaccaacttcttcaataacaccaaccacgacatcgacagtaatttaagcatggcgttgggtgagacacgtggtggaatcggaggaggagagtcgatgagtgatcttacggctgaacagttattcaagatcaacgagcttcatctaaaaacggtggaggcagagaacaagctgactaaggtatccgcgagcttacaagaagacacggcggatacgcctatcgccgttgcagcgttttacaaagaagtaatcggacaagctgacgtggtggtcgagcgtgcgcttgataagcatgaggaggacatgggtggtttattggttgaagcagataagctgaggatgaccacgttgaccaaaattgttgacattttaacggcggttcaagctgcggattttcttcttgccgggaaaaaacttcatttggcgatgcatgagtggggaaaatcaagagaacatcgacggcttgaagctagtggtggtgattccggtggaaatgttaccagagagtaa

SEQ ID NO: 83105 - protein, 281 aa, Arabidopsis thaliana
  peptide (1)..(281): Ceres Seq. ID no. 12668741
  misc_feature (1)..(281): Homolog of NCBI NO: 15233972 NR Description: putative protein; protein id: At4g18660.1
  misc_feature (1)..(276): Homolog of NCBI NO: 9758930 NR Description: tumor-related protein-like [Arabidopsis thaliana]
  misc_feature (1)..(266): Homolog of NCBI NO: 30694832 NR Description: tumor-related protein-like [Arabidopsis thaliana]
  misc_feature (5)..(266): Homolog of NCBI NO: 15233979 NR Description: putative protein; protein id: At4g18690.1
  misc_feature (20)..(187): Homolog of NCBI NO: 15233977 NR Description: putative protein; protein id: At4g18680.1
  misc_feature (139)..(278): Homolog of NCBI NO: 15233977 NR Description: putative protein; protein id: At4g18680.1
  misc_feature (9)..(260): Homolog of NCBI NO: 688423 NR Description: tumor-related protein [Nicotiana glauca x
  misc_feature (2)..(129): Homolog of NCBI NO: 15231945 NR Description: hypothetical protein; protein id: At3g14880.1
  misc_feature (138)..(266): Homolog of NCBI NO: 15231945 NR Description: hypothetical protein; protein id: At3g14880.1
  misc_feature (101)..(263): Homolog of NCBI NO: 34896008 NR Description: ESTs AU057825(S21823),AU057072(S21123) correspond a region of the predicted gene.~Similar to Nicotiana glauca X
MENPSSNLEKLQQDCYNEWMSLQAKRITELKEAISTGEKDDNKLLDLIRTAIRDFGDYARKRSEHSRRFSSNYFAPTWNTCLENALLWMGGCRPSSFIRLVYAMCGSQTEHRLTNFFNNTNHDIDSNLSMALGETRGGIGGGESMSDLTAEQLFKINELHLKTVEAENKLTKVSASLQEDTADTPIAVAAFYKEVIGQADVVVERALDKHEEDMGGLLVEADKLRMTTLTKIVDILTAVQAADFLLAGKKLHLAMHEWGKSREHRRLEASGGDSGGNVTRE

SEQ ID NO: 83106 - protein, 262 aa, Arabidopsis thaliana
  peptide (1)..(262): Ceres Seq. ID no. 12668742
  misc_feature (1)..(262): Homolog of NCBI NO: 15233972 NR Description: putative protein; protein id: At4g18660.1
  misc_feature (1)..(257): Homolog of NCBI NO: 9758930 NR Description: tumor-related protein-like [Arabidopsis thaliana]
  misc_feature (1)..(247): Homolog of NCBI NO: 30694832 NR Description: tumor-related protein-like [Arabidopsis thaliana]
  misc_feature (1)..(247): Homolog of NCBI NO: 15233979 NR Description: putative protein; protein id: At4g18690.1
  misc_feature (1)..(168): Homolog of NCBI NO: 15233977 NR Description: putative protein; protein id: At4g18680.1
  misc_feature (120)..(259): Homolog of NCBI NO: 15233977 NR Description: putative protein; protein id: At4g18680.1
  misc_feature (1)..(241): Homolog of NCBI NO: 688423 NR Description: tumor-related protein [Nicotiana glauca x
  misc_feature (1)..(110): Homolog of NCBI NO: 15231945 NR Description: hypothetical protein; protein id: At3g14880.1
  misc_feature (119)..(247): Homolog of NCBI NO: 15231945 NR Description: hypothetical protein; protein id: At3g14880.1
  misc_feature (82)..(244): Homolog of NCBI NO: 34896008 NR Description: ESTs AU057825(S21823),AU057072(S21123) correspond a region of the predicted gene.~Similar to Nicotiana glauca X
MSLQAKRITELKEAISTGEKDDNKLLDLIRTAIRDFGDYARKRSEHSRRFSSNYFAPTWNTCLENALLWMGGCRPSSFIRLVYAMCGSQTEHRLTNFFNNTNHDIDSNLSMALGETRGGIGGGESMSDLTAEQLFKINELHLKTVEAENKLTKVSASLQEDTADTPIAVAAFYKEVIGQADVVVERALDKHEEDMGGLLVEADKLRMTTLTKIVDILTAVQAADFLLAGKKLHLAMHEWGKSREHRRLEASGGDSGGNVTRE

SEQ ID NO: 83107 - protein, 193 aa, Arabidopsis thaliana
  peptide (1)..(193): Ceres Seq. ID no. 12668743
  misc_feature (1)..(193): Homolog of NCBI NO: 15233972 NR Description: putative protein; protein id: At4g18660.1
  misc_feature (1)..(188): Homolog of NCBI NO: 9758930 NR Description: tumor-related protein-like [Arabidopsis thaliana]
  misc_feature (1)..(178): Homolog of NCBI NO: 30694832 NR Description: tumor-related protein-like [Arabidopsis thaliana]
  misc_feature (1)..(178): Homolog of NCBI NO: 15233979 NR Description: putative protein; protein id: At4g18690.1
  misc_feature (1)..(99): Homolog of NCBI NO: 15233977 NR Description: putative protein; protein id: At4g18680.1
  misc_feature (51)..(190): Homolog of NCBI NO: 15233977 NR Description: putative protein; protein id: At4g18680.1
  misc_feature (1)..(172): Homolog of NCBI NO: 688423 NR Description: tumor-related protein [Nicotiana glauca x
  misc_feature (1)..(41): Homolog of NCBI NO: 15231945 NR Description: hypothetical protein; protein id: At3g14880.1
  misc_feature (50)..(178): Homolog of NCBI NO: 15231945 NR Description: hypothetical protein; protein id: At3g14880.1
  misc_feature (13)..(175): Homolog of NCBI NO: 34896008 NR Description: ESTs AU057825(S21823),AU057072(S21123) correspond a region of the predicted gene.~Similar to Nicotiana glauca X
MGGCRPSSFIRLVYAMCGSQTEHRLTNFFNNTNHDIDSNLSMALGETRGGIGGGESMSDLTAEQLFKINELHLKTVEAENKLTKVSASLQEDTADTPIAVAAFYKEVIGQADVVVERALDKHEEDMGGLLVEADKLRMTTLTKIVDILTAVQAADFLLAGKKLHLAMHEWGKSREHRRLEASGGDSGGNVTRE

SEQ ID NO: 83108 - DNA, 2044 bp, Arabidopsis thaliana
  misc_feature (1)..(2044): Ceres Seq. ID no. 12668748
  misc_feature: MA Experiment ID: 20000166 Result: Up-regulated in Transcription
  misc_feature: MA Experiment 20000166 PARAMETER Experiment Name: At_100uM_ABA_P Parameter: Age (day) Value: 14
  misc_feature: MA Experiment 20000166 PARAMETER Experiment Name: At_100uM_ABA_P Parameter: Organism Value: A. thaliana
  misc_feature: MA Experiment 20000166 PARAMETER Experiment Name: At_100uM_ABA_P Parameter: Plant Line Value: WS
  misc_feature: MA Experiment 20000166 PARAMETER Experiment Name: At_100uM_ABA_P Parameter: Timepoint (hr) Value: 1
  misc_feature: MA Experiment 20000166 PARAMETER Experiment Name: At_100uM_ABA_P Parameter: Tissue Value: Aerial
  misc_feature: MA Experiment 20000166 PARAMETER Experiment Name: At_100uM_ABA_P Parameter: Treatment Value: 100uM ABA vs. No Treatment
  misc_feature: MA Experiment ID: 20000234 Result: Down-regulated in Transcription
  misc_feature: MA Experiment 20000234 PARAMETER Experiment Name: At_Siliques_P Parameter: Age (day) Value: 21
  misc_feature: MA Experiment 20000234 PARAMETER Experiment Name: At_Siliques_P Parameter: Organism Value: A. thaliana
  misc_feature: MA Experiment 20000234 PARAMETER Experiment Name: At_Siliques_P Parameter: Plant Line Value: WS
  misc_feature: MA Experiment 20000234 PARAMETER Experiment Name: At_Siliques_P Parameter: Tissue Value: Less Than 5mm Siliques vs. Whole Plant
  misc_feature: MA Experiment ID: 20000235 Result: Down-regulated in Transcription
  misc_feature: MA Experiment 20000235 PARAMETER Experiment Name: At_Siliques_P Parameter: Age (day) Value: 21
  misc_feature: MA Experiment 20000235 PARAMETER Experiment Name: At_Siliques_P Parameter: Organism Value: A. thaliana
  misc_feature: MA Experiment 20000235 PARAMETER Experiment Name: At_Siliques_P Parameter: Plant Line Value: WS
  misc_feature: MA Experiment 20000235 PARAMETER Experiment Name: At_Siliques_P Parameter: Tissue Value: 5-10mm Siliques vs. Whole Plant
  misc_feature: MA Experiment ID: 20000794 Result: Up-regulated in Transcription
  misc_feature: MA Experiment 20000794 PARAMETER Experiment Name: At_Petals_P Parameter: Age (day) Value: 23-25 days
  misc_feature: MA Experiment 20000794 PARAMETER Experiment Name: At_Petals_P Parameter: Plant Line Value: WS
  misc_feature: MA Experiment 20000794 PARAMETER Experiment Name: At_Petals_P Parameter: Tissue Value: Petals vs. Whole plant
  misc_feature: MA Experiment ID: 20001247 Result: Up-regulated in Transcription
  misc_feature: MA Experiment 20001247 PARAMETER Experiment Name: At_Far-red-induction_P Parameter: Age (day) Value: 7
  misc_feature: MA Experiment 20001247 PARAMETER Experiment Name: At_Far-red-induction_P Parameter: Light Value: Far-red vs. White
  misc_feature: MA Experiment 20001247 PARAMETER Experiment Name: At_Far-red-induction_P Parameter: Organism Value: A. thaliana
  misc_feature: MA Experiment 20001247 PARAMETER Experiment Name: At_Far-red-induction_P Parameter: Plant Line Value: Columbia
  misc_feature: MA Experiment 20001247 PARAMETER Experiment Name: At_Far-red-induction_P Parameter: Timepoint (hr) Value: 1
  misc_feature: MA Experiment 20001247 PARAMETER Experiment Name: At_Far-red-induction_P Parameter: Tissue Value: Whole Plant
  misc_feature: MA Experiment ID: 20001557 Result: Up-regulated in Transcription
  misc_feature: MA Experiment 20001557 PARAMETER Experiment Name: At_Drought_Soil_Dry_P Parameter: Age (day) Value: 27
  misc_feature: MA Experiment 20001557 PARAMETER Experiment Name: At_Drought_Soil_Dry_P Parameter: Organism Value: A. thaliana
  misc_feature: MA Experiment 20001557 PARAMETER Experiment Name: At_Drought_Soil_Dry_P Parameter: Plant Line Value: WS
  misc_feature: MA Experiment 20001557 PARAMETER Experiment Name: At_Drought_Soil_Dry_P Parameter: Post Timepoint (hr) Value: 3
  misc_feature: MA Experiment 20001557 PARAMETER Experiment Name: At_Drought_Soil_Dry_P Parameter: Post-Treatment Value: Re-Water vs. No Drought
  misc_feature: MA Experiment 20001557 PARAMETER Experiment Name: At_Drought_Soil_Dry_P Parameter: Timepoint (day) Value: 13
  misc_feature: MA Experiment 20001557 PARAMETER Experiment Name: At_Drought_Soil_Dry_P Parameter: Treatment Value: Drought vs. No Drought
  misc_feature: MA Experiment ID: 20001905 Result: Up-regulated in Transcription
  misc_feature: MA Experiment 20001905 PARAMETER Experiment Name: At_Drought_Reproduction_P Parameter: Age (day) Value: 40
  misc_feature: MA Experiment 20001905 PARAMETER Experiment Name: At_Drought_Reproduction_P Parameter: Organism Value: A. thaliana
  misc_feature: MA Experiment 20001905 PARAMETER Experiment Name: At_Drought_Reproduction_P Parameter: Plant Line Value: WS
  misc_feature: MA Experiment 20001905 PARAMETER Experiment Name: At_Drought_Reproduction_P Parameter: Timepoint (day) Value: 10
  misc_feature: MA Experiment 20001905 PARAMETER Experiment Name: At_Drought_Reproduction_P Parameter: Tissue Value: Rosettes
  misc_feature: MA Experiment 20001905 PARAMETER Experiment Name: At_Drought_Reproduction_P Parameter: Treatment Value: Drought vs. No Drought
  misc_feature: MA Experiment ID: 20001910 Result: Up-regulated in Transcription
  misc_feature: MA Experiment 20001910 PARAMETER Experiment Name: At_Drought_Reproduction_P Parameter: Age (day) Value: 37
  misc_feature: MA Experiment 20001910 PARAMETER Experiment Name: At_Drought_Reproduction_P Parameter: Organism Value: A. thaliana
  misc_feature: MA Experiment 20001910 PARAMETER Experiment Name: At_Drought_Reproduction_P Parameter: Plant Line Value: WS
  misc_feature: MA Experiment 20001910 PARAMETER Experiment Name: At_Drought_Reproduction_P Parameter: Timepoint (day) Value: 7
  misc_feature: MA Experiment 20001910 PARAMETER Experiment Name: At_Drought_Reproduction_P Parameter: Tissue Value: Flowers
  misc_feature: MA Experiment 20001910 PARAMETER Experiment Name: At_Drought_Reproduction_P Parameter: Treatment Value: Drought vs. No Drought
aaaaacagtagagagagaaaccttcttcttctttcttcttcttctacaaaatttcacaaaacgagagagaggagagattcaaacaaacgaatcaacaggtgagaaattcgaaatctttgcgagctcgtctcgcccagaatctcgatttctccacctttcctcttcaattcatcttccaaatccctaaaaaaaagactcaaactttttaattttggtccaaaaaagactcaaactttcttcatcaatggcggagaaaatcacgagagagacgtcgttacctaaagagagaagcagcccacaagctctaatcctgggacgatacgaaatgggtaagcttctcggccatggtaccttcgctaaagtttacctcgcacgtaacgtgaaaacaaacgaaagcgtagcaatcaaagtaatcgacaaggagaaagttctcaaaggaggtttaatcgcacacatcaaacgcgagatctcgattcttcgacgtgttcgtcacccaaacatcgttcagctattcgaagtcatggcgacgaaagctaagatctatttcgtgatggagtatgttcgtggaggtgagttattcaataaagtagctaaaggtcgtcttaaagaagaagtagctcgcaaatatttccagcaattgatctctgctgttactttctgtcacgcgagaggtgtttatcatagagatctgaaacctgagaatcttttgttagatgagaatggtaatcttaaagtctctgactttggacttagtgctgtctctgatcagattcgtcaagatgggctttttcatacgttttgtggtactcctgcttatgttgctcctgaggttttagctaggaaaggttatgatgctgctaaagttgatatttggtcttgtggtgttatcttgtttgtgttgatggctggttatttgccgtttcatgatcggaatgttatggctatgtataagaagatttacagaggggagtttaggtgtcctaggtggttttctactgagcttaccaggttgttgtcgaagcttttggagacgaatccggagaaacggttcactttccctgagattatggagaattcttggtttaagaaagggtttaagcatattaagttttatgtggaggatgataagttgtgtaatgttgttgatgatgatgaactggagtctgactcggtggagtcggatagagattccgcggcttctgagtcggagattgagtatttggagcctaggaggagagttggagggttgcctagacctgcgagtttgaatgctttcgatattatatcgttttcgcaaggttttgatttatcgggtttgtttgatgacgatggggagggttctaggtttgtttcgggagctccggtttcgaagattatatcgaagttggaagagattgctaaagttgtgagctttactgtgaggaagaaggattgtagggtaagtcttgaaggttcaagacaaggagtgaaaggtccattgacgattgcagcagagatattcgaattgacaccatcgttggttgttgtggaagtcaagaagaaaggaggagataaaacagagtatgaagatttctgtaacaatgaattgaaacccaagttgcaaaacttgacagctgatgatgtagtagctgagcctgtcgcggtttcagcggttgatgaaaccgctatcccgaattctccaaccatttctttcttgccgtctgacactgaatagaaggacttgatggaagaccacaaagccagagatcatgaggggtatgtatgtacactgtatgttttgggttttgtaatctggattgggaaagaaaaaaagctgcttacggttggtgaaatttagaatcgaattatatgtaatacttatgtttctgttggagaggatcgttagagaaattgagttatgttttttactaaccttttagcagtttttttttgtaatgggagaattgtaaacagtttcgcataatcagatctttgatatgtataaaaacaatgaaataaataaaagaaagttcctttaaaaaaagtgaactctcgagagatctat

SEQ ID NO: 83109 - protein, 489 aa, Arabidopsis thaliana
  peptide (1)..(489): Ceres Seq. ID no. 12668749
  misc_feature (26)..(280): Pfam Name: Protein kinase domain Pfam Description: Protein kinase domain
  misc_feature (1)..(489): Homolog of NCBI NO: 15233981 NR Description: putative protein kinase; protein id: At4g18700.1, by cDNA: gi_13249122, supported by cDNA: gi_13448040, supported cDNA: gi_16648898 [Arabidopsis thaliana] >gi|7446437|pir||T04862
  misc_feature (1)..(459): Homolog of NCBI NO: 15242507 NR Description: serine threonine protein kinase; protein id: supported by cDNA: gi_14009295 [Arabidopsis thaliana]
  misc_feature (12)..(463): Homolog of NCBI NO: 15218854 NR Description: protein kinase PK4, putative; protein id: supported by cDNA: gi_14334387 [Arabidopsis thaliana]
  misc_feature (14)..(315): Homolog of NCBI NO: 27549573 NR Description: calcineurin B-like-interacting protein kinase
  misc_feature (293)..(473): Homolog of NCBI NO: 27549573 NR Description: calcineurin B-like-interacting protein kinase
  misc_feature (1)..(303): Homolog of NCBI NO: 5821067 NR Description: OsPK4 [Oryza sativa]
  misc_feature (302)..(455): Homolog of NCBI NO: 5821067 NR Description: OsPK4 [Oryza sativa]
  misc_feature (1)..(460): Homolog of NCBI NO: 15226241 NR Description: putative protein kinase; protein id: At2g34180.1, by cDNA: gi_13249124 [Arabidopsis thaliana]
  misc_feature (22)..(304): Homolog of NCBI NO: 6651177 NR Description: protein kinase PK4 [Zea mays]
  misc_feature (300)..(455): Homolog of NCBI NO: 6651177 NR Description: protein kinase PK4 [Zea mays]
MAEKITRETSLPKERSSPQALILGRYEMGKLLGHGTFAKVYLARNVKTNESVAIKVIDKEKVLKGGLIAHIKREISILRRVRHPNIVQLFEVMATKAKIYFVMEYVRGGELFNKVAKGRLKEEVARKYFQQLISAVTFCHARGVYHRDLKPENLLLDENGNLKVSDFGLSAVSDQIRQDGLFHTFCGTPAYVAPEVLARKGYDAAKVDIWSCGVILFVLMAGYLPFHDRNVMAMYKKIYRGEFRCPRWFSTELTRLLSKLLETNPEKRFTFPEIMENSWFKKGFKHIKFYVEDDKLCNVVDDDELESDSVESDRDSAASESEIEYLEPRRRVGGLPRPASLNAFDIISFSQGFDLSGLFDDDGEGSRFVSGAPVSKIISKLEEIAKVVSFTVRKKDCRVSLEGSRQGVKGPLTIAAEIFELTPSLVVVEVKKKGGDKTEYEDFCNNELKPKLQNLTADDVVAEPVAVSAVDETAIPNSPTISFLPSDTE

SEQ ID NO: 83110 - protein, 462 aa, Arabidopsis thaliana
  peptide (1)..(462): Ceres Seq. ID no. 12668750
  misc_feature (1)..(253): Pfam Name: Protein kinase domain Pfam Description: Protein kinase domain
  misc_feature (1)..(462): Homolog of NCBI NO: 15233981 NR Description: putative protein kinase; protein id: At4g18700.1, by cDNA: gi_13249122, supported by cDNA: gi_13448040, supported cDNA: gi_16648898 [Arabidopsis thaliana] >gi|7446437|pir||T04862
  misc_feature (1)..(432): Homolog of NCBI NO: 15242507 NR Description: serine threonine protein kinase; protein id: supported by cDNA: gi_14009295 [Arabidopsis thaliana]
  misc_feature (1)..(436): Homolog of NCBI NO: 15218854 NR Description: protein kinase PK4, putative; protein id: supported by cDNA: gi_14334387 [Arabidopsis thaliana]
  misc_feature (1)..(288): Homolog of NCBI NO: 27549573 NR Description: calcineurin B-like-interacting protein kinase
  misc_feature (266)..(446): Homolog of NCBI NO: 27549573 NR Description: calcineurin B-like-interacting protein kinase
  misc_feature (1)..(276): Homolog of NCBI NO: 5821067 NR Description: OsPK4 [Oryza sativa]
  misc_feature (275)..(428): Homolog of NCBI NO: 5821067 NR Description: OsPK4 [Oryza sativa]
  misc_feature (1)..(433): Homolog of NCBI NO: 15226241 NR Description: putative protein kinase; protein id: At2g34180.1, by cDNA: gi_13249124 [Arabidopsis thaliana]
  misc_feature (1)..(277): Homolog of NCBI NO: 6651177 NR Description: protein kinase PK4 [Zea mays]
  misc_feature (273)..(428): Homolog of NCBI NO: 6651177 NR Description: protein kinase PK4 [Zea mays]
MGKLLGHGTFAKVYLARNVKTNESVAIKVIDKEKVLKGGLIAHIKREISILRRVRHPNIVQLFEVMATKAKIYFVMEYVRGGELFNKVAKGRLKEEVARKYFQQLISAVTFCHARGVYHRDLKPENLLLDENGNLKVSDFGLSAVSDQIRQDGLFHTFCGTPAYVAPEVLARKGYDAAKVDIWSCGVILFVLMAGYLPFHDRNVMAMYKKIYRGEFRCPRWFSTELTRLLSKLLETNPEKRFTFPEIMENSWFKKGFKHIKFYVEDDKLCNVVDDDELESDSVESDRDSAASESEIEYLEPRRRVGGLPRPASLNAFDIISFSQGFDLSGLFDDDGEGSRFVSGAPVSKIISKLEEIAKVVSFTVRKKDCRVSLEGSRQGVKGPLTIAAEIFELTPSLVVVEVKKKGGDKTEYEDFCNNELKPKLQNLTADDVVAEPVAVSAVDETAIPNSPTISFLPSDTE

SEQ ID NO: 83111 - protein, 397 aa, Arabidopsis thaliana
  peptide (1)..(397): Ceres Seq. ID no. 12668751
  misc_feature (1)..(188): Pfam Name: Protein kinase domain Pfam Description: Protein kinase domain
  misc_feature (1)..(397): Homolog of NCBI NO: 15233981 NR Description: putative protein kinase; protein id: At4g18700.1, by cDNA: gi_13249122, supported by cDNA: gi_13448040, supported cDNA: gi_16648898 [Arabidopsis thaliana] >gi|7446437|pir||T04862
  misc_feature (1)..(367): Homolog of NCBI NO: 15242507 NR Description: serine threonine protein kinase; protein id: supported by cDNA: gi_14009295 [Arabidopsis thaliana]
  misc_feature (1)..(371): Homolog of NCBI NO: 15218854 NR Description: protein kinase PK4, putative; protein id: supported by cDNA: gi_14334387 [Arabidopsis thaliana]
  misc_feature (1)..(223): Homolog of NCBI NO: 27549573 NR Description: calcineurin B-like-interacting protein kinase
  misc_feature (201)..(381): Homolog of NCBI NO: 27549573 NR Description: calcineurin B-like-interacting protein kinase
  misc_feature (1)..(211): Homolog of NCBI NO: 5821067 NR Description: OsPK4 [Oryza sativa]
  misc_feature (210)..(363): Homolog of NCBI NO: 5821067 NR Description: OsPK4 [Oryza sativa]
  misc_feature (1)..(368): Homolog of NCBI NO: 15226241 NR Description: putative protein kinase; protein id: At2g34180.1, by cDNA: gi_13249124 [Arabidopsis thaliana]
  misc_feature (1)..(212): Homolog of NCBI NO: 6651177 NR Description: protein kinase PK4 [Zea mays]
  misc_feature (208)..(363): Homolog of NCBI NO: 6651177 NR Description: protein kinase PK4 [Zea mays]
MATKAKIYFVMEYVRGGELFNKVAKGRLKEEVARKYFQQLISAVTFCHARGVYHRDLKPENLLLDENGNLKVSDFGLSAVSDQIRQDGLFHTFCGTPAYVAPEVLARKGYDAAKVDIWSCGVILFVLMAGYLPFHDRNVMAMYKKIYRGEFRCPRWFSTELTRLLSKLLETNPEKRFTFPEIMENSWFKKGFKHIKFYVEDDKLCNVVDDDELESDSVESDRDSAASESEIEYLEPRRRVGGLPRPASLNAFDIISFSQGFDLSGLFDDDGEGSRFVSGAPVSKIISKLEEIAKVVSFTVRKKDCRVSLEGSRQGVKGPLTIAAEIFELTPSLVVVEVKKKGGDKTEYEDFCNNELKPKLQNLTADDVVAEPVAVSAVDETAIPNSPTISFLPSDTE

SEQ ID NO: 83112 - DNA, 2616 bp, Arabidopsis thaliana
  misc_feature (1)..(2616): Ceres Seq. ID no. 12668760
  misc_feature: MA Experiment ID: 20000173 Result: Down-regulated in Transcription
  misc_feature: MA Experiment 20000173 PARAMETER Experiment Name: At_42deg_Heat_P Parameter: Age (day) Value: 14
  misc_feature: MA Experiment 20000173 PARAMETER Experiment Name: At_42deg_Heat_P Parameter: Organism Value: A. thaliana
  misc_feature: MA Experiment 20000173 PARAMETER Experiment Name: At_42deg_Heat_P Parameter: Plant Line Value: WS
  misc_feature: MA Experiment 20000173 PARAMETER Experiment Name: At_42deg_Heat_P Parameter: Temperature (deg C) Value: 42 vs. 22
  misc_feature: MA Experiment 20000173 PARAMETER Experiment Name: At_42deg_Heat_P Parameter: Timepoint (hr) Value: 6
  misc_feature: MA Experiment 20000173 PARAMETER Experiment Name: At_42deg_Heat_P Parameter: Tissue Value: Aerial
  misc_feature: MA Experiment ID: 20000227 Result: Up-regulated in Transcription
  misc_feature: MA Experiment 20000227 PARAMETER Experiment Name: At_Root-Tips-vs-Tops_P Parameter: Tissue Value: Root Tips vs. Root Tops
  misc_feature: MA Experiment ID: 20001247 Result: Down-regulated in Transcription
  misc_feature: MA Experiment 20001247 PARAMETER Experiment Name: At_Far-red-induction_P Parameter: Age (day) Value: 7
  misc_feature: MA Experiment 20001247 PARAMETER Experiment Name: At_Far-red-induction_P Parameter: Light Value: Far-red vs. White
  misc_feature: MA Experiment 20001247 PARAMETER Experiment Name: At_Far-red-induction_P Parameter: Organism Value: A. thaliana
  misc_feature: MA Experiment 20001247 PARAMETER Experiment Name: At_Far-red-induction_P Parameter: Plant Line Value: Columbia
  misc_feature: MA Experiment 20001247 PARAMETER Experiment Name: At_Far-red-induction_P Parameter: Timepoint (hr) Value: 1
  misc_feature: MA Experiment 20001247 PARAMETER Experiment Name: At_Far-red-induction_P Parameter: Tissue Value: Whole Plant
  misc_feature: MA Experiment ID: 20001450 Result: Down-regulated in Transcription
  misc_feature: MA Experiment 20001450 PARAMETER Experiment Name: At_Far-red-induction_P Parameter: Age (day) Value: 7
  misc_feature: MA Experiment 20001450 PARAMETER Experiment Name: At_Far-red-induction_P Parameter: Light Value: Far-red vs. White
  misc_feature: MA Experiment 20001450 PARAMETER Experiment Name: At_Far-red-induction_P Parameter: Organism Value: A. thaliana
  misc_feature: MA Experiment 20001450 PARAMETER Experiment Name: At_Far-red-induction_P Parameter: Plant Line Value: Columbia
  misc_feature: MA Experiment 20001450 PARAMETER Experiment Name: At_Far-red-induction_P Parameter: Timepoint (hr) Value: 8
  misc_feature: MA Experiment 20001450 PARAMETER Experiment Name: At_Far-red-induction_P Parameter: Tissue Value: Whole Plant
  misc_feature: MA Experiment ID: 20001451 Result: Down-regulated in Transcription
  misc_feature: MA Experiment 20001451 PARAMETER Experiment Name: At_Far-red-induction_P Parameter: Age (day) Value: 7
  misc_feature: MA Experiment 20001451 PARAMETER Experiment Name: At_Far-red-induction_P Parameter: Light Value: Far-red vs. White
  misc_feature: MA Experiment 20001451 PARAMETER Experiment Name: At_Far-red-induction_P Parameter: Organism Value: A. thaliana
  misc_feature: MA Experiment 20001451 PARAMETER Experiment Name: At_Far-red-induction_P Parameter: Plant Line Value: Columbia
  misc_feature: MA Experiment 20001451 PARAMETER Experiment Name: At_Far-red-induction_P Parameter: Timepoint (hr) Value: 24
  misc_feature: MA Experiment 20001451 PARAMETER Experiment Name: At_Far-red-induction_P Parameter: Tissue Value: Whole Plant
  misc_feature: MA Experiment ID: 20001556 Result: Up-regulated in Transcription
  misc_feature: MA Experiment 20001556 PARAMETER Experiment Name: At_Drought_Soil_Dry_P Parameter: Age (day) Value: 26
  misc_feature: MA Experiment 20001556 PARAMETER Experiment Name: At_Drought_Soil_Dry_P Parameter: Organism Value: A. thaliana
  misc_feature: MA Experiment 20001556 PARAMETER Experiment Name: At_Drought_Soil_Dry_P Parameter: Plant Line Value: WS
  misc_feature: MA Experiment 20001556 PARAMETER Experiment Name: At_Drought_Soil_Dry_P Parameter: Post Timepoint (hr) Value: None
  misc_feature: MA Experiment 20001556 PARAMETER Experiment Name: At_Drought_Soil_Dry_P Parameter: Post-Treatment Value: None
  misc_feature: MA Experiment 20001556 PARAMETER Experiment Name: At_Drought_Soil_Dry_P Parameter: Timepoint (day) Value: 12
  misc_feature: MA Experiment 20001556 PARAMETER Experiment Name: At_Drought_Soil_Dry_P Parameter: Treatment Value: Drought vs. No Drought
  misc_feature: MA Experiment ID: 20001558 Result: Up-regulated in Transcription
  misc_feature: MA Experiment 20001558 PARAMETER Experiment Name: At_Drought_Soil_Dry_P Parameter: Age (day) Value: 27
  misc_feature: MA Experiment 20001558 PARAMETER Experiment Name: At_Drought_Soil_Dry_P Parameter: Organism Value: A. thaliana
  misc_feature: MA Experiment 20001558 PARAMETER Experiment Name: At_Drought_Soil_Dry_P Parameter: Plant Line Value: WS
  misc_feature: MA Experiment 20001558 PARAMETER Experiment Name: At_Drought_Soil_Dry_P Parameter: Post Timepoint (hr) Value: 6
  misc_feature: MA Experiment 20001558 PARAMETER Experiment Name: At_Drought_Soil_Dry_P Parameter: Post-Treatment Value: Re-Water vs. No Drought
  misc_feature: MA Experiment 20001558 PARAMETER Experiment Name: At_Drought_Soil_Dry_P Parameter: Timepoint (day) Value: 13
  misc_feature: MA Experiment 20001558 PARAMETER Experiment Name: At_Drought_Soil_Dry_P Parameter: Treatment Value: Drought vs. No Drought
atggcgatgttggtgacgaatttatcttcttcaagcttctgttttttttcctctcctcatttacaaaaccagaaggagatcagaagcggcgttagagttcgaaaatatgtgattttcaatagagcctcgttgagaacagtatcagattgtgttgattcgattacaacttttgatcgaagcgtaacagatgcgaacactcaattacggagattctgcgaatcagggaatctagagaacgccgtgaaacttctttgcgtatctggaaaatgggatattgatccgagaactttatgctctgttcttcagctctgtgctgattcgaaatctctcaaagatggtaaagaagttgataactttattcgtggtaatgggtttgtgatagattcgaatttgggatcaaaactctctcttatgtatacaaattgtggagatttgaaagaagcaagtagagtgttcgatgaggttaagatcgagaaagcattgttctggaatattttgatgaatgagcttgcaaaatctggtgactttagtgggagtattggattgtttaagaagatgatgagttctggtgttgaaatggatagctatactttttcttgtgtttcaaagagtttttcgtctttacgaagtgttcatggaggagagcagcttcatggatttattcttaaatcaggttttggagaaaggaactctgtggggaattctttggttgcattttatttgaagaatcagagagttgatagtgcacgtaaggtgtttgatgaaatgactgagagagatgttatatcttggaattctattattaatgggtatgtatcaaacggattagctgagaaagggctatctgttttcgtgcagatgttggtttcagggatagagattgatttggctactatagttagtgtttttgctggttgtgctgattctcgtttgatatcgttaggtagagctgttcatagtattggagtgaaagcttgttttagtagagaagatcggttttgtaatacattgcttgatatgtattcgaagtgtggtgatcttgattctgctaaagctgtgtttagggagatgagtgatcgaagtgttgtgtcgtatacttccatgattgctggttatgctagggaaggtttggctggtgaagctgtaaagttgtttgaagaaatggaggaagaaggtattagtcctgatgtttataccgtcactgctgttttaaattgttgtgctcgttatcggttgttagatgaaggcaagcgtgtgcatgagtggataaaggaaaacgatttgggatttgatatctttgtatcaaatgctctgatggatatgtatgcaaaatgtggaagcatgcaagaggcggagctagtcttctctgagatgcgtgtgaaagatatcatctcgtggaacaccattattggtgggtactcaaagaactgttacgccaatgaagctctaagcctgtttaatttgctgttggaagaaaagaggtttagtcctgatgagagaacagtggcgtgtgttcttccggcttgtgcaagtctttctgctttcgataaaggcagagaaatccacggttacatcatgagaaacgggtatttctcagatcggcatgttgctaattcgcttgtagacatgtacgcgaaatgtggtgcgttgttactcgctcatatgctctttgatgatattgcttccaaggatcttgtttcttggacagtgatgatagctggatatgggatgcacgggtttggaaaagaggcgattgctcttttcaatcaaatgagacaagcgggtattgaggctgatgaaatatcctttgtatctttgttgtatgcttgtagccattcaggactagttgatgaaggatggagattctttaacatcatgagacatgaatgcaagatcgagccaacggtggaacattatgcttgtatagttgacatgcttgcaagaactggagatttaatcaaagcttataggttcatcgagaacatgccaattccgccagatgctacaatctggggagctttgctgtgtggatgcaggatacatcatgatgttaagttagctgagaaagttgcagagaaagtctttgagcttgaaccagagaacacaggatattatgtactcatggcaaatatctacgcagaagctgagaaatgggaacaagtgaaaaggctaagaaagaggatagggcagcgcggattgaggaagaatccgggatgtagctggatagagataaagggtagagttaacatctttgtagctggagatagttcaaacccggaaactgaaaacattgaagcttttttgagaaaggtaagagctagaatgatagaagaaggatattcaccactgacgaaatacgctttgatcgatgcggaagagatggaaaaggaagaagctttatgtggtcatagtgagaaattagcaatggctttgggaatcataagctctggacatggaaagatcataagagttacaaagaatctaagagtttgtggagattgtcatgaaatggccaagttcatgtctaagttaaccagaagagagattgtcctaagagattcaaaccggtttcaccaatttaaagatggacattgttcttgcagaggtttctggtga

SEQ ID NO: 83113 - protein, 871 aa, Arabidopsis thaliana
  peptide (1)..(871): Ceres Seq. ID no. 12668761
  misc_feature (398)..(432): Pfam Name: PPR repeat Pfam Description: PPR repeat
  misc_feature (91)..(871): Homolog of NCBI NO: 34903762 NR Description: unnamed protein product [Oryza sativa (japonica group)] >gi|7340873|dbj|BAA92963.1| unnamed protein product
  misc_feature (65)..(871): Homolog of NCBI NO: 15228590 NR Description: hypothetical protein; protein id: At3g03580.1 thaliana] >gi|6091764|gb|AAF03474.1|AC009327_13 hypothetical [Arabidopsis thaliana] >gi|28393735|gb|AAO42278.1| unknown
  misc_feature (9)..(867): Homolog of NCBI NO: 15218216 NR Description: hypothetical protein; protein id: At1g15510.1
  misc_feature (99)..(871): Homolog of NCBI NO: 11281371 NR Description: hypothetical protein T8H10.30 - Arabidopsis >gi|6706414|emb|CAB66100.1| putative protein [Arabidopsis
  misc_feature (99)..(871): Homolog of NCBI NO: 30794008 NR Description: unknown protein [Arabidopsis thaliana]
  misc_feature (99)..(871): Homolog of NCBI NO: 30694644 NR Description: pentatricopeptide (PPR) repeat-containing protein
  misc_feature (100)..(871): Homolog of NCBI NO: 15220337 NR Description: hypothetical protein; protein id: At1g11290.1
  misc_feature (39)..(871): Homolog of NCBI NO: 18418348 NR Description: putative protein; protein id: At4g33990.1
  misc_feature (143)..(871): Homolog of NCBI NO: 18483237 NR Description: putative vegetative storage protein [Sorghum
  misc_feature (51)..(871): Homolog of NCBI NO: 30693150 NR Description: pentatricopeptide (PPR) repeat-containing protein
MAMLVTNLSSSSFCFFSSPHLQNQKEIRSGVRVRKYVIFNRASLRTVSDCVDSITTFDRSVTDANTQLRRFCESGNLENAVKLLCVSGKWDIDPRTLCSVLQLCADSKSLKDGKEVDNFIRGNGFVIDSNLGSKLSLMYTNCGDLKEASRVFDEVKIEKALFWNILMNELAKSGDFSGSIGLFKKMMSSGVEMDSYTFSCVSKSFSSLRSVHGGEQLHGFILKSGFGERNSVGNSLVAFYLKNQRVDSARKVFDEMTERDVISWNSIINGYVSNGLAEKGLSVFVQMLVSGIEIDLATIVSVFAGCADSRLISLGRAVHSIGVKACFSREDRFCNTLLDMYSKCGDLDSAKAVFREMSDRSVVSYTSMIAGYAREGLAGEAVKLFEEMEEEGISPDVYTVTAVLNCCARYRLLDEGKRVHEWIKENDLGFDIFVSNALMDMYAKCGSMQEAELVFSEMRVKDIISWNTIIGGYSKNCYANEALSLFNLLLEEKRFSPDERTVACVLPACASLSAFDKGREIHGYIMRNGYFSDRHVANSLVDMYAKCGALLLAHMLFDDIASKDLVSWTVMIAGYGMHGFGKEAIALFNQMRQAGIEADEISFVSLLYACSHSGLVDEGWRFFNIMRHECKIEPTVEHYACIVDMLARTGDLIKAYRFIENMPIPPDATIWGALLCGCRIHHDVKLAEKVAEKVFELEPENTGYYVLMANIYAEAEKWEQVKRLRKRIGQRGLRKNPGCSWIEIKGRVNIFVAGDSSNPETENIEAFLRKVRARMIEEGYSPLTKYALIDAEEMEKEEALCGHSEKLAMALGIISSGHGKIIRVTKNLRVCGDCHEMAKFMSKLTRREIVLRDSNRFHQFKDGHCSCRGFW

SEQ ID NO: 83114 - protein, 869 aa, Arabidopsis thaliana
  peptide (1)..(869): Ceres Seq. ID no. 12668762
  misc_feature (396)..(430): Pfam Name: PPR repeat Pfam Description: PPR repeat
  misc_feature (89)..(869): Homolog of NCBI NO: 34903762 NR Description: unnamed protein product [Oryza sativa (japonica group)] >gi|7340873|dbj|BAA92963.1| unnamed protein product
  misc_feature (63)..(869): Homolog of NCBI NO: 15228590 NR Description: hypothetical protein; protein id: At3g03580.1 thaliana] >gi|6091764|gb|AAF03474.1|AC009327_13 hypothetical [Arabidopsis thaliana] >gi|28393735|gb|AAO42278.1| unknown
  misc_feature (7)..(865): Homolog of NCBI NO: 15218216 NR Description: hypothetical protein; protein id: At1g15510.1
  misc_feature (97)..(869): Homolog of NCBI NO: 11281371 NR Description: hypothetical protein T8H10.30 - Arabidopsis >gi|6706414|emb|CAB66100.1| putative protein [Arabidopsis
  misc_feature (97)..(869): Homolog of NCBI NO: 30694644 NR Description: pentatricopeptide (PPR) repeat-containing protein
  misc_feature (97)..(869): Homolog of NCBI NO: 30794008 NR Description: unknown protein [Arabidopsis thaliana]
  misc_feature (98)..(869): Homolog of NCBI NO: 15220337 NR Description: hypothetical protein; protein id: At1g11290.1
  misc_feature (37)..(869): Homolog of NCBI NO: 18418348 NR Description: putative protein; protein id: At4g33990.1
  misc_feature (141)..(869): Homolog of NCBI NO: 18483237 NR Description: putative vegetative storage protein [Sorghum
  misc_feature (49)..(869): Homolog of NCBI NO: 30693150 NR Description: pentatricopeptide (PPR) repeat-containing protein
MLVTNLSSSSFCFFSSPHLQNQKEIRSGVRVRKYVIFNRASLRTVSDCVDSITTFDRSVTDANTQLRRFCESGNLENAVKLLCVSGKWDIDPRTLCSVLQLCADSKSLKDGKEVDNFIRGNGFVIDSNLGSKLSLMYTNCGDLKEASRVFDEVKIEKALFWNILMNELAKSGDFSGSIGLFKKMMSSGVEMDSYTFSCVSKSFSSLRSVHGGEQLHGFILKSGFGERNSVGNSLVAFYLKNQRVDSARKVFDEMTERDVISWNSIINGYVSNGLAEKGLSVFVQMLVSGIEIDLATIVSVFAGCADSRLISLGRAVHSIGVKACFSREDRFCNTLLDMYSKCGDLDSAKAVFREMSDRSVVSYTSMIAGYAREGLAGEAVKLFEEMEEEGISPDVYTVTAVLNCCARYRLLDEGKRVHEWIKENDLGFDIFVSNALMDMYAKCGSMQEAELVFSEMRVKDIISWNTIIGGYSKNCYANEALSLFNLLLEEKRFSPDERTVACVLPACASLSAFDKGREIHGYIMRNGYFSDRHVANSLVDMYAKCGALLLAHMLFDDIASKDLVSWTVMIAGYGMHGFGKEAIALFNQMRQAGIEADEISFVSLLYACSHSGLVDEGWRFFNIMRHECKIEPTVEHYACIVDMLARTGDLIKAYRFIENMPIPPDATIWGALLCGCRIHHDVKLAEKVAEKVFELEPENTGYYVLMANIYAEAEKWEQVKRLRKRIGQRGLRKNPGCSWIEIKGRVNIFVAGDSSNPETENIEAFLRKVRARMIEEGYSPLTKYALIDAEEMEKEEALCGHSEKLAMALGIISSGHGKIIRVTKNLRVCGDCHEMAKFMSKLTRREIVLRDSNRFHQFKDGHCSCRGFW

SEQ ID NO: 83115 - protein, 734 aa, Arabidopsis thaliana
  peptide (1)..(734): Ceres Seq. ID no. 12668763
  misc_feature (261)..(295): Pfam Name: PPR repeat Pfam Description: PPR repeat
  misc_feature (1)..(734): Homolog of NCBI NO: 34903762 NR Description: unnamed protein product [Oryza sativa (japonica group)] >gi|7340873|dbj|BAA92963.1| unnamed protein product
  misc_feature (1)..(734): Homolog of NCBI NO: 15228590 NR Description: hypothetical protein; protein id: At3g03580.1 thaliana] >gi|6091764|gb|AAF03474.1|AC009327_13 hypothetical [Arabidopsis thaliana] >gi|28393735|gb|AAO42278.1| unknown
  misc_feature (1)..(730): Homolog of NCBI NO: 15218216 NR Description: hypothetical protein; protein id: At1g15510.1
  misc_feature (1)..(734): Homolog of NCBI NO: 11281371 NR Description: hypothetical protein T8H10.30 - Arabidopsis >gi|6706414|emb|CAB66100.1| putative protein [Arabidopsis
  misc_feature (1)..(734): Homolog of NCBI NO: 30794008 NR Description: unknown protein [Arabidopsis thaliana]
  misc_feature (1)..(734): Homolog of NCBI NO: 30694644 NR Description: pentatricopeptide (PPR) repeat-containing protein
  misc_feature (1)..(734): Homolog of NCBI NO: 15220337 NR Description: hypothetical protein; protein id: At1g11290.1
  misc_feature (1)..(734): Homolog of NCBI NO: 18418348 NR Description: putative protein; protein id: At4g33990.1
  misc_feature (6)..(734): Homolog of NCBI NO: 18483237 NR Description: putative vegetative storage protein [Sorghum
  misc_feature (1)..(734): Homolog of NCBI NO: 30693150 NR Description: pentatricopeptide (PPR) repeat-containing protein
MYTNCGDLKEASRVFDEVKIEKALFWNILMNELAKSGDFSGSIGLFKKMMSSGVEMDSYTFSCVSKSFSSLRSVHGGEQLHGFILKSGFGERNSVGNSLVAFYLKNQRVDSARKVFDEMTERDVISWNSIINGYVSNGLAEKGLSVFVQMLVSGIEIDLATIVSVFAGCADSRLISLGRAVHSIGVKACFSREDRFCNTLLDMYSKCGDLDSAKAVFREMSDRSVVSYTSMIAGYAREGLAGEAVKLFEEMEEEGISPDVYTVTAVLNCCARYRLLDEGKRVHEWIKENDLGFDIFVSNALMDMYAKCGSMQEAELVFSEMRVKDIISWNTIIGGYSKNCYANEALSLFNLLLEEKRFSPDERTVACVLPACASLSAFDKGREIHGYIMRNGYFSDRHVANSLVDMYAKCGALLLAHMLFDDIASKDLVSWTVMIAGYGMHGFGKEAIALFNQMRQAGIEADEISFVSLLYACSHSGLVDEGWRFFNIMRHECKIEPTVEHYACIVDMLARTGDLIKAYRFIENMPIPPDATIWGALLCGCRIHHDVKLAEKVAEKVFELEPENTGYYVLMANIYAEAEKWEQVKRLRKRIGQRGLRKNPGCSWIEIKGRVNIFVAGDSSNPETENIEAFLRKVRARMIEEGYSPLTKYALIDAEEMEKEEALCGHSEKLAMALGIISSGHGKIIRVTKNLRVCGDCHEMAKFMSKLTRREIVLRDSNRFHQFKDGHCSCRGFW

SEQ ID NO: 83116 - DNA, 1904 bp, Arabidopsis thaliana
  misc_feature (1)..(1904): Ceres Seq. ID no. 12668779
  misc_feature: MA Experiment ID: 20000173 Result: Down-regulated in Transcription
  misc_feature: MA Experiment 20000173 PARAMETER Experiment Name: At_42deg_Heat_P Parameter: Age (day) Value: 14
  misc_feature: MA Experiment 20000173 PARAMETER Experiment Name: At_42deg_Heat_P Parameter: Organism Value: A. thaliana
  misc_feature: MA Experiment 20000173 PARAMETER Experiment Name: At_42deg_Heat_P Parameter: Plant Line Value: WS
  misc_feature: MA Experiment 20000173 PARAMETER Experiment Name: At_42deg_Heat_P Parameter: Temperature (deg C) Value: 42 vs. 22
  misc_feature: MA Experiment 20000173 PARAMETER Experiment Name: At_42deg_Heat_P Parameter: Timepoint (hr) Value: 6
  misc_feature: MA Experiment 20000173 PARAMETER Experiment Name: At_42deg_Heat_P Parameter: Tissue Value: Aerial
  misc_feature: MA Experiment ID: 20000179 Result: Down-regulated in Transcription
  misc_feature: MA Experiment 20000179 PARAMETER Experiment Name: At_Germinating_Seeds_P Parameter: Age (hr) Value: 6 vs. 0
  misc_feature: MA Experiment 20000179 PARAMETER Experiment Name: At_Germinating_Seeds_P Parameter: Tissue Value: Germinating Seeds
  misc_feature: MA Experiment ID: 20000180 Result: Down-regulated in Transcription
  misc_feature: MA Experiment 20000180 PARAMETER Experiment Name: At_Germinating_Seeds_P Parameter: Age (hr) Value: 24 vs. 0
  misc_feature: MA Experiment 20000180 PARAMETER Experiment Name: At_Germinating_Seeds_P Parameter: Tissue Value: Germinating Seeds
  misc_feature: MA Experiment ID: 20000184 Result: Down-regulated in Transcription
  misc_feature: MA Experiment 20000184 PARAMETER Experiment Name: At_Shoots__P Parameter: Age (day) Value: 7
  misc_feature: MA Experiment 20000184 PARAMETER Experiment Name: At_Shoots__P Parameter: Tissue Value: Shoots vs. Whole Plant
  misc_feature: MA Experiment ID: 20000185 Result: Down-regulated in Transcription
  misc_feature: MA Experiment 20000185 PARAMETER Experiment Name: At_Roots__P Parameter: Age (day) Value: 7 vs. 21
  misc_feature: MA Experiment 20000185 PARAMETER Experiment Name: At_Roots__P Parameter: Organism Value: A. thaliana
  misc_feature: MA Experiment 20000185 PARAMETER Experiment Name: At_Roots__P Parameter: Tissue Value: Roots vs. Whole Plant
  misc_feature: MA Experiment ID: 20000227 Result: Down-regulated in Transcription
  misc_feature: MA Experiment 20000227 PARAMETER Experiment Name: At_Root-Tips-vs-Tops_P Parameter: Tissue Value: Root Tips vs. Root Tops
  misc_feature: MA Experiment ID: 20000234 Result: Down-regulated in Transcription
  misc_feature: MA Experiment 20000234 PARAMETER Experiment Name: At_Siliques_P Parameter: Age (day) Value: 21
  misc_feature: MA Experiment 20000234 PARAMETER Experiment Name: At_Siliques_P Parameter: Organism Value: A. thaliana
  misc_feature: MA Experiment 20000234 PARAMETER Experiment Name: At_Siliques_P Parameter: Plant Line Value: WS
  misc_feature: MA Experiment 20000234 PARAMETER Experiment Name: At_Siliques_P Parameter: Tissue Value: Less Than 5mm Siliques vs. Whole Plant
  misc_feature: MA Experiment ID: 20000235 Result: Down-regulated in Transcription
  misc_feature: MA Experiment 20000235 PARAMETER Experiment Name: At_Siliques_P Parameter: Age (day) Value: 21
  misc_feature: MA Experiment 20000235 PARAMETER Experiment Name: At_Siliques_P Parameter: Organism Value: A. thaliana
  misc_feature: MA Experiment 20000235 PARAMETER Experiment Name: At_Siliques_P Parameter: Plant Line Value: WS
  misc_feature: MA Experiment 20000235 PARAMETER Experiment Name: At_Siliques_P Parameter: Tissue Value: 5-10mm Siliques vs. Whole Plant
  misc_feature: MA Experiment ID: 20000264 Result: Down-regulated in Transcription
  misc_feature: MA Experiment 20000264 PARAMETER Experiment Name: At_Open_Flower_P Parameter: Age (day) Value: 21
  misc_feature: MA Experiment 20000264 PARAMETER Experiment Name: At_Open_Flower_P Parameter: Plant Line Value: WS
  misc_feature: MA Experiment 20000264 PARAMETER Experiment Name: At_Open_Flower_P Parameter: Tissue Value: Open Flower vs. Whole Plant
  misc_feature: MA Experiment ID: 20000265 Result: Down-regulated in Transcription
  misc_feature: MA Experiment 20000265 PARAMETER Experiment Name: At_Open_Flower_P Parameter: Age (day) Value: 21
  misc_feature: MA Experiment 20000265 PARAMETER Experiment Name: At_Open_Flower_P Parameter: Plant Line Value: WS
  misc_feature: MA Experiment 20000265 PARAMETER Experiment Name: At_Open_Flower_P Parameter: Tissue Value: Closed Flower vs. Whole Plant
  misc_feature: MA Experiment ID: 20000286 Result: Down-regulated in Transcription
  misc_feature: MA Experiment 20000286 PARAMETER Experiment Name: At_Open_Flower_P Parameter: Age (day) Value: 21
  misc_feature: MA Experiment 20000286 PARAMETER Experiment Name: At_Open_Flower_P Parameter: Plant Line Value: WS
  misc_feature: MA Experiment 20000286 PARAMETER Experiment Name: At_Open_Flower_P Parameter: Tissue Value: Half Open vs. Whole Plant
  misc_feature: MA Experiment ID: 20000438 Result: Down-regulated in Transcription
  misc_feature: MA Experiment 20000438 PARAMETER Experiment Name: At_Shoots__P Parameter: Age (day) Value: 14
  misc_feature: MA Experiment 20000438 PARAMETER Experiment Name: At_Shoots__P Parameter: Tissue Value: Shoots vs. Whole Plant
  misc_feature: MA Experiment ID: 20000439 Result: Down-regulated in Transcription
  misc_feature: MA Experiment 20000439 PARAMETER Experiment Name: At_Roots__P Parameter: Age (day) Value: 14 vs. 21
  misc_feature: MA Experiment 20000439 PARAMETER Experiment Name: At_Roots__P Parameter: Organism Value: A. thaliana
  misc_feature: MA Experiment 20000439 PARAMETER Experiment Name: At_Roots__P Parameter: Tissue Value: Roots vs. Whole Plant
  misc_feature: MA Experiment ID: 20000460 Result: Up-regulated in Transcription
  misc_feature: MA Experiment 20000460 PARAMETER Experiment Name: At_10percent_PEG_P Parameter: Age (day) Value: 12
  misc_feature: MA Experiment 20000460 PARAMETER Experiment Name: At_10percent_PEG_P Parameter: Organism Value: A. thaliana
  misc_feature: MA Experiment 20000460 PARAMETER Experiment Name: At_10percent_PEG_P Parameter: Plant Line Value: WS
  misc_feature: MA Experiment 20000460 PARAMETER Experiment Name: At_10percent_PEG_P Parameter: Timepoint (day) Value: 12
  misc_feature: MA Experiment 20000460 PARAMETER Experiment Name: At_10percent_PEG_P Parameter: Tissue Value: Whole Plant
  misc_feature: MA Experiment 20000460 PARAMETER Experiment Name: At_10percent_PEG_P Parameter: Treatment Value: 10percent PEG vs. No Treatment
  misc_feature: MA Experiment ID: 20000495 Result: Down-regulated in Transcription
  misc_feature: MA Experiment 20000495 PARAMETER Experiment Name: At_Guard_Cells_P Parameter: Harvest Date Value: 8/2/2002
  misc_feature: MA Experiment 20000495 PARAMETER Experiment Name: At_Guard_Cells_P Parameter: Organism Value: A. thaliana
  misc_feature: MA Experiment 20000495 PARAMETER Experiment Name: At_Guard_Cells_P Parameter: Tissue Value: Guard Cells vs. Leaves
  misc_feature: MA Experiment ID: 20000573 Result: Down-regulated in Transcription
  misc_feature: MA Experiment 20000573 PARAMETER Experiment Name: At_100uM_ABA_Mutants__P Parameter: Organism Value: A. thaliana
  misc_feature: MA Experiment 20000573 PARAMETER Experiment Name: At_100uM_ABA_Mutants__P Parameter: Plant Line Value: CS22 vs. Ler wt
  misc_feature: MA Experiment 20000573 PARAMETER Experiment Name: At_100uM_ABA_Mutants__P Parameter: Timepoint (hr) Value: N/A
  misc_feature: MA Experiment 20000573 PARAMETER Experiment Name: At_100uM_ABA_Mutants__P Parameter: Tissue Value: Whole Plant
  misc_feature: MA Experiment 20000573 PARAMETER Experiment Name: At_100uM_ABA_Mutants__P Parameter: Treatment Value: None
  misc_feature: MA Experiment ID: 20000574 Result: Down-regulated in Transcription
  misc_feature: MA Experiment 20000574 PARAMETER Experiment Name: At_100uM_ABA_Mutants__P Parameter: Organism Value: A. thaliana
  misc_feature: MA Experiment 20000574 PARAMETER Experiment Name: At_100uM_ABA_Mutants__P Parameter: Plant Line Value: CS23 vs. Ler wt
  misc_feature: MA Experiment 20000574 PARAMETER Experiment Name: At_100uM_ABA_Mutants__P Parameter: Timepoint (hr) Value: N/A
  misc_feature: MA Experiment 20000574 PARAMETER Experiment Name: At_100uM_ABA_Mutants__P Parameter: Tissue Value: Whole Plant
  misc_feature: MA Experiment 20000574 PARAMETER Experiment Name: At_100uM_ABA_Mutants__P Parameter: Treatment Value: None
  misc_feature: MA Experiment ID: 20000794 Result: Down-regulated in Transcription
  misc_feature: MA Experiment 20000794 PARAMETER Experiment Name: At_Petals_P Parameter: Age (day) Value: 23-25 days
  misc_feature: MA Experiment 20000794 PARAMETER Experiment Name: At_Petals_P Parameter: Plant Line Value: WS
  misc_feature: MA Experiment 20000794 PARAMETER Experiment Name: At_Petals_P Parameter: Tissue Value: Petals vs. Whole plant
gctgcttgaaattctcttgtctgattaaaatatatatacccaagtccagaagctgtttaggttcgagaagcagagagggttcgagaagctaataagggtttcttctttttgattttaatgctaaaagggttctagattcgttgaattttacaagggttttaggggttcttagaagcttttgcttgattgtcttttatttagaaacagtggtgagtttttagtctttcactttgttcaagttcgaagctttttttggagggaattttgggcttctgattttgatcgaaacttactgatagtaagttctttgagtcctccttaactgtagtttctgtgtactgaagttattgaattgaaagtttttatcttttttggttattgaaactttcatagtttgatcaaaagagtctcttgctctgtttttggctctgtttttgtgagtgtgattgtaagctttgttgtgagtagattgaatcaaggagtgtgagagttgttaaaagtgttttcagagatggatgagaataatcatggagtttcatcaagctcacttccacctttcctcaccaaaacatatgagatggttgatgattcttcatccgattctatcgtctcttggagtcagagcaataagagtttcatcgtttggaatccgccggagttttctagagatcttcttccgagattcttcaagcacaataacttctctagctttatccgccagcttaacacatatggttttagaaaagctgatcctgagcaatgggaatttgcgaatgatgattttgtgagaggtcaacctcatcttatgaagaacattcatagacgcaaaccagttcatagccactctttaccgaatcttcaagctcagttaaacccgttgacggattcagaacgagtgagaatgaataatcagattgagagattgacaaaagagaaagaaggattgcttgaagagttacataaacaagacgaggaacgagaagtgtttgagatgcaagtgaaagaacttaaagaacgattacaacacatggagaagcgtcagaaaacaatggtttcgtttgtttctcaagtattggaaaagccagggcttgctttgaacctatcgccgtgtgttcccgaaacaaacgagaggaaaagaaggttccctaggatcgagttctttcccgatgaaccgatgttggaagagaacaaaacttgtgttgttgtgagagaggaaggttctacaagcccttcttcacacacaagagagcatcaagtggaacagttagagtcatcgatagcgatttgggagaatcttgtatcggattcttgtgagagtatgttacaatcaagaagtatgatgacacttgatgtggatgaatcatctacttttccagagagccctcctctttcttgcatacagttaagtgtcgattcacgtctcaaatctcctccttctccaaggatcatcgatatgaactgtgagcccgatggttcgaaagaacagaacactgttgctgctcctcctcctcctccagtagcaggagcgaatgatggcttctggcagcagtttttctcagagaatcctggctcaaccgagcaacgggaagttcaattagagaggaaagacgataaagataaagccggagtacgtactgagaaatgttggtggaattcgagaaatgttaatgcaattacagaacagcttggacatctgacttcttcagagagaagttgatatgtcaaagattaaatttctagtctgttttagttacttgtaaaatagggtttctcagttttattgttttcgattacagtacttaggtatggttcagctgtttatttatcacttgtatgatctttcacagttcattgtagcagacttcaatggtaatgataagctagagcttatggatagtattcat

SEQ ID NO: 83117 - protein, 401 aa, Arabidopsis thaliana
  peptide (1)..(401): Ceres Seq. ID no. 12668780
  misc_feature (14)..(184): Pfam Name: HSF-type DNA-binding Pfam Description: HSF-type DNA-binding
  misc_feature (1)..(401): Homolog of NCBI NO: 15234053 NR Description: heat shock transcription factor - like protein; id: At4g18880.1 [Arabidopsis thaliana] >gi|7485000|pir||T05025
  misc_feature (4)..(401): Homolog of NCBI NO: 3399765 NR Description: heat shock transcription factor 21 [Arabidopsis
  misc_feature (9)..(401): Homolog of NCBI NO: 16118447 NR Description: heat shock transcription factor [Phaseolus
  misc_feature (1)..(401): Homolog of NCBI NO: 5821138 NR Description: heat shock factor [Nicotiana tabacum]
  misc_feature (1)..(400): Homolog of NCBI NO: 7158882 NR Description: heat shock transcription factor [Medicago sativa]
  misc_feature (1)..(225): Homolog of NCBI NO: 15242478 NR Description: heat shock transcription factor; protein id: [Arabidopsis thaliana] >gi|9758674|dbj|BAB09213.1| heat shock
  misc_feature (7)..(268): Homolog of NCBI NO: 34909524 NR Description: putative heat shock factor [Oryza sativa cultivar- group)] >gi|14209551|dbj|BAB56047.1| putative heat
  misc_feature (280)..(401): Homolog of NCBI NO: 34909524 NR Description: putative heat shock factor [Oryza sativa cultivar- group)] >gi|14209551|dbj|BAB56047.1| putative heat
  misc_feature (7)..(269): Homolog of NCBI NO: 18414114 NR Description: Expressed protein; protein id: At4g13980.1, by cDNA: gi_14517386 [Arabidopsis thaliana] AT4g13980/dl3030c [Arabidopsis thaliana]
  misc_feature (321)..(359): Homolog of NCBI NO: 18414114 NR Description: Expressed protein; protein id: At4g13980.1, by cDNA: gi_14517386 [Arabidopsis thaliana] AT4g13980/dl3030c [Arabidopsis thaliana]
MDENNHGVSSSSLPPFLTKTYEMVDDSSSDSIVSWSQSNKSFIVWNPPEFSRDLLPRFFKHNNFSSFIRQLNTYGFRKADPEQWEFANDDFVRGQPHLMKNIHRRKPVHSHSLPNLQAQLNPLTDSERVRMNNQIERLTKEKEGLLEELHKQDEEREVFEMQVKELKERLQHMEKRQKTMVSFVSQVLEKPGLALNLSPCVPETNERKRRFPRIEFFPDEPMLEENKTCVVVREEGSTSPSSHTREHQVEQLESSIAIWENLVSDSCESMLQSRSMMTLDVDESSTFPESPPLSCIQLSVDSRLKSPPSPRIIDMNCEPDGSKEQNTVAAPPPPPVAGANDGFWQQFFSENPGSTEQREVQLERKDDKDKAGVRTEKCWWNSRNVNAITEQLGHLTSSERS

SEQ ID NO: 83118 - protein, 379 aa, Arabidopsis thaliana
  peptide (1)..(379): Ceres Seq. ID no. 12668781
  misc_feature (1)..(162): Pfam Name: HSF-type DNA-binding Pfam Description: HSF-type DNA-binding
  misc_feature (1)..(379): Homolog of NCBI NO: 15234053 NR Description: heat shock transcription factor - like protein; id: At4g18880.1 [Arabidopsis thaliana] >gi|7485000|pir||T05025
  misc_feature (1)..(379): Homolog of NCBI NO: 3399765 NR Description: heat shock transcription factor 21 [Arabidopsis
  misc_feature (1)..(379): Homolog of NCBI NO: 16118447 NR Description: heat shock transcription factor [Phaseolus
  misc_feature (1)..(379): Homolog of NCBI NO: 5821138 NR Description: heat shock factor [Nicotiana tabacum]
  misc_feature (1)..(378): Homolog of NCBI NO: 7158882 NR Description: heat shock transcription factor [Medicago sativa]
  misc_feature (1)..(203): Homolog of NCBI NO: 15242478 NR Description: heat shock transcription factor; protein id: [Arabidopsis thaliana] >gi|9758674|dbj|BAB09213.1| heat shock
  misc_feature (1)..(246): Homolog of NCBI NO: 34909524 NR Description: putative heat shock factor [Oryza sativa cultivar- group)] >gi|14209551|dbj|BAB56047.1| putative heat
  misc_feature (258)..(379): Homolog of NCBI NO: 34909524 NR Description: putative heat shock factor [Oryza sativa cultivar- group)] >gi|14209551|dbj|BAB56047.1| putative heat
  misc_feature (1)..(247): Homolog of NCBI NO: 18414114 NR Description: Expressed protein; protein id: At4g13980.1, by cDNA: gi_14517386 [Arabidopsis thaliana] AT4g13980/dl3030c [Arabidopsis thaliana]
  misc_feature (299)..(337): Homolog of NCBI NO: 18414114 NR Description: Expressed protein; protein id: At4g13980.1, by cDNA: gi_14517386 [Arabidopsis thaliana] AT4g13980/dl3030c [Arabidopsis thaliana]
MVDDSSSDSIVSWSQSNKSFIVWNPPEFSRDLLPRFFKHNNFSSFIRQLNTYGFRKADPEQWEFANDDFVRGQPHLMKNIHRRKPVHSHSLPNLQAQLNPLTDSERVRMNNQIERLTKEKEGLLEELHKQDEEREVFEMQVKELKERLQHMEKRQKTMVSFVSQVLEKPGLALNLSPCVPETNERKRRFPRIEFFPDEPMLEENKTCVVVREEGSTSPSSHTREHQVEQLESSIAIWENLVSDSCESMLQSRSMMTLDVDESSTFPESPPLSCIQLSVDSRLKSPPSPRIIDMNCEPDGSKEQNTVAAPPPPPVAGANDGFWQQFFSENPGSTEQREVQLERKDDKDKAGVRTEKCWWNSRNVNAITEQLGHLTSSERS

SEQ ID NO: 83119 - protein, 303 aa, Arabidopsis thaliana
  peptide (1)..(303): Ceres Seq. ID no. 12668782
  misc_feature (1)..(86): Pfam Name: HSF-type DNA-binding Pfam Description: HSF-type DNA-binding
  misc_feature (1)..(303): Homolog of NCBI NO: 15234053 NR Description: heat shock transcription factor - like protein; id: At4g18880.1 [Arabidopsis thaliana] >gi|7485000|pir||T05025
  misc_feature (1)..(303): Homolog of NCBI NO: 3399765 NR Description: heat shock transcription factor 21 [Arabidopsis
  misc_feature (1)..(303): Homolog of NCBI NO: 16118447 NR Description: heat shock transcription factor [Phaseolus
  misc_feature (1)..(303): Homolog of NCBI NO: 5821138 NR Description: heat shock factor [Nicotiana tabacum]
  misc_feature (1)..(302): Homolog of NCBI NO: 7158882 NR Description: heat shock transcription factor [Medicago sativa]
  misc_feature (1)..(127): Homolog of NCBI NO: 15242478 NR Description: heat shock transcription factor; protein id: [Arabidopsis thaliana] >gi|9758674|dbj|BAB09213.1| heat shock
  misc_feature (1)..(170): Homolog of NCBI NO: 34909524 NR Description: putative heat shock factor [Oryza sativa cultivar- group)] >gi|14209551|dbj|BAB56047.1| putative heat
  misc_feature (182)..(303): Homolog of NCBI NO: 34909524 NR Description: putative heat shock factor [Oryza sativa cultivar- group)] >gi|14209551|dbj|BAB56047.1| putative heat
  misc_feature (1)..(171): Homolog of NCBI NO: 18414114 NR Description: Expressed protein; protein id: At4g13980.1, by cDNA: gi_14517386 [Arabidopsis thaliana] AT4g13980/dl3030c [Arabidopsis thaliana]
  misc_feature (223)..(261): Homolog of NCBI NO: 18414114 NR Description: Expressed protein; protein id: At4g13980.1, by cDNA: gi_14517386 [Arabidopsis thaliana] AT4g13980/dl3030c [Arabidopsis thaliana]
MKNIHRRKPVHSHSLPNLQAQLNPLTDSERVRMNNQIERLTKEKEGLLEELHKQDEEREVFEMQVKELKERLQHMEKRQKTMVSFVSQVLEKPGLALNLSPCVPETNERKRRFPRIEFFPDEPMLEENKTCVVVREEGSTSPSSHTREHQVEQLESSIAIWENLVSDSCESMLQSRSMMTLDVDESSTFPESPPLSCIQLSVDSRLKSPPSPRIIDMNCEPDGSKEQNTVAAPPPPPVAGANDGFWQQFFSENPGSTEQREVQLERKDDKDKAGVRTEKCWWNSRNVNAITEQLGHLTSSERS

SEQ ID NO: 83120 - DNA, 864 bp, Arabidopsis thaliana
  misc_feature (1)..(864): Ceres Seq. ID no. 12668795
  misc_feature: MA Experiment ID: 20000185 Result: Down-regulated in Transcription
  misc_feature: MA Experiment 20000185 PARAMETER Experiment Name: At_Roots__P Parameter: Age (day) Value: 7 vs. 21
  misc_feature: MA Experiment 20000185 PARAMETER Experiment Name: At_Roots__P Parameter: Organism Value: A. thaliana
  misc_feature: MA Experiment 20000185 PARAMETER Experiment Name: At_Roots__P Parameter: Tissue Value: Roots vs. Whole Plant
  misc_feature: MA Experiment ID: 20000439 Result: Down-regulated in Transcription
  misc_feature: MA Experiment 20000439 PARAMETER Experiment Name: At_Roots__P Parameter: Age (day) Value: 14 vs. 21
  misc_feature: MA Experiment 20000439 PARAMETER Experiment Name: At_Roots__P Parameter: Organism Value: A. thaliana
  misc_feature: MA Experiment 20000439 PARAMETER Experiment Name: At_Roots__P Parameter: Tissue Value: Roots vs. Whole Plant
  misc_feature: MA Experiment ID: 20000573 Result: Up-regulated in Transcription
  misc_feature: MA Experiment 20000573 PARAMETER Experiment Name: At_100uM_ABA_Mutants__P Parameter: Organism Value: A. thaliana
  misc_feature: MA Experiment 20000573 PARAMETER Experiment Name: At_100uM_ABA_Mutants__P Parameter: Plant Line Value: CS22 vs. Ler wt
  misc_feature: MA Experiment 20000573 PARAMETER Experiment Name: At_100uM_ABA_Mutants__P Parameter: Timepoint (hr) Value: N/A
  misc_feature: MA Experiment 20000573 PARAMETER Experiment Name: At_100uM_ABA_Mutants__P Parameter: Tissue Value: Whole Plant
  misc_feature: MA Experiment 20000573 PARAMETER Experiment Name: At_100uM_ABA_Mutants__P Parameter: Treatment Value: None
  misc_feature: MA Experiment ID: 20000794 Result: Up-regulated in Transcription
  misc_feature: MA Experiment 20000794 PARAMETER Experiment Name: At_Petals_P Parameter: Age (day) Value: 23-25 days
  misc_feature: MA Experiment 20000794 PARAMETER Experiment Name: At_Petals_P Parameter: Plant Line Value: WS
  misc_feature: MA Experiment 20000794 PARAMETER Experiment Name: At_Petals_P Parameter: Tissue Value: Petals vs. Whole plant
  misc_feature: MA Experiment ID: 20001557 Result: Down-regulated in Transcription
  misc_feature: MA Experiment 20001557 PARAMETER Experiment Name: At_Drought_Soil_Dry_P Parameter: Age (day) Value: 27
  misc_feature: MA Experiment 20001557 PARAMETER Experiment Name: At_Drought_Soil_Dry_P Parameter: Organism Value: A. thaliana
  misc_feature: MA Experiment 20001557 PARAMETER Experiment Name: At_Drought_Soil_Dry_P Parameter: Plant Line Value: WS
  misc_feature: MA Experiment 20001557 PARAMETER Experiment Name: At_Drought_Soil_Dry_P Parameter: Post Timepoint (hr) Value: 3
  misc_feature: MA Experiment 20001557 PARAMETER Experiment Name: At_Drought_Soil_Dry_P Parameter: Post-Treatment Value: Re-Water vs. No Drought
  misc_feature: MA Experiment 20001557 PARAMETER Experiment Name: At_Drought_Soil_Dry_P Parameter: Timepoint (day) Value: 13
  misc_feature: MA Experiment 20001557 PARAMETER Experiment Name: At_Drought_Soil_Dry_P Parameter: Treatment Value: Drought vs. No Drought
atggcgctctgtaacttgaatccaactcaagggatattcccattgcaaggcttatcaaaatctcaagaatttatatgcttttctttgcttcaatctccacgttgcggaagttactcctcgttgaagacgaaaaggtttggcttttgcatcagatcaaagttctcagagaaggaagctgggaaattggacagaggttatgttgccactgtgaacagcaaggaaataaagaaagtggggaagaaagagcatcacttgtggaagaagaatgactctgctgggtctggacagaaagcacttaatcttgttcgaatgctctctggactcccaaatgaaaaagaggctgtttatggagctttgaataaatgggtagcttgggaggttgaatttcccattattgctgcagctaaggcgttgcaaatcttaagaaagagaagtcagtggcatcgtgtgattcaattggctaagtggatgttaagcaaagggcaaggtgctacaatgggaacatacgatatcctcttattggcatttgatatggacgaaagggctgatgaggcagagtccttatggaacatgattctgcacacacatacacgatccatcccaagacgcttgttcgctaggatgatagcgttgtatgctcaccatgaccttcacgataaggttatcgaggtctttgcagacatggaagagctgaaggtgagcccagacgaagactctgcgaggagagtggcacgagccttcagggaactcaaccaagaagaaaatcgaaaactgatccttagaaggtacctctctgaatacaaatacatctacttcaatggtgagcgggttagagtcaaaagatatttctctgaagatagttga

SEQ ID NO: 83121 - protein, 287 aa, Arabidopsis thaliana
  peptide (1)..(287): Ceres Seq. ID no. 12668796
  misc_feature (203)..(237): Pfam Name: PPR repeat Pfam Description: PPR repeat
  misc_feature (1)..(287): Homolog of NCBI NO: 18415213 NR Description: putative protein; protein id: At4g18975.1
  misc_feature (53)..(275): Homolog of NCBI NO: 7485419 NR Description: hypothetical protein F13C5.140 - Arabidopsis >gi|2832625|emb|CAA16754.1| putative protein [Arabidopsis >gi|7268691|emb|CAB78899.1| putative protein [Arabidopsis
  misc_feature (75)..(281): Homolog of NCBI NO: 34393638 NR Description: pentatricopeptide (PPR) repeat-containing
  misc_feature (85)..(280): Homolog of NCBI NO: 18415645 NR Description: putative protein; protein id: At4g21190.1, by cDNA: 106883. [Arabidopsis thaliana]
  misc_feature (50)..(280): Homolog of NCBI NO: 7486589 NR Description: hypothetical protein F7J7.130 - Arabidopsis >gi|2911076|emb|CAA17538.1| putative protein [Arabidopsis >gi|7268916|emb|CAB79119.1| putative protein [Arabidopsis
  misc_feature (104)..(282): Homolog of NCBI NO: 34909686 NR Description: B1131G08.1 [Oryza sativa (japonica
  misc_feature (37)..(263): Homolog of NCBI NO: 18390413 NR Description: expressed protein; protein id: At1g04590.1, by cDNA: gi_13430645 [Arabidopsis thaliana] unknown protein [Arabidopsis thaliana]
  misc_feature (104)..(263): Homolog of NCBI NO: 25406795 NR Description: hypothetical protein [imported] - Arabidopsis >gi|2494119|gb|AAB80628.1| EST gb|T04104 comes from this gene.
  misc_feature (37)..(263): Homolog of NCBI NO: 30678929 NR Description: expressed protein [Arabidopsis thaliana]
MALCNLNPTQGIFPLQGLSKSQEFICFSLLQSPRCGSYSSLKTKRFGFCIRSKFSEKEAGKLDRGYVATVNSKEIKKVGKKEHHLWKKNDSAGSGQKALNLVRMLSGLPNEKEAVYGALNKWVAWEVEFPIIAAAKALQILRKRSQWHRVIQLAKWMLSKGQGATMGTYDILLLAFDMDERADEAESLWNMILHTHTRSIPRRLFARMIALYAHHDLHDKVIEVFADMEELKVSPDEDSARRVARAFRELNQEENRKLILRRYLSEYKYIYFNGERVRVKRYFSEDS

SEQ ID NO: 83122 - protein, 184 aa, Arabidopsis thaliana
  peptide (1)..(184): Ceres Seq. ID no. 12668797
  misc_feature (100)..(134): Pfam Name: PPR repeat Pfam Description: PPR repeat
  misc_feature (1)..(184): Homolog of NCBI NO: 18415213 NR Description: putative protein; protein id: At4g18975.1
  misc_feature (1)..(172): Homolog of NCBI NO: 7485419 NR Description: hypothetical protein F13C5.140 - Arabidopsis >gi|2832625|emb|CAA16754.1| putative protein [Arabidopsis >gi|7268691|emb|CAB78899.1| putative protein [Arabidopsis
  misc_feature (1)..(178): Homolog of NCBI NO: 34393638 NR Description: pentatricopeptide (PPR) repeat-containing
  misc_feature (1)..(177): Homolog of NCBI NO: 18415645 NR Description: putative protein; protein id: At4g21190.1, by cDNA: 106883. [Arabidopsis thaliana]
  misc_feature (1)..(177): Homolog of NCBI NO: 7486589 NR Description: hypothetical protein F7J7.130 - Arabidopsis >gi|2911076|emb|CAA17538.1| putative protein [Arabidopsis >gi|7268916|emb|CAB79119.1| putative protein [Arabidopsis
  misc_feature (1)..(179): Homolog of NCBI NO: 34909686 NR Description: B1131G08.1 [Oryza sativa (japonica
  misc_feature (1)..(160): Homolog of NCBI NO: 18390413 NR Description: expressed protein; protein id: At1g04590.1, by cDNA: gi_13430645 [Arabidopsis thaliana] unknown protein [Arabidopsis thaliana]
  misc_feature (1)..(160): Homolog of NCBI NO: 25406795 NR Description: hypothetical protein [imported] - Arabidopsis >gi|2494119|gb|AAB80628.1| EST gb|T04104 comes from this gene.
  misc_feature (1)..(160): Homolog of NCBI NO: 30678929 NR Description: expressed protein [Arabidopsis thaliana]
MLSGLPNEKEAVYGALNKWVAWEVEFPIIAAAKALQILRKRSQWHRVIQLAKWMLSKGQGATMGTYDILLLAFDMDERADEAESLWNMILHTHTRSIPRRLFARMIALYAHHDLHDKVIEVFADMEELKVSPDEDSARRVARAFRELNQEENRKLILRRYLSEYKYIYFNGERVRVKRYFSEDS

SEQ ID NO: 83123 - DNA, 1105 bp, Arabidopsis thaliana
  misc_feature (1)..(1105): Ceres Seq. ID no. 12668798
  misc_feature: MA Experiment ID: 20000182 Result: Up-regulated in Transcription
  misc_feature: MA Experiment 20000182 PARAMETER Experiment Name: At_2mM_SA_P Parameter: Age (day) Value: 14
  misc_feature: MA Experiment 20000182 PARAMETER Experiment Name: At_2mM_SA_P Parameter: Organism Value: A. thaliana
  misc_feature: MA Experiment 20000182 PARAMETER Experiment Name: At_2mM_SA_P Parameter: Plant Line Value: WS
  misc_feature: MA Experiment 20000182 PARAMETER Experiment Name: At_2mM_SA_P Parameter: Timepoint (hr) Value: 6
  misc_feature: MA Experiment 20000182 PARAMETER Experiment Name: At_2mM_SA_P Parameter: Tissue Value: Aerial
  misc_feature: MA Experiment 20000182 PARAMETER Experiment Name: At_2mM_SA_P Parameter: Treatment Value: 2mM SA vs. No Treatment
  misc_feature: MA Experiment ID: 20000264 Result: Up-regulated in Transcription
  misc_feature: MA Experiment 20000264 PARAMETER Experiment Name: At_Open_Flower_P Parameter: Age (day) Value: 21
  misc_feature: MA Experiment 20000264 PARAMETER Experiment Name: At_Open_Flower_P Parameter: Plant Line Value: WS
  misc_feature: MA Experiment 20000264 PARAMETER Experiment Name: At_Open_Flower_P Parameter: Tissue Value: Open Flower vs. Whole Plant
  misc_feature: MA Experiment ID: 20000438 Result: Down-regulated in Transcription
  misc_feature: MA Experiment 20000438 PARAMETER Experiment Name: At_Shoots__P Parameter: Age (day) Value: 14
  misc_feature: MA Experiment 20000438 PARAMETER Experiment Name: At_Shoots__P Parameter: Tissue Value: Shoots vs. Whole Plant
  misc_feature: MA Experiment ID: 20000439 Result: Down-regulated in Transcription
  misc_feature: MA Experiment 20000439 PARAMETER Experiment Name: At_Roots__P Parameter: Age (day) Value: 14 vs. 21
  misc_feature: MA Experiment 20000439 PARAMETER Experiment Name: At_Roots__P Parameter: Organism Value: A. thaliana
  misc_feature: MA Experiment 20000439 PARAMETER Experiment Name: At_Roots__P Parameter: Tissue Value: Roots vs. Whole Plant
  misc_feature: MA Experiment ID: 20000453 Result: Up-regulated in Transcription
  misc_feature: MA Experiment 20000453 PARAMETER Experiment Name: At_100uM_ABA_P Parameter: Age (day) Value: 15
  misc_feature: MA Experiment 20000453 PARAMETER Experiment Name: At_100uM_ABA_P Parameter: Organism Value: A. thaliana
  misc_feature: MA Experiment 20000453 PARAMETER Experiment Name: At_100uM_ABA_P Parameter: Plant Line Value: WS
  misc_feature: MA Experiment 20000453 PARAMETER Experiment Name: At_100uM_ABA_P Parameter: Timepoint (hr) Value: 24
  misc_feature: MA Experiment 20000453 PARAMETER Experiment Name: At_100uM_ABA_P Parameter: Tissue Value: Aerial
  misc_feature: MA Experiment 20000453 PARAMETER Experiment Name: At_100uM_ABA_P Parameter: Treatment Value: 100uM ABA vs. No Treatment
  misc_feature: MA Experiment ID: 20000794 Result: Up-regulated in Transcription
  misc_feature: MA Experiment 20000794 PARAMETER Experiment Name: At_Petals_P Parameter: Age (day) Value: 23-25 days
  misc_feature: MA Experiment 20000794 PARAMETER Experiment Name: At_Petals_P Parameter: Plant Line Value: WS
  misc_feature: MA Experiment 20000794 PARAMETER Experiment Name: At_Petals_P Parameter: Tissue Value: Petals vs. Whole plant
  misc_feature: MA Experiment ID: 20001905 Result: Up-regulated in Transcription
  misc_feature: MA Experiment 20001905 PARAMETER Experiment Name: At_Drought_Reproduction_P Parameter: Age (day) Value: 40
  misc_feature: MA Experiment 20001905 PARAMETER Experiment Name: At_Drought_Reproduction_P Parameter: Organism Value: A. thaliana
  misc_feature: MA Experiment 20001905 PARAMETER Experiment Name: At_Drought_Reproduction_P Parameter: Plant Line Value: WS
  misc_feature: MA Experiment 20001905 PARAMETER Experiment Name: At_Drought_Reproduction_P Parameter: Timepoint (day) Value: 10
  misc_feature: MA Experiment 20001905 PARAMETER Experiment Name: At_Drought_Reproduction_P Parameter: Tissue Value: Rosettes
  misc_feature: MA Experiment 20001905 PARAMETER Experiment Name: At_Drought_Reproduction_P Parameter: Treatment Value: Drought vs. No Drought
atgagagattcaatctatcttttatggattgataatcgattagtggtaataattatgatggtgatgatggtatcatgtagatgcgttttgggattggagaacataaatccgatattcttcgatgaaggtctttctcatttgtttggtgaaggtaatctcatccgatctcctgatgatcgtagcgttcgattactcctcgacaaatacactgggtccggatttatctcttcaagcatgtatcaacatgggtttttcagttcgttgataaagttgccaggagcgtacacggctggtatcgtcgtcgctttctatacatcaaatggtgatgtgtttgtgaaggaccatgacgaactagacatagagtttttagggaacctagaaggaaagccttggcgatttcaaacgaatatgtatggaaacggtagcacaaaccgcggccgcgaagaacgctaccgtctttggtttgatccttccaaggagtttcaccgttatagcatcctttggacccctaccaaaataatattttgggtagatgatgtaccaataagagaaatcctaagaaaagaggaaatgaatggagactatccacaaaagccaatgtctctctatgcaaccatttgggacgcctcaagttgggctacttccggtggaaaattcggcgtcgactacacattttcaccttttgtttccgaattcaaagatatagccctcgacggttgtaatgtctctgactcattccccggagaaaacaacaacaacaacatcggtaattacaataacataaattgttctgtctccgaccaatttctcatgagcaatgactactcaaccattagtcctaaacaagcaactgctatgcgacggttccgagaacgttatatgtattattcgtattgttatgacaccattcgatactcggtgcctccaccggagtgtgttattgtgacggctgagaagaaccggtttagagatactggacggttaaagtttggtggtagtcatcctaaagtgcataaagcacgtaagaaacggcgacggaatcggtctacgccggttgtatcggctgacctatagcattaagttagttgaatttattaccgagtat

SEQ ID NO: 83124 - protein, 357 aa, Arabidopsis thaliana
  peptide (1)..(357): Ceres Seq. ID no. 12668799
  misc_feature (40)..(225): Pfam Name: Glycosyl hydrolases family 16 Pfam Description: Glycosyl hydrolases family 16
  misc_feature (1)..(357): Homolog of NCBI NO: 15234083 NR Description: xyloglucan endotransglycosylase, putative; id: At4g18990.1 [Arabidopsis thaliana]
  misc_feature (1)..(255): Homolog of NCBI NO: 7447409 NR Description: xyloglucan endo-1,4-beta-D-glucanase (EC 3.2.1.-)
  misc_feature (260)..(357): Homolog of NCBI NO: 7447409 NR Description: xyloglucan endo-1,4-beta-D-glucanase (EC 3.2.1.-)
  misc_feature (17)..(356): Homolog of NCBI NO: 2129774 NR Description: xyloglucan endo-1,4-beta-D-glucanase (EC 3.2.1.-) - Arabidopsis thaliana (fragment) >gi|1244754|gb|AAB18365.1|
  misc_feature (17)..(356): Homolog of NCBI NO: 15222593 NR Description: xyloglucan endotransglycosylase (XTR4), putative; id: At1g32170.1, supported by cDNA: 21403., supported by cDNA: [Arabidopsis thaliana] >gi|25313534|pir||B86446 probable
  misc_feature (17)..(356): Homolog of NCBI NO: 21618261 NR Description: endoxyloglucan transferase, putative [Arabidopsis
  misc_feature (34)..(350): Homolog of NCBI NO: 32470643 NR Description: putative xyloglucan endotransglycosylase-related
  misc_feature (15)..(347): Homolog of NCBI NO: 13560781 NR Description: endoxyloglucan transferase [Daucus carota]
  misc_feature (17)..(348): Homolog of NCBI NO: 15223878 NR Description: xyloglucan endotransglycosylase (XTR2); protein At1g14720.1, supported by cDNA: 19079., supported by cDNA: supported by cDNA: gi_14326520, supported by cDNA: gi_2154610
  misc_feature (33)..(349): Homolog of NCBI NO: 6681351 NR Description: ETAG-A3 [Lycopersicon esculentum]
MRDSIYLLWIDNRLVVIIMMVMMVSCRCVLGLENINPIFFDEGLSHLFGEGNLIRSPDDRSVRLLLDKYTGSGFISSSMYQHGFFSSLIKLPGAYTAGIVVAFYTSNGDVFVKDHDELDIEFLGNLEGKPWRFQTNMYGNGSTNRGREERYRLWFDPSKEFHRYSILWTPTKIIFWVDDVPIREILRKEEMNGDYPQKPMSLYATIWDASSWATSGGKFGVDYTFSPFVSEFKDIALDGCNVSDSFPGENNNNNIGNYNNINCSVSDQFLMSNDYSTISPKQATAMRRFRERYMYYSYCYDTIRYSVPPPECVIVTAEKNRFRDTGRLKFGGSHPKVHKARKKRRRNRSTPVVSADL

SEQ ID NO: 83125 - protein, 339 aa, Arabidopsis thaliana
  peptide (1)..(339): Ceres Seq. ID no. 12668800
  misc_feature (22)..(207): Pfam Name: Glycosyl hydrolases family 16 Pfam Description: Glycosyl hydrolases family 16
  misc_feature (1)..(339): Homolog of NCBI NO: 15234083 NR Description: xyloglucan endotransglycosylase, putative; id: At4g18990.1 [Arabidopsis thaliana]
  misc_feature (1)..(237): Homolog of NCBI NO: 7447409 NR Description: xyloglucan endo-1,4-beta-D-glucanase (EC 3.2.1.-)
  misc_feature (242)..(339): Homolog of NCBI NO: 7447409 NR Description: xyloglucan endo-1,4-beta-D-glucanase (EC 3.2.1.-)
  misc_feature (1)..(338): Homolog of NCBI NO: 2129774 NR Description: xyloglucan endo-1,4-beta-D-glucanase (EC 3.2.1.-) - Arabidopsis thaliana (fragment) >gi|1244754|gb|AAB18365.1|
  misc_feature (1)..(338): Homolog of NCBI NO: 15222593 NR Description: xyloglucan endotransglycosylase (XTR4), putative; id: At1g32170.1, supported by cDNA: 21403., supported by cDNA: [Arabidopsis thaliana] >gi|25313534|pir||B86446 probable
  misc_feature (1)..(338): Homolog of NCBI NO: 21618261 NR Description: endoxyloglucan transferase, putative [Arabidopsis
  misc_feature (16)..(332): Homolog of NCBI NO: 32470643 NR Description: putative xyloglucan endotransglycosylase-related
  misc_feature (1)..(329): Homolog of NCBI NO: 13560781 NR Description: endoxyloglucan transferase [Daucus carota]
  misc_feature (1)..(330): Homolog of NCBI NO: 15223878 NR Description: xyloglucan endotransglycosylase (XTR2); protein At1g14720.1, supported by cDNA: 19079., supported by cDNA: supported by cDNA: gi_14326520, supported by cDNA: gi_2154610
  misc_feature (15)..(331): Homolog of NCBI NO: 6681351 NR Description: ETAG-A3 [Lycopersicon esculentum]
MMVMMVSCRCVLGLENINPIFFDEGLSHLFGEGNLIRSPDDRSVRLLLDKYTGSGFISSSMYQHGFFSSLIKLPGAYTAGIVVAFYTSNGDVFVKDHDELDIEFLGNLEGKPWRFQTNMYGNGSTNRGREERYRLWFDPSKEFHRYSILWTPTKIIFWVDDVPIREILRKEEMNGDYPQKPMSLYATIWDASSWATSGGKFGVDYTFSPFVSEFKDIALDGCNVSDSFPGENNNNNIGNYNNINCSVSDQFLMSNDYSTISPKQATAMRRFRERYMYYSYCYDTIRYSVPPPECVIVTAEKNRFRDTGRLKFGGSHPKVHKARKKRRRNRSTPVVSADL

SEQ ID NO: 83126 - protein, 338 aa, Arabidopsis thaliana
  peptide (1)..(338): Ceres Seq. ID no. 12668801
  misc_feature (21)..(206): Pfam Name: Glycosyl hydrolases family 16 Pfam Description: Glycosyl hydrolases family 16
  misc_feature (1)..(338): Homolog of NCBI NO: 15234083 NR Description: xyloglucan endotransglycosylase, putative; id: At4g18990.1 [Arabidopsis thaliana]
  misc_feature (1)..(236): Homolog of NCBI NO: 7447409 NR Description: xyloglucan endo-1,4-beta-D-glucanase (EC 3.2.1.-)
  misc_feature (241)..(338): Homolog of NCBI NO: 7447409 NR Description: xyloglucan endo-1,4-beta-D-glucanase (EC 3.2.1.-)
  misc_feature (1)..(337): Homolog of NCBI NO: 2129774 NR Description: xyloglucan endo-1,4-beta-D-glucanase (EC 3.2.1.-) - Arabidopsis thaliana (fragment) >gi|1244754|gb|AAB18365.1|
  misc_feature (1)..(337): Homolog of NCBI NO: 15222593 NR Description: xyloglucan endotransglycosylase (XTR4), putative; id: At1g32170.1, supported by cDNA: 21403., supported by cDNA: [Arabidopsis thaliana] >gi|25313534|pir||B86446 probable
  misc_feature (1)..(337): Homolog of NCBI NO: 21618261 NR Description: endoxyloglucan transferase, putative [Arabidopsis
  misc_feature (15)..(331): Homolog of NCBI NO: 32470643 NR Description: putative xyloglucan endotransglycosylase-related
  misc_feature (1)..(328): Homolog of NCBI NO: 13560781 NR Description: endoxyloglucan transferase [Daucus carota]
  misc_feature (1)..(329): Homolog of NCBI NO: 15223878 NR Description: xyloglucan endotransglycosylase (XTR2); protein At1g14720.1, supported by cDNA: 19079., supported by cDNA: supported by cDNA: gi_14326520, supported by cDNA: gi_2154610
  misc_feature (14)..(330): Homolog of NCBI NO: 6681351 NR Description: ETAG-A3 [Lycopersicon esculentum]
MVMMVSCRCVLGLENINPIFFDEGLSHLFGEGNLIRSPDDRSVRLLLDKYTGSGFISSSMYQHGFFSSLIKLPGAYTAGIVVAFYTSNGDVFVKDHDELDIEFLGNLEGKPWRFQTNMYGNGSTNRGREERYRLWFDPSKEFHRYSILWTPTKIIFWVDDVPIREILRKEEMNGDYPQKPMSLYATIWDASSWATSGGKFGVDYTFSPFVSEFKDIALDGCNVSDSFPGENNNNNIGNYNNINCSVSDQFLMSNDYSTISPKQATAMRRFRERYMYYSYCYDTIRYSVPPPECVIVTAEKNRFRDTGRLKFGGSHPKVHKARKKRRRNRSTPVVSADL

SEQ ID NO: 83127 - DNA, 1993 bp, Arabidopsis thaliana
  misc_feature (1)..(1993): Ceres Seq. ID no. 12668824
  misc_feature: MA Experiment ID: 20000166 Result: Up-regulated in Transcription
  misc_feature: MA Experiment 20000166 PARAMETER Experiment Name: At_100uM_ABA_P Parameter: Age (day) Value: 14
  misc_feature: MA Experiment 20000166 PARAMETER Experiment Name: At_100uM_ABA_P Parameter: Organism Value: A. thaliana
  misc_feature: MA Experiment 20000166 PARAMETER Experiment Name: At_100uM_ABA_P Parameter: Plant Line Value: WS
  misc_feature: MA Experiment 20000166 PARAMETER Experiment Name: At_100uM_ABA_P Parameter: Timepoint (hr) Value: 1
  misc_feature: MA Experiment 20000166 PARAMETER Experiment Name: At_100uM_ABA_P Parameter: Tissue Value: Aerial
  misc_feature: MA Experiment 20000166 PARAMETER Experiment Name: At_100uM_ABA_P Parameter: Treatment Value: 100uM ABA vs. No Treatment
  misc_feature: MA Experiment ID: 20000169 Result: Up-regulated in Transcription
  misc_feature: MA Experiment 20000169 PARAMETER Experiment Name: At_100uM_ABA_P Parameter: Age (day) Value: 14
  misc_feature: MA Experiment 20000169 PARAMETER Experiment Name: At_100uM_ABA_P Parameter: Organism Value: A. thaliana
  misc_feature: MA Experiment 20000169 PARAMETER Experiment Name: At_100uM_ABA_P Parameter: Plant Line Value: WS
  misc_feature: MA Experiment 20000169 PARAMETER Experiment Name: At_100uM_ABA_P Parameter: Timepoint (hr) Value: 6
  misc_feature: MA Experiment 20000169 PARAMETER Experiment Name: At_100uM_ABA_P Parameter: Tissue Value: Aerial
  misc_feature: MA Experiment 20000169 PARAMETER Experiment Name: At_100uM_ABA_P Parameter: Treatment Value: 100uM ABA vs. No Treatment
  misc_feature: MA Experiment ID: 20000179 Result: Up-regulated in Transcription
  misc_feature: MA Experiment 20000179 PARAMETER Experiment Name: At_Germinating_Seeds_P Parameter: Age (hr) Value: 6 vs. 0
  misc_feature: MA Experiment 20000179 PARAMETER Experiment Name: At_Germinating_Seeds_P Parameter: Tissue Value: Germinating Seeds
  misc_feature: MA Experiment ID: 20000182 Result: Up-regulated in Transcription
  misc_feature: MA Experiment 20000182 PARAMETER Experiment Name: At_2mM_SA_P Parameter: Age (day) Value: 14
  misc_feature: MA Experiment 20000182 PARAMETER Experiment Name: At_2mM_SA_P Parameter: Organism Value: A. thaliana
  misc_feature: MA Experiment 20000182 PARAMETER Experiment Name: At_2mM_SA_P Parameter: Plant Line Value: WS
  misc_feature: MA Experiment 20000182 PARAMETER Experiment Name: At_2mM_SA_P Parameter: Timepoint (hr) Value: 6
  misc_feature: MA Experiment 20000182 PARAMETER Experiment Name: At_2mM_SA_P Parameter: Tissue Value: Aerial
  misc_feature: MA Experiment 20000182 PARAMETER Experiment Name: At_2mM_SA_P Parameter: Treatment Value: 2mM SA vs. No Treatment
  misc_feature: MA Experiment ID: 20000185 Result: Up-regulated in Transcription
  misc_feature: MA Experiment 20000185 PARAMETER Experiment Name: At_Roots__P Parameter: Age (day) Value: 7 vs. 21
  misc_feature: MA Experiment 20000185 PARAMETER Experiment Name: At_Roots__P Parameter: Organism Value: A. thaliana
  misc_feature: MA Experiment 20000185 PARAMETER Experiment Name: At_Roots__P Parameter: Tissue Value: Roots vs. Whole Plant
  misc_feature: MA Experiment ID: 20000267 Result: Up-regulated in Transcription
  misc_feature: MA Experiment 20000267 PARAMETER Experiment Name: At_Drought_P Parameter: Age (day) Value: 7
  misc_feature: MA Experiment 20000267 PARAMETER Experiment Name: At_Drought_P Parameter: Organism Value: A. thaliana
  misc_feature: MA Experiment 20000267 PARAMETER Experiment Name: At_Drought_P Parameter: Plant Line Value: WS
  misc_feature: MA Experiment 20000267 PARAMETER Experiment Name: At_Drought_P Parameter: Timepoint (hr) Value: 6
  misc_feature: MA Experiment 20000267 PARAMETER Experiment Name: At_Drought_P Parameter: Tissue Value: Whole Plant
  misc_feature: MA Experiment 20000267 PARAMETER Experiment Name: At_Drought_P Parameter: Treatment Value: Drought vs. No Drought
  misc_feature: MA Experiment ID: 20000268 Result: Up-regulated in Transcription
  misc_feature: MA Experiment 20000268 PARAMETER Experiment Name: At_100mM_NaCl__P Parameter: Age (day) Value: 14
  misc_feature: MA Experiment 20000268 PARAMETER Experiment Name: At_100mM_NaCl__P Parameter: Organism Value: A. thaliana
  misc_feature: MA Experiment 20000268 PARAMETER Experiment Name: At_100mM_NaCl__P Parameter: Plant Line Value: WS
  misc_feature: MA Experiment 20000268 PARAMETER Experiment Name: At_100mM_NaCl__P Parameter: Timepoint (hr) Value: 6
  misc_feature: MA Experiment 20000268 PARAMETER Experiment Name: At_100mM_NaCl__P Parameter: Tissue Value: Whole Plant
  misc_feature: MA Experiment 20000268 PARAMETER Experiment Name: At_100mM_NaCl__P Parameter: Treatment Value: 100mM NaCl vs. No Treatment
  misc_feature: MA Experiment ID: 20000308 Result: Up-regulated in Transcription
  misc_feature: MA Experiment 20000308 PARAMETER Experiment Name: At_100mM_NaCl__P Parameter: Age (day) Value: 17
  misc_feature: MA Experiment 20000308 PARAMETER Experiment Name: At_100mM_NaCl__P Parameter: Organism Value: A. thaliana
  misc_feature: MA Experiment 20000308 PARAMETER Experiment Name: At_100mM_NaCl__P Parameter: Plant Line Value: WS
  misc_feature: MA Experiment 20000308 PARAMETER Experiment Name: At_100mM_NaCl__P Parameter: Timepoint (hr) Value: 72
  misc_feature: MA Experiment 20000308 PARAMETER Experiment Name: At_100mM_NaCl__P Parameter: Tissue Value: Whole Plant
  misc_feature: MA Experiment 20000308 PARAMETER Experiment Name: At_100mM_NaCl__P Parameter: Treatment Value: 100mM NaCl vs. No Treatment
  misc_feature: MA Experiment ID: 20000436 Result: Up-regulated in Transcription
  misc_feature: MA Experiment 20000436 PARAMETER Experiment Name: At_Drought_P Parameter: Age (day) Value: 7
  misc_feature: MA Experiment 20000436 PARAMETER Experiment Name: At_Drought_P Parameter: Organism Value: A. thaliana
  misc_feature: MA Experiment 20000436 PARAMETER Experiment Name: At_Drought_P Parameter: Plant Line Value: WS
  misc_feature: MA Experiment 20000436 PARAMETER Experiment Name: At_Drought_P Parameter: Timepoint (hr) Value: 12
  misc_feature: MA Experiment 20000436 PARAMETER Experiment Name: At_Drought_P Parameter: Tissue Value: Whole Plant
  misc_feature: MA Experiment 20000436 PARAMETER Experiment Name: At_Drought_P Parameter: Treatment Value: Drought vs. No Drought
  misc_feature: MA Experiment ID: 20000437 Result: Up-regulated in Transcription
  misc_feature: MA Experiment 20000437 PARAMETER Experiment Name: At_Drought_P Parameter: Age (day) Value: 8
  misc_feature: MA Experiment 20000437 PARAMETER Experiment Name: At_Drought_P Parameter: Organism Value: A. thaliana
  misc_feature: MA Experiment 20000437 PARAMETER Experiment Name: At_Drought_P Parameter: Plant Line Value: WS
  misc_feature: MA Experiment 20000437 PARAMETER Experiment Name: At_Drought_P Parameter: Timepoint (hr) Value: 24
  misc_feature: MA Experiment 20000437 PARAMETER Experiment Name: At_Drought_P Parameter: Tissue Value: Whole Plant
  misc_feature: MA Experiment 20000437 PARAMETER Experiment Name: At_Drought_P Parameter: Treatment Value: Drought vs. No Drought
  misc_feature: MA Experiment ID: 20000438 Result: Down-regulated in Transcription
  misc_feature: MA Experiment 20000438 PARAMETER Experiment Name: At_Shoots__P Parameter: Age (day) Value: 14
  misc_feature: MA Experiment 20000438 PARAMETER Experiment Name: At_Shoots__P Parameter: Tissue Value: Shoots vs. Whole Plant
  misc_feature: MA Experiment ID: 20000439 Result: Up-regulated in Transcription
  misc_feature: MA Experiment 20000439 PARAMETER Experiment Name: At_Roots__P Parameter: Age (day) Value: 14 vs. 21
  misc_feature: MA Experiment 20000439 PARAMETER Experiment Name: At_Roots__P Parameter: Organism Value: A. thaliana
  misc_feature: MA Experiment 20000439 PARAMETER Experiment Name: At_Roots__P Parameter: Tissue Value: Roots vs. Whole Plant
  misc_feature: MA Experiment ID: 20000453 Result: Up-regulated in Transcription
  misc_feature: MA Experiment 20000453 PARAMETER Experiment Name: At_100uM_ABA_P Parameter: Age (day) Value: 15
  misc_feature: MA Experiment 20000453 PARAMETER Experiment Name: At_100uM_ABA_P Parameter: Organism Value: A. thaliana
  misc_feature: MA Experiment 20000453 PARAMETER Experiment Name: At_100uM_ABA_P Parameter: Plant Line Value: WS
  misc_feature: MA Experiment 20000453 PARAMETER Experiment Name: At_100uM_ABA_P Parameter: Timepoint (hr) Value: 24
  misc_feature: MA Experiment 20000453 PARAMETER Experiment Name: At_100uM_ABA_P Parameter: Tissue Value: Aerial
  misc_feature: MA Experiment 20000453 PARAMETER Experiment Name: At_100uM_ABA_P Parameter: Treatment Value: 100uM ABA vs. No Treatment
  misc_feature: MA Experiment ID: 20000527 Result: Down-regulated in Transcription
  misc_feature: MA Experiment 20000527 PARAMETER Experiment Name: At_10percent_PEG_P Parameter: Age (day) Value: 20
  misc_feature: MA Experiment 20000527 PARAMETER Experiment Name: At_10percent_PEG_P Parameter: Organism Value: A. thaliana
  misc_feature: MA Experiment 20000527 PARAMETER Experiment Name: At_10percent_PEG_P Parameter: Plant Line Value: WS
  misc_feature: MA Experiment 20000527 PARAMETER Experiment Name: At_10percent_PEG_P Parameter: Timepoint (day) Value: 20
  misc_feature: MA Experiment 20000527 PARAMETER Experiment Name: At_10percent_PEG_P Parameter: Tissue Value: Whole Plant
  misc_feature: MA Experiment 20000527 PARAMETER Experiment Name: At_10percent_PEG_P Parameter: Treatment Value: 10percent PEG vs. No Treatment
  misc_feature: MA Experiment ID: 20000794 Result: Up-regulated in Transcription
  misc_feature: MA Experiment 20000794 PARAMETER Experiment Name: At_Petals_P Parameter: Age (day) Value: 23-25 days
  misc_feature: MA Experiment 20000794 PARAMETER Experiment Name: At_Petals_P Parameter: Plant Line Value: WS
  misc_feature: MA Experiment 20000794 PARAMETER Experiment Name: At_Petals_P Parameter: Tissue Value: Petals vs. Whole plant
  misc_feature: MA Experiment ID: 20001247 Result: Up-regulated in Transcription
  misc_feature: MA Experiment 20001247 PARAMETER Experiment Name: At_Far-red-induction_P Parameter: Age (day) Value: 7
  misc_feature: MA Experiment 20001247 PARAMETER Experiment Name: At_Far-red-induction_P Parameter: Light Value: Far-red vs. White
  misc_feature: MA Experiment 20001247 PARAMETER Experiment Name: At_Far-red-induction_P Parameter: Organism Value: A. thaliana
  misc_feature: MA Experiment 20001247 PARAMETER Experiment Name: At_Far-red-induction_P Parameter: Plant Line Value: Columbia
  misc_feature: MA Experiment 20001247 PARAMETER Experiment Name: At_Far-red-induction_P Parameter: Timepoint (hr) Value: 1
  misc_feature: MA Experiment 20001247 PARAMETER Experiment Name: At_Far-red-induction_P Parameter: Tissue Value: Whole Plant
  misc_feature: MA Experiment ID: 20001451 Result: Up-regulated in Transcription
  misc_feature: MA Experiment 20001451 PARAMETER Experiment Name: At_Far-red-induction_P Parameter: Age (day) Value: 7
  misc_feature: MA Experiment 20001451 PARAMETER Experiment Name: At_Far-red-induction_P Parameter: Light Value: Far-red vs. White
  misc_feature: MA Experiment 20001451 PARAMETER Experiment Name: At_Far-red-induction_P Parameter: Organism Value: A. thaliana
  misc_feature: MA Experiment 20001451 PARAMETER Experiment Name: At_Far-red-induction_P Parameter: Plant Line Value: Columbia
  misc_feature: MA Experiment 20001451 PARAMETER Experiment Name: At_Far-red-induction_P Parameter: Timepoint (hr) Value: 24
  misc_feature: MA Experiment 20001451 PARAMETER Experiment Name: At_Far-red-induction_P Parameter: Tissue Value: Whole Plant
  misc_feature: MA Experiment ID: 20001554 Result: Up-regulated in Transcription
  misc_feature: MA Experiment 20001554 PARAMETER Experiment Name: At_Drought_Soil_Dry_P Parameter: Age (day) Value: 21
  misc_feature: MA Experiment 20001554 PARAMETER Experiment Name: At_Drought_Soil_Dry_P Parameter: Organism Value: A. thaliana
  misc_feature: MA Experiment 20001554 PARAMETER Experiment Name: At_Drought_Soil_Dry_P Parameter: Plant Line Value: WS
  misc_feature: MA Experiment 20001554 PARAMETER Experiment Name: At_Drought_Soil_Dry_P Parameter: Post Timepoint (hr) Value: None
  misc_feature: MA Experiment 20001554 PARAMETER Experiment Name: At_Drought_Soil_Dry_P Parameter: Post-Treatment Value: None
  misc_feature: MA Experiment 20001554 PARAMETER Experiment Name: At_Drought_Soil_Dry_P Parameter: Timepoint (day) Value: 7
  misc_feature: MA Experiment 20001554 PARAMETER Experiment Name: At_Drought_Soil_Dry_P Parameter: Treatment Value: Drought vs. No Drought
  misc_feature: MA Experiment ID: 20001556 Result: Up-regulated in Transcription
  misc_feature: MA Experiment 20001556 PARAMETER Experiment Name: At_Drought_Soil_Dry_P Parameter: Age (day) Value: 26
  misc_feature: MA Experiment 20001556 PARAMETER Experiment Name: At_Drought_Soil_Dry_P Parameter: Organism Value: A. thaliana
  misc_feature: MA Experiment 20001556 PARAMETER Experiment Name: At_Drought_Soil_Dry_P Parameter: Plant Line Value: WS
  misc_feature: MA Experiment 20001556 PARAMETER Experiment Name: At_Drought_Soil_Dry_P Parameter: Post Timepoint (hr) Value: None
  misc_feature: MA Experiment 20001556 PARAMETER Experiment Name: At_Drought_Soil_Dry_P Parameter: Post-Treatment Value: None
  misc_feature: MA Experiment 20001556 PARAMETER Experiment Name: At_Drought_Soil_Dry_P Parameter: Timepoint (day) Value: 12
  misc_feature: MA Experiment 20001556 PARAMETER Experiment Name: At_Drought_Soil_Dry_P Parameter: Treatment Value: Drought vs. No Drought
  misc_feature: MA Experiment ID: 20001559 Result: Up-regulated in Transcription
  misc_feature: MA Experiment 20001559 PARAMETER Experiment Name: At_Drought_Soil_Dry_P Parameter: Age (day) Value: 28
  misc_feature: MA Experiment 20001559 PARAMETER Experiment Name: At_Drought_Soil_Dry_P Parameter: Organism Value: A. thaliana
  misc_feature: MA Experiment 20001559 PARAMETER Experiment Name: At_Drought_Soil_Dry_P Parameter: Plant Line Value: WS
  misc_feature: MA Experiment 20001559 PARAMETER Experiment Name: At_Drought_Soil_Dry_P Parameter: Post Timepoint (hr) Value: 29
  misc_feature: MA Experiment 20001559 PARAMETER Experiment Name: At_Drought_Soil_Dry_P Parameter: Post-Treatment Value: Re-Water vs. No Drought
  misc_feature: MA Experiment 20001559 PARAMETER Experiment Name: At_Drought_Soil_Dry_P Parameter: Timepoint (day) Value: 14
  misc_feature: MA Experiment 20001559 PARAMETER Experiment Name: At_Drought_Soil_Dry_P Parameter: Treatment Value: Drought vs. No Drought
  misc_feature: MA Experiment ID: 20001904 Result: Up-regulated in Transcription
  misc_feature: MA Experiment 20001904 PARAMETER Experiment Name: At_Drought_Reproduction_P Parameter: Age (day) Value: 37
  misc_feature: MA Experiment 20001904 PARAMETER Experiment Name: At_Drought_Reproduction_P Parameter: Organism Value: A. thaliana
  misc_feature: MA Experiment 20001904 PARAMETER Experiment Name: At_Drought_Reproduction_P Parameter: Plant Line Value: WS
  misc_feature: MA Experiment 20001904 PARAMETER Experiment Name: At_Drought_Reproduction_P Parameter: Timepoint (day) Value: 7
  misc_feature: MA Experiment 20001904 PARAMETER Experiment Name: At_Drought_Reproduction_P Parameter: Tissue Value: Rosettes
  misc_feature: MA Experiment 20001904 PARAMETER Experiment Name: At_Drought_Reproduction_P Parameter: Treatment Value: Drought vs. No Drought
  misc_feature: MA Experiment ID: 20001906 Result: Up-regulated in Transcription
  misc_feature: MA Experiment 20001906 PARAMETER Experiment Name: At_Drought_Reproduction_P Parameter: Age (day) Value: 35
  misc_feature: MA Experiment 20001906 PARAMETER Experiment Name: At_Drought_Reproduction_P Parameter: Organism Value: A. thaliana
  misc_feature: MA Experiment 20001906 PARAMETER Experiment Name: At_Drought_Reproduction_P Parameter: Plant Line Value: WS
  misc_feature: MA Experiment 20001906 PARAMETER Experiment Name: At_Drought_Reproduction_P Parameter: Timepoint (day) Value: 5
  misc_feature: MA Experiment 20001906 PARAMETER Experiment Name: At_Drought_Reproduction_P Parameter: Tissue Value: Siliques
  misc_feature: MA Experiment 20001906 PARAMETER Experiment Name: At_Drought_Reproduction_P Parameter: Treatment Value: Drought vs. No Drought
  misc_feature: MA Experiment ID: 20001910 Result: Up-regulated in Transcription
  misc_feature: MA Experiment 20001910 PARAMETER Experiment Name: At_Drought_Reproduction_P Parameter: Age (day) Value: 37
  misc_feature: MA Experiment 20001910 PARAMETER Experiment Name: At_Drought_Reproduction_P Parameter: Organism Value: A. thaliana
  misc_feature: MA Experiment 20001910 PARAMETER Experiment Name: At_Drought_Reproduction_P Parameter: Plant Line Value: WS
  misc_feature: MA Experiment 20001910 PARAMETER Experiment Name: At_Drought_Reproduction_P Parameter: Timepoint (day) Value: 7
  misc_feature: MA Experiment 20001910 PARAMETER Experiment Name: At_Drought_Reproduction_P Parameter: Tissue Value: Flowers
  misc_feature: MA Experiment 20001910 PARAMETER Experiment Name: At_Drought_Reproduction_P Parameter: Treatment Value: Drought vs. No Drought
  misc_feature: MA Experiment ID: 20001911 Result: Up-regulated in Transcription
  misc_feature: MA Experiment 20001911 PARAMETER Experiment Name: At_Drought_Reproduction_P Parameter: Age (day) Value: 40
  misc_feature: MA Experiment 20001911 PARAMETER Experiment Name: At_Drought_Reproduction_P Parameter: Organism Value: A. thaliana
  misc_feature: MA Experiment 20001911 PARAMETER Experiment Name: At_Drought_Reproduction_P Parameter: Plant Line Value: WS
  misc_feature: MA Experiment 20001911 PARAMETER Experiment Name: At_Drought_Reproduction_P Parameter: Timepoint (day) Value: 10
  misc_feature: MA Experiment 20001911 PARAMETER Experiment Name: At_Drought_Reproduction_P Parameter: Tissue Value: Flowers
  misc_feature: MA Experiment 20001911 PARAMETER Experiment Name: At_Drought_Reproduction_P Parameter: Treatment Value: Drought vs. No Drought
atcacaaacatttcttccattacattaaaactccaaaaaattcatttttgttttcttttagagttcacaagttcttcgttgttcagctactcccactgtcataacacgaagtgggtttttttctgatcaaagaacaaaaacaaaaatggatatctccgccttgtttctcactctcttcgccggaagtctcttcctttactttctccggtgtctaatctctcagcgccgctttggatcttccaaactcccactccctccgggaacaatgggttggccttacgtcggagaaactttccagctttactctcaagaccctaatgtctttttccaatcaaaacagaaaaggtatggatcggtgtttaagactcatgtattgggatgtccatgtgtgatgatctcgagtccagaggctgctaagttcgtgctggtgacgaaatctcatctctttaaaccaacttttccggcgagtaaagagaggatgttggggaaacaagccatcttcttccaccagggtgattatcacgctaaactcaggaagcttgttcttcgtgcttttatgcctgaatctatcagaaacatggttcctgatattgaatccatcgctcaagactctctccgaagttgggagggaacaatgatcaacacttaccaagaaatgaaaacatacaccttcaacgttgcgttgctatcgatcttcggaaaagacgaggttttatacagagaagatctaaaacgatgctactacattctcgagaaaggttacaattcgatgccagtgaatctccctggaacacttttccacaaatcaatgaaagctcggaaggaactctcacagatcctcgctagaatcttatcagagagaagacagaacggttcctcacacaacgatcttctcggatcattcatgggagacaaagaagagctaaccgacgaacagatcgccgacaacataatcggagtaatcttcgccgctagagacacgacggcgagtgtgatgtcgtggatcctcaagtacctagccgagaatcccaacgttctagaagccgttactgaagaacaaatggcaataaggaaagacaaagaagaaggagagtctctaacttggggagatacaaagaagatgccattaacttcaagagttattcaagaaacattaagagtcgcttcaatcttatctttcacattcagagaagctgtcgaagatgtcgaatacgaaggatatttgatacctaaaggatggaaagtgttacccctattcagaaacattcatcatagtgctgatattttttctaatccggggaaatttgatccatcaagattcgaggtggctccaaaacccaatacgttcatgccatttggcaatggaacccactcgtgtcctggaaatgaattagccaagcttgagatgtctattatgattcatcatctcaccaccaagtacagttggtcaattgttggagcgagcgacgggattcagtatgggccattcgcgcttccccaaaacggactgcccattgtgctggcccggaagccggagatcgaagtgtagaatgacagaattgcctttagcttttctatatttggaaagaggagactagagaagaagaataaataattctttctttctttatcaagaaaaaaagatagagatggaggaaaacaggttcaagattttggtagaaaaatattccccaaatgggatcaaggagaaaacaccaagtgtacaaaaacttcaattttatttttcttgactttctttagttttttttttttgagtttttaattttaatttaagatgggaaaagctagtaattgaatttaaaaaaacaggggaaaatgttagtacaagtctctcatgtattttttttttgtttttcctgaaaatatcttatggttatgttataactatttcctcctggattgagacttcccttgttttttgaataaattttttttgttatatttttatatatatatttaaaatatctgtttt

SEQ ID NO: 83128 - protein, 467 aa, Arabidopsis thaliana
  peptide (1)..(467): Ceres Seq. ID no. 12668825
  misc_feature (1)..(467): Homolog of NCBI NO: 18415271 NR Description: cytochrome p450 family; protein id: At4g19230.1, by cDNA: gi_15293092, supported by cDNA: gi_20259298 [Arabidopsis >gi|15293093|gb|AAK93657.1| putative cytochrome P450 cytochrome
  misc_feature (1)..(432): Homolog of NCBI NO: 7430728 NR Description: cytochrome P450 - Arabidopsis thaliana cytochrome P450 [Arabidopsis thaliana]
  misc_feature (1)..(463): Homolog of NCBI NO: 30694740 NR Description: cytochrome P450 family [Arabidopsis thaliana] cytochrome P450 [Arabidopsis thaliana] AT5g45340/K9E15_12 [Arabidopsis thaliana]
  misc_feature (1)..(432): Homolog of NCBI NO: 30694744 NR Description: cytochrome P450 family [Arabidopsis thaliana]
  misc_feature (33)..(457): Homolog of NCBI NO: 15227033 NR Description: taxane 13-alpha-hydroxylase(cytochrome p450 putative; protein id: At2g29090.1 [Arabidopsis thaliana]
  misc_feature (15)..(461): Homolog of NCBI NO: 18402179 NR Description: cytochrome P450, putative; protein id: supported by cDNA: 126144. [Arabidopsis thaliana]
  misc_feature (15)..(434): Homolog of NCBI NO: 9294629 NR Description: cytochrome P450 [Arabidopsis thaliana]
  misc_feature (31)..(457): Homolog of NCBI NO: 27127269 NR Description: cytochrome P450 [Oryza sativa (japonica
  misc_feature (7)..(462): Homolog of NCBI NO: 15239203 NR Description: cytochrome p450, putative; protein id: supported by cDNA: 36334., supported by cDNA: gi_14596098, by cDNA: gi_15450716, supported by cDNA: gi_17380617, supported
  misc_feature (6)..(432): Homolog of NCBI NO: 15225685 NR Description: ent-kaurenoic acid oxidase (cytochrome P450 protein id: At2g32440.1, supported by cDNA: gi_13021855
MDISALFLTLFAGSLFLYFLRCLISQRRFGSSKLPLPPGTMGWPYVGETFQLYSQDPNVFFQSKQKRYGSVFKTHVLGCPCVMISSPEAAKFVLVTKSHLFKPTFPASKERMLGKQAIFFHQGDYHAKLRKLVLRAFMPESIRNMVPDIESIAQDSLRSWEGTMINTYQEMKTYTFNVALLSIFGKDEVLYREDLKRCYYILEKGYNSMPVNLPGTLFHKSMKARKELSQILARILSERRQNGSSHNDLLGSFMGDKEELTDEQIADNIIGVIFAARDTTASVMSWILKYLAENPNVLEAVTEEQMAIRKDKEEGESLTWGDTKKMPLTSRVIQETLRVASILSFTFREAVEDVEYEGYLIPKGWKVLPLFRNIHHSADIFSNPGKFDPSRFEVAPKPNTFMPFGNGTHSCPGNELAKLEMSIMIHHLTTKYSWSIVGASDGIQYGPFALPQNGLPIVLARKPEIEV

SEQ ID NO: 83129 - protein, 427 aa, Arabidopsis thaliana
  peptide (1)..(427): Ceres Seq. ID no. 12668826
  misc_feature (1)..(427): Homolog of NCBI NO: 18415271 NR Description: cytochrome p450 family; protein id: At4g19230.1, by cDNA: gi_15293092, supported by cDNA: gi_20259298 [Arabidopsis >gi|15293093|gb|AAK93657.1| putative cytochrome P450 cytochrome
  misc_feature (1)..(392): Homolog of NCBI NO: 7430728 NR Description: cytochrome P450 - Arabidopsis thaliana cytochrome P450 [Arabidopsis thaliana]
  misc_feature (1)..(423): Homolog of NCBI NO: 30694740 NR Description: cytochrome P450 family [Arabidopsis thaliana] cytochrome P450 [Arabidopsis thaliana] AT5g45340/K9E15_12 [Arabidopsis thaliana]
  misc_feature (1)..(392): Homolog of NCBI NO: 30694744 NR Description: cytochrome P450 family [Arabidopsis thaliana]
  misc_feature (1)..(417): Homolog of NCBI NO: 15227033 NR Description: taxane 13-alpha-hydroxylase(cytochrome p450 putative; protein id: At2g29090.1 [Arabidopsis thaliana]
  misc_feature (1)..(421): Homolog of NCBI NO: 18402179 NR Description: cytochrome P450, putative; protein id: supported by cDNA: 126144. [Arabidopsis thaliana]
  misc_feature (1)..(394): Homolog of NCBI NO: 9294629 NR Description: cytochrome P450 [Arabidopsis thaliana]
  misc_feature (1)..(417): Homolog of NCBI NO: 27127269 NR Description: cytochrome P450 [Oryza sativa (japonica
  misc_feature (1)..(422): Homolog of NCBI NO: 15239203 NR Description: cytochrome p450, putative; protein id: supported by cDNA: 36334., supported by cDNA: gi_14596098, by cDNA: gi_15450716, supported by cDNA: gi_17380617, supported
  misc_feature (1)..(392): Homolog of NCBI NO: 15225685 NR Description: ent-kaurenoic acid oxidase (cytochrome P450 protein id: At2g32440.1, supported by cDNA: gi_13021855
MGWPYVGETFQLYSQDPNVFFQSKQKRYGSVFKTHVLGCPCVMISSPEAAKFVLVTKSHLFKPTFPASKERMLGKQAIFFHQGDYHAKLRKLVLRAFMPESIRNMVPDIESIAQDSLRSWEGTMINTYQEMKTYTFNVALLSIFGKDEVLYREDLKRCYYILEKGYNSMPVNLPGTLFHKSMKARKELSQILARILSERRQNGSSHNDLLGSFMGDKEELTDEQIADNIIGVIFAARDTTASVMSWILKYLAENPNVLEAVTEEQMAIRKDKEEGESLTWGDTKKMPLTSRVIQETLRVASILSFTFREAVEDVEYEGYLIPKGWKVLPLFRNIHHSADIFSNPGKFDPSRFEVAPKPNTFMPFGNGTHSCPGNELAKLEMSIMIHHLTTKYSWSIVGASDGIQYGPFALPQNGLPIVLARKPEIEV

SEQ ID NO: 83130 - protein, 385 aa, Arabidopsis thaliana
  peptide (1)..(385): Ceres Seq. ID no. 12668827
  misc_feature (1)..(385): Homolog of NCBI NO: 18415271 NR Description: cytochrome p450 family; protein id: At4g19230.1, by cDNA: gi_15293092, supported by cDNA: gi_20259298 [Arabidopsis >gi|15293093|gb|AAK93657.1| putative cytochrome P450 cytochrome
  misc_feature (1)..(350): Homolog of NCBI NO: 7430728 NR Description: cytochrome P450 - Arabidopsis thaliana cytochrome P450 [Arabidopsis thaliana]
  misc_feature (1)..(381): Homolog of NCBI NO: 30694740 NR Description: cytochrome P450 family [Arabidopsis thaliana] cytochrome P450 [Arabidopsis thaliana] AT5g45340/K9E15_12 [Arabidopsis thaliana]
  misc_feature (1)..(350): Homolog of NCBI NO: 30694744 NR Description: cytochrome P450 family [Arabidopsis thaliana]
  misc_feature (1)..(375): Homolog of NCBI NO: 15227033 NR Description: taxane 13-alpha-hydroxylase(cytochrome p450 putative; protein id: At2g29090.1 [Arabidopsis thaliana]
  misc_feature (1)..(379): Homolog of NCBI NO: 18402179 NR Description: cytochrome P450, putative; protein id: supported by cDNA: 126144. [Arabidopsis thaliana]
  misc_feature (1)..(352): Homolog of NCBI NO: 9294629 NR Description: cytochrome P450 [Arabidopsis thaliana]
  misc_feature (1)..(375): Homolog of NCBI NO: 27127269 NR Description: cytochrome P450 [Oryza sativa (japonica
  misc_feature (1)..(380): Homolog of NCBI NO: 15239203 NR Description: cytochrome p450, putative; protein id: supported by cDNA: 36334., supported by cDNA: gi_14596098, by cDNA: gi_15450716, supported by cDNA: gi_17380617, supported
  misc_feature (1)..(350): Homolog of NCBI NO: 15225685 NR Description: ent-kaurenoic acid oxidase (cytochrome P450 protein id: At2g32440.1, supported by cDNA: gi_13021855
MISSPEAAKFVLVTKSHLFKPTFPASKERMLGKQAIFFHQGDYHAKLRKLVLRAFMPESIRNMVPDIESIAQDSLRSWEGTMINTYQEMKTYTFNVALLSIFGKDEVLYREDLKRCYYILEKGYNSMPVNLPGTLFHKSMKARKELSQILARILSERRQNGSSHNDLLGSFMGDKEELTDEQIADNIIGVIFAARDTTASVMSWILKYLAENPNVLEAVTEEQMAIRKDKEEGESLTWGDTKKMPLTSRVIQETLRVASILSFTFREAVEDVEYEGYLIPKGWKVLPLFRNIHHSADIFSNPGKFDPSRFEVAPKPNTFMPFGNGTHSCPGNELAKLEMSIMIHHLTTKYSWSIVGASDGIQYGPFALPQNGLPIVLARKPEIEV

SEQ ID NO: 83131 - DNA, 2037 bp, Arabidopsis thaliana
  misc_feature (1)..(2037): Ceres Seq. ID no. 12668842
  misc_feature: MA Experiment ID: 20000327 Result: Down-regulated in Transcription
  misc_feature: MA Experiment 20000327 PARAMETER Experiment Name: At_42deg_Heat_Sub_P Parameter: Age (day) Value: 14
  misc_feature: MA Experiment 20000327 PARAMETER Experiment Name: At_42deg_Heat_Sub_P Parameter: Organism Value: A. thaliana
  misc_feature: MA Experiment 20000327 PARAMETER Experiment Name: At_42deg_Heat_Sub_P Parameter: Plant Line Value: WS
  misc_feature: MA Experiment 20000327 PARAMETER Experiment Name: At_42deg_Heat_Sub_P Parameter: Temperature (deg C) Value: 42 vs. 22
  misc_feature: MA Experiment 20000327 PARAMETER Experiment Name: At_42deg_Heat_Sub_P Parameter: Timepoint (hr) Value: 1
  misc_feature: MA Experiment 20000327 PARAMETER Experiment Name: At_42deg_Heat_Sub_P Parameter: Tissue Value: Aerial
  misc_feature: MA Experiment ID: 20000328 Result: Down-regulated in Transcription
  misc_feature: MA Experiment 20000328 PARAMETER Experiment Name: At_42deg_Heat_Sub_P Parameter: Age (day) Value: 14
  misc_feature: MA Experiment 20000328 PARAMETER Experiment Name: At_42deg_Heat_Sub_P Parameter: Organism Value: A. thaliana
  misc_feature: MA Experiment 20000328 PARAMETER Experiment Name: At_42deg_Heat_Sub_P Parameter: Plant Line Value: WS
  misc_feature: MA Experiment 20000328 PARAMETER Experiment Name: At_42deg_Heat_Sub_P Parameter: Temperature (deg C) Value: 42 vs. 22
  misc_feature: MA Experiment 20000328 PARAMETER Experiment Name: At_42deg_Heat_Sub_P Parameter: Timepoint (hr) Value: 6
  misc_feature: MA Experiment 20000328 PARAMETER Experiment Name: At_42deg_Heat_Sub_P Parameter: Tissue Value: Aerial
  misc_feature: MA Experiment ID: 20000348 Result: Down-regulated in Transcription
  misc_feature: MA Experiment 20000348 PARAMETER Experiment Name: At_100uM_ABA_Sub_P Parameter: Age (day) Value: 14
  misc_feature: MA Experiment 20000348 PARAMETER Experiment Name: At_100uM_ABA_Sub_P Parameter: Organism Value: A. thaliana
  misc_feature: MA Experiment 20000348 PARAMETER Experiment Name: At_100uM_ABA_Sub_P Parameter: Plant Line Value: WS
  misc_feature: MA Experiment 20000348 PARAMETER Experiment Name: At_100uM_ABA_Sub_P Parameter: Timepoint (hr) Value: 1
  misc_feature: MA Experiment 20000348 PARAMETER Experiment Name: At_100uM_ABA_Sub_P Parameter: Tissue Value: Aerial
  misc_feature: MA Experiment 20000348 PARAMETER Experiment Name: At_100uM_ABA_Sub_P Parameter: Treatment Value: 100uM ABA vs. No Treatment
  misc_feature: MA Experiment ID: 20000355 Result: Up-regulated in Transcription
  misc_feature: MA Experiment 20000355 PARAMETER Experiment Name: At_Siliques_Sub_P Parameter: Age (day) Value: 21
  misc_feature: MA Experiment 20000355 PARAMETER Experiment Name: At_Siliques_Sub_P Parameter: Organism Value: A. thaliana
  misc_feature: MA Experiment 20000355 PARAMETER Experiment Name: At_Siliques_Sub_P Parameter: Plant Line Value: WS
  misc_feature: MA Experiment 20000355 PARAMETER Experiment Name: At_Siliques_Sub_P Parameter: Tissue Value: Less Than 5mm Siliques vs. Whole Plant
  misc_feature: MA Experiment ID: 20000440 Result: Up-regulated in Transcription
  misc_feature: MA Experiment 20000440 PARAMETER Experiment Name: At_Closed-Flower__Sub_P Parameter: Tissue Value: Closed Flower vs. Whole Plant
atggagaatcacagctgccttcagaaagatacgacgtcggcggccaaattagacgtcgaaactggaaacctccggcagagagatgaaacgaagccgttttatgcaaactcactgacgccacgtgagatggaatctcttgttgcgatctgcgataccttcatatcctccatcgacgactctggagtaggacacgtggatgattgcgtcgctggatatttctccgcctccgcttctcagaccggaactcccgaccgcgttgatgaaaaaggaaggaacttggcgtggaaagcaataggttacaatggacccagccctgatcatagtgatcatgaagtagaactaaacgaggagaagaagaagaagaaacctgaggagatctttggaccactttacaatggcatcgttgatctaaaaagccctagagaagccgtggaaaagaagctagccggtcgtgggttcgcagtttcaaatcaaaagaggaatacaaacggatcatctatctctgacccggtgatgaaaatccagtgtgatgctgtggtggttgggtctggatccggtggaggagtggcggcaggagtgttagccaaggctggttacaaagtgttggtgattgagtcagggaattactatgcaagaagcaaactttctttacttgaagggcaagctatggatgacatgtatttatccggtgggttattagcgacgtccgatacgaacgtagtgattcttgcgggatccacagtcggaggtggttctacaatcaattggtccgcctcgatcaagacaccagaacatgtgatgaaggaatgggcagaaaagtcaaaactcgaaatgttcggaagtgatttgtatcgagaggcaatggatgttgtctgtaagaggatgggtgttcaatgcggatttgtagaagaagggtttaataatgaggtattgagaaaaggttgtgaaaagttagggttaccagtgaagaatattccgaggaatgctccatccgatcattactgtgggttttgttgcttgggttgcaagaaaggtcaaaagcaggggacttcagagacttggcttgtagatttggtggaatctgataatggtttaatccttccaggttgtcaagcgacggaagtcatgtacgactgtgaacaggggaagaagaagaaggcaactggagttgcgtttgcgtttggggaagagatttatgtggtggagtctagagtgacaatagtggcttgcggtgcgcttagaacgccgcatctgttgaaacgtagcggtttgaagaatagtaacattgggagaaacctttgtctacatccggttgttatggcttggggatggtttccagaggaagataagtggccggaaaagaagaaaaagagctacgaggggggaataatgactgcgatgtctagcgttgtaattgaagaaacgcatagttcttatggtgaaatggttatccagacacctgctctacatccaggaatgttctcagggatcattccctggacatcaagcaaggatttcaaaacccgaatgctcaaattttcaagaaccgcacacatttttgcgcttctgagagataaaggaaccggaacaatagattccaagacctacattgactacaacttaaacgatgaagacgaagagagtctaaagaacggtcttgaaagagtcttgaagattctggccgcagccggagccgaggagattgggacgcatcattcagaaggtaggagtctgaatgttagaacagcgagttcgttagagattgagcggtttgtgagagaagagagttcaaagccgttgaaggatttgtcaggtcagatatgttcagctcaccaaatgggaagttgtaggatgggaattaggccggaggaatccgcggtgaggccaacaggagagacttgggaggtcgaaaggttatttgtggcggacacaagtgtttttccgaccgctttaggggttaatccgatggtcaccgttcagtctattgcttattgtattggacttaatgttgttgatgttcttaagaagaagaagtga

SEQ ID NO: 83132 - protein, 678 aa, Arabidopsis thaliana
  peptide (1)..(678): Ceres Seq. ID no. 12668843
  misc_feature (177)..(443): Pfam Name: GMC oxidoreductase Pfam Description: GMC oxidoreductase
  misc_feature (85)..(678): Homolog of NCBI NO: 16905151 NR Description: putative alcohol oxidase [Oryza sativa]
  misc_feature (86)..(678): Homolog of NCBI NO: 37535334 NR Description: putative oxidase [Oryza sativa (japonica
  misc_feature (85)..(677): Homolog of NCBI NO: 14532706 NR Description: unknown protein [Arabidopsis thaliana]
  misc_feature (85)..(677): Homolog of NCBI NO: 15235348 NR Description: putative protein; protein id: At4g28570.1, by cDNA: 19314., supported by cDNA: gi_14532705 [Arabidopsis
  misc_feature (85)..(677): Homolog of NCBI NO: 21554016 NR Description: unknown [Arabidopsis thaliana]
  misc_feature (86)..(674): Homolog of NCBI NO: 37535330 NR Description: putative alcohol oxidase [Oryza sativa (japonica group)] >gi|16905157|gb|AAL31027.1| putative alcohol oxidase sativa] >gi|31432646|gb|AAP54254.1| putative alcohol oxidase
  misc_feature (68)..(677): Homolog of NCBI NO: 37535318 NR Description: putative alcohol oxidase [Oryza sativa (japonica group)] >gi|16905154|gb|AAL31024.1| putative alcohol oxidase sativa] >gi|31432640|gb|AAP54248.1| putative alcohol oxidase
  misc_feature (95)..(678): Homolog of NCBI NO: 25367436 NR Description: hypothetical protein [imported] - Arabidopsis
  misc_feature (129)..(678): Homolog of NCBI NO: 15219612 NR Description: unknown protein; protein id: At1g03990.1
  misc_feature (101)..(670): Homolog of NCBI NO: 18403753 NR Description: expressed protein; protein id: At3g23410.1, by cDNA: gi_13605691 [Arabidopsis thaliana] contains similarity to long chain fatty alcohol
MENHSCLQKDTTSAAKLDVETGNLRQRDETKPFYANSLTPREMESLVAICDTFISSIDDSGVGHVDDCVAGYFSASASQTGTPDRVDEKGRNLAWKAIGYNGPSPDHSDHEVELNEEKKKKKPEEIFGPLYNGIVDLKSPREAVEKKLAGRGFAVSNQKRNTNGSSISDPVMKIQCDAVVVGSGSGGGVAAGVLAKAGYKVLVIESGNYYARSKLSLLEGQAMDDMYLSGGLLATSDTNVVILAGSTVGGGSTINWSASIKTPEHVMKEWAEKSKLEMFGSDLYREAMDVVCKRMGVQCGFVEEGFNNEVLRKGCEKLGLPVKNIPRNAPSDHYCGFCCLGCKKGQKQGTSETWLVDLVESDNGLILPGCQATEVMYDCEQGKKKKATGVAFAFGEEIYVVESRVTIVACGALRTPHLLKRSGLKNSNIGRNLCLHPVVMAWGWFPEEDKWPEKKKKSYEGGIMTAMSSVVIEETHSSYGEMVIQTPALHPGMFSGIIPWTSSKDFKTRMLKFSRTAHIFALLRDKGTGTIDSKTYIDYNLNDEDEESLKNGLERVLKILAAAGAEEIGTHHSEGRSLNVRTASSLEIERFVREESSKPLKDLSGQICSAHQMGSCRMGIRPEESAVRPTGETWEVERLFVADTSVFPTALGVNPMVTVQSIAYCIGLNVVDVLKKKK

SEQ ID NO: 83133 - protein, 636 aa, Arabidopsis thaliana
  peptide (1)..(636): Ceres Seq. ID no. 12668844
  misc_feature (135)..(401): Pfam Name: GMC oxidoreductase Pfam Description: GMC oxidoreductase
  misc_feature (43)..(636): Homolog of NCBI NO: 16905151 NR Description: putative alcohol oxidase [Oryza sativa]
  misc_feature (44)..(636): Homolog of NCBI NO: 37535334 NR Description: putative oxidase [Oryza sativa (japonica
  misc_feature (43)..(635): Homolog of NCBI NO: 14532706 NR Description: unknown protein [Arabidopsis thaliana]
  misc_feature (43)..(635): Homolog of NCBI NO: 15235348 NR Description: putative protein; protein id: At4g28570.1, by cDNA: 19314., supported by cDNA: gi_14532705 [Arabidopsis
  misc_feature (43)..(635): Homolog of NCBI NO: 21554016 NR Description: unknown [Arabidopsis thaliana]
  misc_feature (44)..(632): Homolog of NCBI NO: 37535330 NR Description: putative alcohol oxidase [Oryza sativa (japonica group)] >gi|16905157|gb|AAL31027.1| putative alcohol oxidase sativa] >gi|31432646|gb|AAP54254.1| putative alcohol oxidase
  misc_feature (26)..(635): Homolog of NCBI NO: 37535318 NR Description: putative alcohol oxidase [Oryza sativa (japonica group)] >gi|16905154|gb|AAL31024.1| putative alcohol oxidase sativa] >gi|31432640|gb|AAP54248.1| putative alcohol oxidase
  misc_feature (53)..(636): Homolog of NCBI NO: 25367436 NR Description: hypothetical protein [imported] - Arabidopsis
  misc_feature (87)..(636): Homolog of NCBI NO: 15219612 NR Description: unknown protein; protein id: At1g03990.1
  misc_feature (59)..(628): Homolog of NCBI NO: 18403753 NR Description: expressed protein; protein id: At3g23410.1, by cDNA: gi_13605691 [Arabidopsis thaliana] contains similarity to long chain fatty alcohol
MESLVAICDTFISSIDDSGVGHVDDCVAGYFSASASQTGTPDRVDEKGRNLAWKAIGYNGPSPDHSDHEVELNEEKKKKKPEEIFGPLYNGIVDLKSPREAVEKKLAGRGFAVSNQKRNTNGSSISDPVMKIQCDAVVVGSGSGGGVAAGVLAKAGYKVLVIESGNYYARSKLSLLEGQAMDDMYLSGGLLATSDTNVVILAGSTVGGGSTINWSASIKTPEHVMKEWAEKSKLEMFGSDLYREAMDVVCKRMGVQCGFVEEGFNNEVLRKGCEKLGLPVKNIPRNAPSDHYCGFCCLGCKKGQKQGTSETWLVDLVESDNGLILPGCQATEVMYDCEQGKKKKATGVAFAFGEEIYVVESRVTIVACGALRTPHLLKRSGLKNSNIGRNLCLHPVVMAWGWFPEEDKWPEKKKKSYEGGIMTAMSSVVIEETHSSYGEMVIQTPALHPGMFSGIIPWTSSKDFKTRMLKFSRTAHIFALLRDKGTGTIDSKTYIDYNLNDEDEESLKNGLERVLKILAAAGAEEIGTHHSEGRSLNVRTASSLEIERFVREESSKPLKDLSGQICSAHQMGSCRMGIRPEESAVRPTGETWEVERLFVADTSVFPTALGVNPMVTVQSIAYCIGLNVVDVLKKKK

SEQ ID NO: 83134 - protein, 507 aa, Arabidopsis thaliana
  peptide (1)..(507): Ceres Seq. ID no. 12668845
  misc_feature (6)..(272): Pfam Name: GMC oxidoreductase Pfam Description: GMC oxidoreductase
  misc_feature (1)..(507): Homolog of NCBI NO: 16905151 NR Description: putative alcohol oxidase [Oryza sativa]
  misc_feature (1)..(507): Homolog of NCBI NO: 37535334 NR Description: putative oxidase [Oryza sativa (japonica
  misc_feature (1)..(506): Homolog of NCBI NO: 14532706 NR Description: unknown protein [Arabidopsis thaliana]
  misc_feature (1)..(506): Homolog of NCBI NO: 15235348 NR Description: putative protein; protein id: At4g28570.1, by cDNA: 19314., supported by cDNA: gi_14532705 [Arabidopsis
  misc_feature (1)..(506): Homolog of NCBI NO: 21554016 NR Description: unknown [Arabidopsis thaliana]
  misc_feature (1)..(503): Homolog of NCBI NO: 37535330 NR Description: putative alcohol oxidase [Oryza sativa (japonica group)] >gi|16905157|gb|AAL31027.1| putative alcohol oxidase sativa] >gi|31432646|gb|AAP54254.1| putative alcohol oxidase
  misc_feature (1)..(506): Homolog of NCBI NO: 37535318 NR Description: putative alcohol oxidase [Oryza sativa (japonica group)] >gi|16905154|gb|AAL31024.1| putative alcohol oxidase sativa] >gi|31432640|gb|AAP54248.1| putative alcohol oxidase
  misc_feature (1)..(507): Homolog of NCBI NO: 25367436 NR Description: hypothetical protein [imported] - Arabidopsis
  misc_feature (1)..(507): Homolog of NCBI NO: 15219612 NR Description: unknown protein; protein id: At1g03990.1
  misc_feature (1)..(499): Homolog of NCBI NO: 18403753 NR Description: expressed protein; protein id: At3g23410.1, by cDNA: gi_13605691 [Arabidopsis thaliana] contains similarity to long chain fatty alcohol
MKIQCDAVVVGSGSGGGVAAGVLAKAGYKVLVIESGNYYARSKLSLLEGQAMDDMYLSGGLLATSDTNVVILAGSTVGGGSTINWSASIKTPEHVMKEWAEKSKLEMFGSDLYREAMDVVCKRMGVQCGFVEEGFNNEVLRKGCEKLGLPVKNIPRNAPSDHYCGFCCLGCKKGQKQGTSETWLVDLVESDNGLILPGCQATEVMYDCEQGKKKKATGVAFAFGEEIYVVESRVTIVACGALRTPHLLKRSGLKNSNIGRNLCLHPVVMAWGWFPEEDKWPEKKKKSYEGGIMTAMSSVVIEETHSSYGEMVIQTPALHPGMFSGIIPWTSSKDFKTRMLKFSRTAHIFALLRDKGTGTIDSKTYIDYNLNDEDEESLKNGLERVLKILAAAGAEEIGTHHSEGRSLNVRTASSLEIERFVREESSKPLKDLSGQICSAHQMGSCRMGIRPEESAVRPTGETWEVERLFVADTSVFPTALGVNPMVTVQSIAYCIGLNVVDVLKKKK

SEQ ID NO: 83135 - DNA, 924 bp, Arabidopsis thaliana
  misc_feature (1)..(924): Ceres Seq. ID no. 12668846
  misc_feature: MA Experiment ID: 20000169 Result: Up-regulated in Transcription
  misc_feature: MA Experiment 20000169 PARAMETER Experiment Name: At_100uM_ABA_P Parameter: Age (day) Value: 14
  misc_feature: MA Experiment 20000169 PARAMETER Experiment Name: At_100uM_ABA_P Parameter: Organism Value: A. thaliana
  misc_feature: MA Experiment 20000169 PARAMETER Experiment Name: At_100uM_ABA_P Parameter: Plant Line Value: WS
  misc_feature: MA Experiment 20000169 PARAMETER Experiment Name: At_100uM_ABA_P Parameter: Timepoint (hr) Value: 6
  misc_feature: MA Experiment 20000169 PARAMETER Experiment Name: At_100uM_ABA_P Parameter: Tissue Value: Aerial
  misc_feature: MA Experiment 20000169 PARAMETER Experiment Name: At_100uM_ABA_P Parameter: Treatment Value: 100uM ABA vs. No Treatment
  misc_feature: MA Experiment ID: 20000173 Result: Down-regulated in Transcription
  misc_feature: MA Experiment 20000173 PARAMETER Experiment Name: At_42deg_Heat_P Parameter: Age (day) Value: 14
  misc_feature: MA Experiment 20000173 PARAMETER Experiment Name: At_42deg_Heat_P Parameter: Organism Value: A. thaliana
  misc_feature: MA Experiment 20000173 PARAMETER Experiment Name: At_42deg_Heat_P Parameter: Plant Line Value: WS
  misc_feature: MA Experiment 20000173 PARAMETER Experiment Name: At_42deg_Heat_P Parameter: Temperature (deg C) Value: 42 vs. 22
  misc_feature: MA Experiment 20000173 PARAMETER Experiment Name: At_42deg_Heat_P Parameter: Timepoint (hr) Value: 6
  misc_feature: MA Experiment 20000173 PARAMETER Experiment Name: At_42deg_Heat_P Parameter: Tissue Value: Aerial
  misc_feature: MA Experiment ID: 20000184 Result: Down-regulated in Transcription
  misc_feature: MA Experiment 20000184 PARAMETER Experiment Name: At_Shoots__P Parameter: Age (day) Value: 7
  misc_feature: MA Experiment 20000184 PARAMETER Experiment Name: At_Shoots__P Parameter: Tissue Value: Shoots vs. Whole Plant
  misc_feature: MA Experiment ID: 20000185 Result: Down-regulated in Transcription
  misc_feature: MA Experiment 20000185 PARAMETER Experiment Name: At_Roots__P Parameter: Age (day) Value: 7 vs. 21
  misc_feature: MA Experiment 20000185 PARAMETER Experiment Name: At_Roots__P Parameter: Organism Value: A. thaliana
  misc_feature: MA Experiment 20000185 PARAMETER Experiment Name: At_Roots__P Parameter: Tissue Value: Roots vs. Whole Plant
  misc_feature: MA Experiment ID: 20000227 Result: Down-regulated in Transcription
  misc_feature: MA Experiment 20000227 PARAMETER Experiment Name: At_Root-Tips-vs-Tops_P Parameter: Tissue Value: Root Tips vs. Root Tops
  misc_feature: MA Experiment ID: 20000234 Result: Down-regulated in Transcription
  misc_feature: MA Experiment 20000234 PARAMETER Experiment Name: At_Siliques_P Parameter: Age (day) Value: 21
  misc_feature: MA Experiment 20000234 PARAMETER Experiment Name: At_Siliques_P Parameter: Organism Value: A. thaliana
  misc_feature: MA Experiment 20000234 PARAMETER Experiment Name: At_Siliques_P Parameter: Plant Line Value: WS
  misc_feature: MA Experiment 20000234 PARAMETER Experiment Name: At_Siliques_P Parameter: Tissue Value: Less Than 5mm Siliques vs. Whole Plant
  misc_feature: MA Experiment ID: 20000235 Result: Down-regulated in Transcription
  misc_feature: MA Experiment 20000235 PARAMETER Experiment Name: At_Siliques_P Parameter: Age (day) Value: 21
  misc_feature: MA Experiment 20000235 PARAMETER Experiment Name: At_Siliques_P Parameter: Organism Value: A. thaliana
  misc_feature: MA Experiment 20000235 PARAMETER Experiment Name: At_Siliques_P Parameter: Plant Line Value: WS
  misc_feature: MA Experiment 20000235 PARAMETER Experiment Name: At_Siliques_P Parameter: Tissue Value: 5-10mm Siliques vs. Whole Plant
  misc_feature: MA Experiment ID: 20000264 Result: Down-regulated in Transcription
  misc_feature: MA Experiment 20000264 PARAMETER Experiment Name: At_Open_Flower_P Parameter: Age (day) Value: 21
  misc_feature: MA Experiment 20000264 PARAMETER Experiment Name: At_Open_Flower_P Parameter: Plant Line Value: WS
  misc_feature: MA Experiment 20000264 PARAMETER Experiment Name: At_Open_Flower_P Parameter: Tissue Value: Open Flower vs. Whole Plant
  misc_feature: MA Experiment ID: 20000265 Result: Down-regulated in Transcription
  misc_feature: MA Experiment 20000265 PARAMETER Experiment Name: At_Open_Flower_P Parameter: Age (day) Value: 21
  misc_feature: MA Experiment 20000265 PARAMETER Experiment Name: At_Open_Flower_P Parameter: Plant Line Value: WS
  misc_feature: MA Experiment 20000265 PARAMETER Experiment Name: At_Open_Flower_P Parameter: Tissue Value: Closed Flower vs. Whole Plant
  misc_feature: MA Experiment ID: 20000267 Result: Up-regulated in Transcription
  misc_feature: MA Experiment 20000267 PARAMETER Experiment Name: At_Drought_P Parameter: Age (day) Value: 7
  misc_feature: MA Experiment 20000267 PARAMETER Experiment Name: At_Drought_P Parameter: Organism Value: A. thaliana
  misc_feature: MA Experiment 20000267 PARAMETER Experiment Name: At_Drought_P Parameter: Plant Line Value: WS
  misc_feature: MA Experiment 20000267 PARAMETER Experiment Name: At_Drought_P Parameter: Timepoint (hr) Value: 6
  misc_feature: MA Experiment 20000267 PARAMETER Experiment Name: At_Drought_P Parameter: Tissue Value: Whole Plant
  misc_feature: MA Experiment 20000267 PARAMETER Experiment Name: At_Drought_P Parameter: Treatment Value: Drought vs. No Drought
  misc_feature: MA Experiment ID: 20000268 Result: Up-regulated in Transcription
  misc_feature: MA Experiment 20000268 PARAMETER Experiment Name: At_100mM_NaCl__P Parameter: Age (day) Value: 14
  misc_feature: MA Experiment 20000268 PARAMETER Experiment Name: At_100mM_NaCl__P Parameter: Organism Value: A. thaliana
  misc_feature: MA Experiment 20000268 PARAMETER Experiment Name: At_100mM_NaCl__P Parameter: Plant Line Value: WS
  misc_feature: MA Experiment 20000268 PARAMETER Experiment Name: At_100mM_NaCl__P Parameter: Timepoint (hr) Value: 6
  misc_feature: MA Experiment 20000268 PARAMETER Experiment Name: At_100mM_NaCl__P Parameter: Tissue Value: Whole Plant
  misc_feature: MA Experiment 20000268 PARAMETER Experiment Name: At_100mM_NaCl__P Parameter: Treatment Value: 100mM NaCl vs. No Treatment
  misc_feature: MA Experiment ID: 20000286 Result: Down-regulated in Transcription
  misc_feature: MA Experiment 20000286 PARAMETER Experiment Name: At_Open_Flower_P Parameter: Age (day) Value: 21
  misc_feature: MA Experiment 20000286 PARAMETER Experiment Name: At_Open_Flower_P Parameter: Plant Line Value: WS
  misc_feature: MA Experiment 20000286 PARAMETER Experiment Name: At_Open_Flower_P Parameter: Tissue Value: Half Open vs. Whole Plant
  misc_feature: MA Experiment ID: 20000308 Result: Up-regulated in Transcription
  misc_feature: MA Experiment 20000308 PARAMETER Experiment Name: At_100mM_NaCl__P Parameter: Age (day) Value: 17
  misc_feature: MA Experiment 20000308 PARAMETER Experiment Name: At_100mM_NaCl__P Parameter: Organism Value: A. thaliana
  misc_feature: MA Experiment 20000308 PARAMETER Experiment Name: At_100mM_NaCl__P Parameter: Plant Line Value: WS
  misc_feature: MA Experiment 20000308 PARAMETER Experiment Name: At_100mM_NaCl__P Parameter: Timepoint (hr) Value: 72
  misc_feature: MA Experiment 20000308 PARAMETER Experiment Name: At_100mM_NaCl__P Parameter: Tissue Value: Whole Plant
  misc_feature: MA Experiment 20000308 PARAMETER Experiment Name: At_100mM_NaCl__P Parameter: Treatment Value: 100mM NaCl vs. No Treatment
  misc_feature: MA Experiment ID: 20000436 Result: Up-regulated in Transcription
  misc_feature: MA Experiment 20000436 PARAMETER Experiment Name: At_Drought_P Parameter: Age (day) Value: 7
  misc_feature: MA Experiment 20000436 PARAMETER Experiment Name: At_Drought_P Parameter: Organism Value: A. thaliana
  misc_feature: MA Experiment 20000436 PARAMETER Experiment Name: At_Drought_P Parameter: Plant Line Value: WS
  misc_feature: MA Experiment 20000436 PARAMETER Experiment Name: At_Drought_P Parameter: Timepoint (hr) Value: 12
  misc_feature: MA Experiment 20000436 PARAMETER Experiment Name: At_Drought_P Parameter: Tissue Value: Whole Plant
  misc_feature: MA Experiment 20000436 PARAMETER Experiment Name: At_Drought_P Parameter: Treatment Value: Drought vs. No Drought
  misc_feature: MA Experiment ID: 20000437 Result: Up-regulated in Transcription
  misc_feature: MA Experiment 20000437 PARAMETER Experiment Name: At_Drought_P Parameter: Age (day) Value: 8
  misc_feature: MA Experiment 20000437 PARAMETER Experiment Name: At_Drought_P Parameter: Organism Value: A. thaliana
  misc_feature: MA Experiment 20000437 PARAMETER Experiment Name: At_Drought_P Parameter: Plant Line Value: WS
  misc_feature: MA Experiment 20000437 PARAMETER Experiment Name: At_Drought_P Parameter: Timepoint (hr) Value: 24
  misc_feature: MA Experiment 20000437 PARAMETER Experiment Name: At_Drought_P Parameter: Tissue Value: Whole Plant
  misc_feature: MA Experiment 20000437 PARAMETER Experiment Name: At_Drought_P Parameter: Treatment Value: Drought vs. No Drought
  misc_feature: MA Experiment ID: 20000438 Result: Down-regulated in Transcription
  misc_feature: MA Experiment 20000438 PARAMETER Experiment Name: At_Shoots__P Parameter: Age (day) Value: 14
  misc_feature: MA Experiment 20000438 PARAMETER Experiment Name: At_Shoots__P Parameter: Tissue Value: Shoots vs. Whole Plant
  misc_feature: MA Experiment ID: 20000439 Result: Down-regulated in Transcription
  misc_feature: MA Experiment 20000439 PARAMETER Experiment Name: At_Roots__P Parameter: Age (day) Value: 14 vs. 21
  misc_feature: MA Experiment 20000439 PARAMETER Experiment Name: At_Roots__P Parameter: Organism Value: A. thaliana
  misc_feature: MA Experiment 20000439 PARAMETER Experiment Name: At_Roots__P Parameter: Tissue Value: Roots vs. Whole Plant
  misc_feature: MA Experiment ID: 20000453 Result: Up-regulated in Transcription
  misc_feature: MA Experiment 20000453 PARAMETER Experiment Name: At_100uM_ABA_P Parameter: Age (day) Value: 15
  misc_feature: MA Experiment 20000453 PARAMETER Experiment Name: At_100uM_ABA_P Parameter: Organism Value: A. thaliana
  misc_feature: MA Experiment 20000453 PARAMETER Experiment Name: At_100uM_ABA_P Parameter: Plant Line Value: WS
  misc_feature: MA Experiment 20000453 PARAMETER Experiment Name: At_100uM_ABA_P Parameter: Timepoint (hr) Value: 24
  misc_feature: MA Experiment 20000453 PARAMETER Experiment Name: At_100uM_ABA_P Parameter: Tissue Value: Aerial
  misc_feature: MA Experiment 20000453 PARAMETER Experiment Name: At_100uM_ABA_P Parameter: Treatment Value: 100uM ABA vs. No Treatment
  misc_feature: MA Experiment ID: 20000496 Result: Down-regulated in Transcription
  misc_feature: MA Experiment 20000496 PARAMETER Experiment Name: At_Guard_Cells_P Parameter: Harvest Date Value: 7/19/2002
  misc_feature: MA Experiment 20000496 PARAMETER Experiment Name: At_Guard_Cells_P Parameter: Organism Value: Canola
  misc_feature: MA Experiment 20000496 PARAMETER Experiment Name: At_Guard_Cells_P Parameter: Tissue Value: Guard Cells vs. Leaves
  misc_feature: MA Experiment ID: 20000794 Result: Down-regulated in Transcription
  misc_feature: MA Experiment 20000794 PARAMETER Experiment Name: At_Petals_P Parameter: Age (day) Value: 23-25 days
  misc_feature: MA Experiment 20000794 PARAMETER Experiment Name: At_Petals_P Parameter: Plant Line Value: WS
  misc_feature: MA Experiment 20000794 PARAMETER Experiment Name: At_Petals_P Parameter: Tissue Value: Petals vs. Whole plant
  misc_feature: MA Experiment ID: 20001248 Result: Up-regulated in Transcription
  misc_feature: MA Experiment 20001248 PARAMETER Experiment Name: At_Far-red-induction_P Parameter: Age (day) Value: 7
  misc_feature: MA Experiment 20001248 PARAMETER Experiment Name: At_Far-red-induction_P Parameter: Light Value: Far-red vs. White
  misc_feature: MA Experiment 20001248 PARAMETER Experiment Name: At_Far-red-induction_P Parameter: Organism Value: A. thaliana
  misc_feature: MA Experiment 20001248 PARAMETER Experiment Name: At_Far-red-induction_P Parameter: Plant Line Value: Columbia
  misc_feature: MA Experiment 20001248 PARAMETER Experiment Name: At_Far-red-induction_P Parameter: Timepoint (hr) Value: 4
  misc_feature: MA Experiment 20001248 PARAMETER Experiment Name: At_Far-red-induction_P Parameter: Tissue Value: Whole Plant
  misc_feature: MA Experiment ID: 20001555 Result: Up-regulated in Transcription
  misc_feature: MA Experiment 20001555 PARAMETER Experiment Name: At_Drought_Soil_Dry_P Parameter: Age (day) Value: 24
  misc_feature: MA Experiment 20001555 PARAMETER Experiment Name: At_Drought_Soil_Dry_P Parameter: Organism Value: A. thaliana
  misc_feature: MA Experiment 20001555 PARAMETER Experiment Name: At_Drought_Soil_Dry_P Parameter: Plant Line Value: WS
  misc_feature: MA Experiment 20001555 PARAMETER Experiment Name: At_Drought_Soil_Dry_P Parameter: Post Timepoint (hr) Value: None
  misc_feature: MA Experiment 20001555 PARAMETER Experiment Name: At_Drought_Soil_Dry_P Parameter: Post-Treatment Value: None
  misc_feature: MA Experiment 20001555 PARAMETER Experiment Name: At_Drought_Soil_Dry_P Parameter: Timepoint (day) Value: 10
  misc_feature: MA Experiment 20001555 PARAMETER Experiment Name: At_Drought_Soil_Dry_P Parameter: Treatment Value: Drought vs. No Drought
  misc_feature: MA Experiment ID: 20001556 Result: Up-regulated in Transcription
  misc_feature: MA Experiment 20001556 PARAMETER Experiment Name: At_Drought_Soil_Dry_P Parameter: Age (day) Value: 26
  misc_feature: MA Experiment 20001556 PARAMETER Experiment Name: At_Drought_Soil_Dry_P Parameter: Organism Value: A. thaliana
  misc_feature: MA Experiment 20001556 PARAMETER Experiment Name: At_Drought_Soil_Dry_P Parameter: Plant Line Value: WS
  misc_feature: MA Experiment 20001556 PARAMETER Experiment Name: At_Drought_Soil_Dry_P Parameter: Post Timepoint (hr) Value: None
  misc_feature: MA Experiment 20001556 PARAMETER Experiment Name: At_Drought_Soil_Dry_P Parameter: Post-Treatment Value: None
  misc_feature: MA Experiment 20001556 PARAMETER Experiment Name: At_Drought_Soil_Dry_P Parameter: Timepoint (day) Value: 12
  misc_feature: MA Experiment 20001556 PARAMETER Experiment Name: At_Drought_Soil_Dry_P Parameter: Treatment Value: Drought vs. No Drought
  misc_feature: MA Experiment ID: 20001559 Result: Up-regulated in Transcription
  misc_feature: MA Experiment 20001559 PARAMETER Experiment Name: At_Drought_Soil_Dry_P Parameter: Age (day) Value: 28
  misc_feature: MA Experiment 20001559 PARAMETER Experiment Name: At_Drought_Soil_Dry_P Parameter: Organism Value: A. thaliana
  misc_feature: MA Experiment 20001559 PARAMETER Experiment Name: At_Drought_Soil_Dry_P Parameter: Plant Line Value: WS
  misc_feature: MA Experiment 20001559 PARAMETER Experiment Name: At_Drought_Soil_Dry_P Parameter: Post Timepoint (hr) Value: 29
  misc_feature: MA Experiment 20001559 PARAMETER Experiment Name: At_Drought_Soil_Dry_P Parameter: Post-Treatment Value: Re-Water vs. No Drought
  misc_feature: MA Experiment 20001559 PARAMETER Experiment Name: At_Drought_Soil_Dry_P Parameter: Timepoint (day) Value: 14
  misc_feature: MA Experiment 20001559 PARAMETER Experiment Name: At_Drought_Soil_Dry_P Parameter: Treatment Value: Drought vs. No Drought
  misc_feature: MA Experiment ID: 20001904 Result: Up-regulated in Transcription
  misc_feature: MA Experiment 20001904 PARAMETER Experiment Name: At_Drought_Reproduction_P Parameter: Age (day) Value: 37
  misc_feature: MA Experiment 20001904 PARAMETER Experiment Name: At_Drought_Reproduction_P Parameter: Organism Value: A. thaliana
  misc_feature: MA Experiment 20001904 PARAMETER Experiment Name: At_Drought_Reproduction_P Parameter: Plant Line Value: WS
  misc_feature: MA Experiment 20001904 PARAMETER Experiment Name: At_Drought_Reproduction_P Parameter: Timepoint (day) Value: 7
  misc_feature: MA Experiment 20001904 PARAMETER Experiment Name: At_Drought_Reproduction_P Parameter: Tissue Value: Rosettes
  misc_feature: MA Experiment 20001904 PARAMETER Experiment Name: At_Drought_Reproduction_P Parameter: Treatment Value: Drought vs. No Drought
  misc_feature: MA Experiment ID: 20001906 Result: Up-regulated in Transcription
  misc_feature: MA Experiment 20001906 PARAMETER Experiment Name: At_Drought_Reproduction_P Parameter: Age (day) Value: 35
  misc_feature: MA Experiment 20001906 PARAMETER Experiment Name: At_Drought_Reproduction_P Parameter: Organism Value: A. thaliana
  misc_feature: MA Experiment 20001906 PARAMETER Experiment Name: At_Drought_Reproduction_P Parameter: Plant Line Value: WS
  misc_feature: MA Experiment 20001906 PARAMETER Experiment Name: At_Drought_Reproduction_P Parameter: Timepoint (day) Value: 5
  misc_feature: MA Experiment 20001906 PARAMETER Experiment Name: At_Drought_Reproduction_P Parameter: Tissue Value: Siliques
  misc_feature: MA Experiment 20001906 PARAMETER Experiment Name: At_Drought_Reproduction_P Parameter: Treatment Value: Drought vs. No Drought
  misc_feature: MA Experiment ID: 20001911 Result: Up-regulated in Transcription
  misc_feature: MA Experiment 20001911 PARAMETER Experiment Name: At_Drought_Reproduction_P Parameter: Age (day) Value: 40
  misc_feature: MA Experiment 20001911 PARAMETER Experiment Name: At_Drought_Reproduction_P Parameter: Organism Value: A. thaliana
  misc_feature: MA Experiment 20001911 PARAMETER Experiment Name: At_Drought_Reproduction_P Parameter: Plant Line Value: WS
  misc_feature: MA Experiment 20001911 PARAMETER Experiment Name: At_Drought_Reproduction_P Parameter: Timepoint (day) Value: 10
  misc_feature: MA Experiment 20001911 PARAMETER Experiment Name: At_Drought_Reproduction_P Parameter: Tissue Value: Flowers
  misc_feature: MA Experiment 20001911 PARAMETER Experiment Name: At_Drought_Reproduction_P Parameter: Treatment Value: Drought vs. No Drought
gattcgtccctaagcagccatgacgacgccgtgccggaccattaacgctaatgctatcgccgcaccgtcgccttcgggattgatctttaacgggtttcgtgatttcgtcccgattgaaaagaggcttgttatatcaagctttcgtggcttgaaactaccgtcgaggacgacgaagactattacgagctctgactggagttggagttataggtctccgggaagattggcgtctgcgtctacgtctacgtctgcgtctacgtctacgtctgcggctgtaacatcgaattctacgaatagatttgaagctttagaagaggggattgagaaggtcatttatagttgtcgatttatgacgtttcttggaacattaggatctttgctcggatcggttctctgtttcatcaagggatgtatgtatgttgtagactcgtttttgcagtattcggtgaatcgtgggaaagtgatattccttttggttgaggccatagatatatatctcctaggaactgtgatgttagtctttggattgggactttacgagttgttcatcagcaatctcgatacttcagagtcgcgcacacacgatattgtttccaataggtcgagcctctttggcatgttcaccttaaaggagcgacctcaatggttagaggtgaaatcggtaagcgagctgaaaacaaagttgggacatgtaatagtgatgctactattgattggtttgtttgacaagagcaagagagtagtcataacttctgtcacggatttgctatgtatctctgtttctatctttttttcttctgcttgtctcttcttgctctctaggctcaatggttcacactgaggagttaatggtgttgtcccaaaacaaaagaaactttgtatgtgtataatgttttagcaacgctccatcttctctttttgttc

SEQ ID NO: 83136 - protein, 273 aa, Arabidopsis thaliana
  peptide (1)..(273): Ceres Seq. ID no. 12668847
  misc_feature (1)..(273): Homolog of NCBI NO: 18415304 NR Description: putative protein; protein id: At4g19390.1, by cDNA: gi_14190356, supported by cDNA: gi_15810052 [Arabidopsis >gi|14190357|gb|AAK55659.1|AF378856_1 AT4g19390/T5K18_170
  misc_feature (1)..(273): Homolog of NCBI NO: 15810053 NR Description: AT4g19390/T5K18_170 [Arabidopsis thaliana]
  misc_feature (1)..(273): Homolog of NCBI NO: 7487716 NR Description: hypothetical protein T5K18.170 - Arabidopsis >gi|3080369|emb|CAA18626.1| putative protein [Arabidopsis >gi|7268734|emb|CAB78941.1| putative protein [Arabidopsis
  misc_feature (91)..(270): Homolog of NCBI NO: 34899026 NR Description: contains ESTs to Arabidopsis thaliana chromosome 5, At5g13720~unknown protein
  misc_feature (36)..(270): Homolog of NCBI NO: 15240692 NR Description: unknown protein; protein id: At5g13720.1, by cDNA: gi_20465417 [Arabidopsis thaliana]
  misc_feature (66)..(270): Homolog of NCBI NO: 20465418 NR Description: unknown protein [Arabidopsis thaliana]
  misc_feature (96)..(270): Homolog of NCBI NO: 34395260 NR Description: unknown protein [Oryza sativa (japonica
  misc_feature (96)..(270): Homolog of NCBI NO: 34899024 NR Description: hypothetical protein~similar to Arabidopsis
  misc_feature (98)..(270): Homolog of NCBI NO: 31126772 NR Description: unknown protein [Oryza sativa (japonica
  misc_feature (93)..(250): Homolog of NCBI NO: 33864647 NR Description: conserved hypothetical protein [Synechococcus sp.
MTTPCRTINANAIAAPSPSGLIFNGFRDFVPIEKRLVISSFRGLKLPSRTTKTITSSDWSWSYRSPGRLASASTSTSASTSTSAAVTSNSTNRFEALEEGIEKVIYSCRFMTFLGTLGSLLGSVLCFIKGCMYVVDSFLQYSVNRGKVIFLLVEAIDIYLLGTVMLVFGLGLYELFISNLDTSESRTHDIVSNRSSLFGMFTLKERPQWLEVKSVSELKTKLGHVIVMLLLIGLFDKSKRVVITSVTDLLCISVSIFFSSACLFLLSRLNGSH

SEQ ID NO: 83137 - protein, 163 aa, Arabidopsis thaliana
  peptide (1)..(163): Ceres Seq. ID no. 12668848
  misc_feature (1)..(163): Homolog of NCBI NO: 18415304 NR Description: putative protein; protein id: At4g19390.1, by cDNA: gi_14190356, supported by cDNA: gi_15810052 [Arabidopsis >gi|14190357|gb|AAK55659.1|AF378856_1 AT4g19390/T5K18_170
  misc_feature (1)..(163): Homolog of NCBI NO: 15810053 NR Description: AT4g19390/T5K18_170 [Arabidopsis thaliana]
  misc_feature (1)..(163): Homolog of NCBI NO: 7487716 NR Description: hypothetical protein T5K18.170 - Arabidopsis >gi|3080369|emb|CAA18626.1| putative protein [Arabidopsis >gi|7268734|emb|CAB78941.1| putative protein [Arabidopsis
  misc_feature (1)..(160): Homolog of NCBI NO: 34899026 NR Description: contains ESTs to Arabidopsis thaliana chromosome 5, At5g13720~unknown protein
  misc_feature (1)..(160): Homolog of NCBI NO: 15240692 NR Description: unknown protein; protein id: At5g13720.1, by cDNA: gi_20465417 [Arabidopsis thaliana]
  misc_feature (1)..(160): Homolog of NCBI NO: 20465418 NR Description: unknown protein [Arabidopsis thaliana]
  misc_feature (1)..(160): Homolog of NCBI NO: 34395260 NR Description: unknown protein [Oryza sativa (japonica
  misc_feature (1)..(160): Homolog of NCBI NO: 34899024 NR Description: hypothetical protein~similar to Arabidopsis
  misc_feature (1)..(160): Homolog of NCBI NO: 31126772 NR Description: unknown protein [Oryza sativa (japonica
  misc_feature (1)..(140): Homolog of NCBI NO: 33864647 NR Description: conserved hypothetical protein [Synechococcus sp.
MTFLGTLGSLLGSVLCFIKGCMYVVDSFLQYSVNRGKVIFLLVEAIDIYLLGTVMLVFGLGLYELFISNLDTSESRTHDIVSNRSSLFGMFTLKERPQWLEVKSVSELKTKLGHVIVMLLLIGLFDKSKRVVITSVTDLLCISVSIFFSSACLFLLSRLNGSH

SEQ ID NO: 83138 - protein, 142 aa, Arabidopsis thaliana
  peptide (1)..(142): Ceres Seq. ID no. 12668849
  misc_feature (1)..(142): Homolog of NCBI NO: 18415304 NR Description: putative protein; protein id: At4g19390.1, by cDNA: gi_14190356, supported by cDNA: gi_15810052 [Arabidopsis >gi|14190357|gb|AAK55659.1|AF378856_1 AT4g19390/T5K18_170
  misc_feature (1)..(142): Homolog of NCBI NO: 15810053 NR Description: AT4g19390/T5K18_170 [Arabidopsis thaliana]
  misc_feature (1)..(142): Homolog of NCBI NO: 7487716 NR Description: hypothetical protein T5K18.170 - Arabidopsis >gi|3080369|emb|CAA18626.1| putative protein [Arabidopsis >gi|7268734|emb|CAB78941.1| putative protein [Arabidopsis
  misc_feature (1)..(139): Homolog of NCBI NO: 34899026 NR Description: contains ESTs to Arabidopsis thaliana chromosome 5, At5g13720~unknown protein
  misc_feature (1)..(139): Homolog of NCBI NO: 15240692 NR Description: unknown protein; protein id: At5g13720.1, by cDNA: gi_20465417 [Arabidopsis thaliana]
  misc_feature (1)..(139): Homolog of NCBI NO: 20465418 NR Description: unknown protein [Arabidopsis thaliana]
  misc_feature (1)..(139): Homolog of NCBI NO: 34395260 NR Description: unknown protein [Oryza sativa (japonica
  misc_feature (1)..(139): Homolog of NCBI NO: 34899024 NR Description: hypothetical protein~similar to Arabidopsis
  misc_feature (1)..(139): Homolog of NCBI NO: 31126772 NR Description: unknown protein [Oryza sativa (japonica
  misc_feature (1)..(119): Homolog of NCBI NO: 33864647 NR Description: conserved hypothetical protein [Synechococcus sp.
MYVVDSFLQYSVNRGKVIFLLVEAIDIYLLGTVMLVFGLGLYELFISNLDTSESRTHDIVSNRSSLFGMFTLKERPQWLEVKSVSELKTKLGHVIVMLLLIGLFDKSKRVVITSVTDLLCISVSIFFSSACLFLLSRLNGSH

SEQ ID NO: 83139 - DNA, 1053 bp, Arabidopsis thaliana
  misc_feature (1)..(1053): Ceres Seq. ID no. 12668873
  misc_feature: MA Experiment ID: 20000227 Result: Down-regulated in Transcription
  misc_feature: MA Experiment 20000227 PARAMETER Experiment Name: At_Root-Tips-vs-Tops_P Parameter: Tissue Value: Root Tips vs. Root Tops
  misc_feature: MA Experiment ID: 20000437 Result: Down-regulated in Transcription
  misc_feature: MA Experiment 20000437 PARAMETER Experiment Name: At_Drought_P Parameter: Age (day) Value: 8
  misc_feature: MA Experiment 20000437 PARAMETER Experiment Name: At_Drought_P Parameter: Organism Value: A. thaliana
  misc_feature: MA Experiment 20000437 PARAMETER Experiment Name: At_Drought_P Parameter: Plant Line Value: WS
  misc_feature: MA Experiment 20000437 PARAMETER Experiment Name: At_Drought_P Parameter: Timepoint (hr) Value: 24
  misc_feature: MA Experiment 20000437 PARAMETER Experiment Name: At_Drought_P Parameter: Tissue Value: Whole Plant
  misc_feature: MA Experiment 20000437 PARAMETER Experiment Name: At_Drought_P Parameter: Treatment Value: Drought vs. No Drought
  misc_feature: MA Experiment ID: 20000439 Result: Up-regulated in Transcription
  misc_feature: MA Experiment 20000439 PARAMETER Experiment Name: At_Roots__P Parameter: Age (day) Value: 14 vs. 21
  misc_feature: MA Experiment 20000439 PARAMETER Experiment Name: At_Roots__P Parameter: Organism Value: A. thaliana
  misc_feature: MA Experiment 20000439 PARAMETER Experiment Name: At_Roots__P Parameter: Tissue Value: Roots vs. Whole Plant
atggctactaccaagctcgtctacattctcctcatcctattcaccttcaccgtatctccggcgatctcaacggccccggaacattgtgatagcggctttgataacccgtgcatcaacaaagctaaggctttaccactcaaaatcgtagccattgttgccatacttacaacaagcttgataggcgtgacctctcctcttttcagccgttacatttcgttcctccgtcccgatggcaatggtttcatgatcgtcaaatgtttttcttctggaatcatccttggaaccggtttcatgcacgtcttgcctgactctttcgagatgttgtcatcgaaatgtcttagtgataatccgtggcataagttcccttttgcgggttttgtcgctatgatgtccggtctagtcactctagccattgactccattaccaccagcctttataccggtaagaactcagtcggaccagtgcctgatgaagagtatggcattgatcaagagaaagcgattcacatggtaggccacaatcatagtcacggtcatggtgtagtgctagcaactaaagatgatggacagcttttgcgctaccaagtcattgccatggtattggaggttggcattttatttcattctgtggtcattggactatctctaggagcaactaatgattcatgtaccattaaaggactcatcatagctctttgcttccatcacttgttcgaaggcataggtcttggtggctgcatcctccaggcagattttacaaatgtgaagaagttcttgatggcattctttttcactggaacaacaccttgtggtatctttcttggaatcgcattgtcgagtatctatagagataacagtccaaccgcgttgattacgattggactgttaaatgcttgctcggccggaatgctcatctacatggccctcgtcgaccttctagctaccgagttcatggggtcaatgctccaaggtagcatcaaacttcagatcaagtgcttcacggcggctttgcttggctgcgccgtaatgtcggtcgtcgccgtgtgggcttaa

SEQ ID NO: 83140 - protein, 350 aa, Arabidopsis thaliana
  peptide (1)..(350): Ceres Seq. ID no. 12668874
  misc_feature (44)..(347): Pfam Name: ZIP Zinc transporter Pfam Description: ZIP Zinc transporter
  misc_feature (1)..(350): Homolog of NCBI NO: 15235143 NR Description: putative Fe(II) transport protein; protein id: [Arabidopsis thaliana] >gi|7488125|pir||T04749 probable iron
  misc_feature (5)..(350): Homolog of NCBI NO: 22328811 NR Description: Fe(II) transport protein; protein id: supported by cDNA: gi_1353265 [Arabidopsis thaliana]
  misc_feature (5)..(350): Homolog of NCBI NO: 40782191 NR Description: Fe(II) transport protein IRT1 [Arabidopsis
  misc_feature (5)..(350): Homolog of NCBI NO: 16304676 NR Description: putative Fe(II) transporter [Thlaspi caerulescens]
  misc_feature (1)..(350): Homolog of NCBI NO: 4836771 NR Description: iron-regulated transporter 1 [Lycopersicon
  misc_feature (5)..(350): Homolog of NCBI NO: 4836773 NR Description: iron-regulated transporter 2 [Lycopersicon
  misc_feature (5)..(350): Homolog of NCBI NO: 7488829 NR Description: probable Fe(II) transport protein, root - garden >gi|3153889|gb|AAC17441.1| root iron transporter protein [Pisum
  misc_feature (6)..(350): Homolog of NCBI NO: 27549575 NR Description: root iron transporter protein IRT1 [Malus
  misc_feature (63)..(263): Homolog of NCBI NO: 28070972 NR Description: putative Fe (II) transporter [Thlaspi
  misc_feature (5)..(350): Homolog of NCBI NO: 40888850 NR Description: TPA: iron regulated transporter-like protein
MATTKLVYILLILFTFTVSPAISTAPEHCDSGFDNPCINKAKALPLKIVAIVAILTTSLIGVTSPLFSRYISFLRPDGNGFMIVKCFSSGIILGTGFMHVLPDSFEMLSSKCLSDNPWHKFPFAGFVAMMSGLVTLAIDSITTSLYTGKNSVGPVPDEEYGIDQEKAIHMVGHNHSHGHGVVLATKDDGQLLRYQVIAMVLEVGILFHSVVIGLSLGATNDSCTIKGLIIALCFHHLFEGIGLGGCILQADFTNVKKFLMAFFFTGTTPCGIFLGIALSSIYRDNSPTALITIGLLNACSAGMLIYMALVDLLATEFMGSMLQGSIKLQIKCFTAALLGCAVMSVVAVWA

SEQ ID NO: 83141 - protein, 269 aa, Arabidopsis thaliana
  peptide (1)..(269): Ceres Seq. ID no. 12668875
  misc_feature (1)..(266): Pfam Name: ZIP Zinc transporter Pfam Description: ZIP Zinc transporter
  misc_feature (1)..(269): Homolog of NCBI NO: 15235143 NR Description: putative Fe(II) transport protein; protein id: [Arabidopsis thaliana] >gi|7488125|pir||T04749 probable iron
  misc_feature (1)..(269): Homolog of NCBI NO: 22328811 NR Description: Fe(II) transport protein; protein id: supported by cDNA: gi_1353265 [Arabidopsis thaliana]
  misc_feature (1)..(269): Homolog of NCBI NO: 40782191 NR Description: Fe(II) transport protein IRT1 [Arabidopsis
  misc_feature (1)..(269): Homolog of NCBI NO: 16304676 NR Description: putative Fe(II) transporter [Thlaspi caerulescens]
  misc_feature (1)..(269): Homolog of NCBI NO: 4836771 NR Description: iron-regulated transporter 1 [Lycopersicon
  misc_feature (1)..(269): Homolog of NCBI NO: 4836773 NR Description: iron-regulated transporter 2 [Lycopersicon
  misc_feature (1)..(269): Homolog of NCBI NO: 7488829 NR Description: probable Fe(II) transport protein, root - garden >gi|3153889|gb|AAC17441.1| root iron transporter protein [Pisum
  misc_feature (1)..(269): Homolog of NCBI NO: 27549575 NR Description: root iron transporter protein IRT1 [Malus
  misc_feature (1)..(182): Homolog of NCBI NO: 28070972 NR Description: putative Fe (II) transporter [Thlaspi
  misc_feature (1)..(269): Homolog of NCBI NO: 40888850 NR Description: TPA: iron regulated transporter-like protein
MIVKCFSSGIILGTGFMHVLPDSFEMLSSKCLSDNPWHKFPFAGFVAMMSGLVTLAIDSITTSLYTGKNSVGPVPDEEYGIDQEKAIHMVGHNHSHGHGVVLATKDDGQLLRYQVIAMVLEVGILFHSVVIGLSLGATNDSCTIKGLIIALCFHHLFEGIGLGGCILQADFTNVKKFLMAFFFTGTTPCGIFLGIALSSIYRDNSPTALITIGLLNACSAGMLIYMALVDLLATEFMGSMLQGSIKLQIKCFTAALLGCAVMSVVAVWA

SEQ ID NO: 83142 - protein, 253 aa, Arabidopsis thaliana
  peptide (1)..(253): Ceres Seq. ID no. 12668876
  misc_feature (1)..(250): Pfam Name: ZIP Zinc transporter Pfam Description: ZIP Zinc transporter
  misc_feature (1)..(253): Homolog of NCBI NO: 15235143 NR Description: putative Fe(II) transport protein; protein id: [Arabidopsis thaliana] >gi|7488125|pir||T04749 probable iron
  misc_feature (1)..(253): Homolog of NCBI NO: 22328811 NR Description: Fe(II) transport protein; protein id: supported by cDNA: gi_1353265 [Arabidopsis thaliana]
  misc_feature (1)..(253): Homolog of NCBI NO: 40782191 NR Description: Fe(II) transport protein IRT1 [Arabidopsis
  misc_feature (1)..(253): Homolog of NCBI NO: 16304676 NR Description: putative Fe(II) transporter [Thlaspi caerulescens]
  misc_feature (1)..(253): Homolog of NCBI NO: 4836771 NR Description: iron-regulated transporter 1 [Lycopersicon
  misc_feature (1)..(253): Homolog of NCBI NO: 4836773 NR Description: iron-regulated transporter 2 [Lycopersicon
  misc_feature (1)..(253): Homolog of NCBI NO: 7488829 NR Description: probable Fe(II) transport protein, root - garden >gi|3153889|gb|AAC17441.1| root iron transporter protein [Pisum
  misc_feature (1)..(253): Homolog of NCBI NO: 27549575 NR Description: root iron transporter protein IRT1 [Malus
  misc_feature (1)..(166): Homolog of NCBI NO: 28070972 NR Description: putative Fe (II) transporter [Thlaspi
  misc_feature (1)..(253): Homolog of NCBI NO: 40888850 NR Description: TPA: iron regulated transporter-like protein
MHVLPDSFEMLSSKCLSDNPWHKFPFAGFVAMMSGLVTLAIDSITTSLYTGKNSVGPVPDEEYGIDQEKAIHMVGHNHSHGHGVVLATKDDGQLLRYQVIAMVLEVGILFHSVVIGLSLGATNDSCTIKGLIIALCFHHLFEGIGLGGCILQADFTNVKKFLMAFFFTGTTPCGIFLGIALSSIYRDNSPTALITIGLLNACSAGMLIYMALVDLLATEFMGSMLQGSIKLQIKCFTAALLGCAVMSVVAVWA

SEQ ID NO: 83143 - DNA, 1329 bp, Arabidopsis thaliana
  misc_feature (1)..(1329): Ceres Seq. ID no. 12668877
  misc_feature: MA Experiment ID: 20000227 Result: Down-regulated in Transcription
  misc_feature: MA Experiment 20000227 PARAMETER Experiment Name: At_Root-Tips-vs-Tops_P Parameter: Tissue Value: Root Tips vs. Root Tops
  misc_feature: MA Experiment ID: 20000437 Result: Down-regulated in Transcription
  misc_feature: MA Experiment 20000437 PARAMETER Experiment Name: At_Drought_P Parameter: Age (day) Value: 8
  misc_feature: MA Experiment 20000437 PARAMETER Experiment Name: At_Drought_P Parameter: Organism Value: A. thaliana
  misc_feature: MA Experiment 20000437 PARAMETER Experiment Name: At_Drought_P Parameter: Plant Line Value: WS
  misc_feature: MA Experiment 20000437 PARAMETER Experiment Name: At_Drought_P Parameter: Timepoint (hr) Value: 24
  misc_feature: MA Experiment 20000437 PARAMETER Experiment Name: At_Drought_P Parameter: Tissue Value: Whole Plant
  misc_feature: MA Experiment 20000437 PARAMETER Experiment Name: At_Drought_P Parameter: Treatment Value: Drought vs. No Drought
  misc_feature: MA Experiment ID: 20000439 Result: Up-regulated in Transcription
  misc_feature: MA Experiment 20000439 PARAMETER Experiment Name: At_Roots__P Parameter: Age (day) Value: 14 vs. 21
  misc_feature: MA Experiment 20000439 PARAMETER Experiment Name: At_Roots__P Parameter: Organism Value: A. thaliana
  misc_feature: MA Experiment 20000439 PARAMETER Experiment Name: At_Roots__P Parameter: Tissue Value: Roots vs. Whole Plant
caaattcagcacttctcatgaaaacaatcttcctcgtactcatttttgtctcttttgcaatctctccagcaacttcaactgcgccggaagaatgtggaagcgagtcagcgaacccgtgcgtcaacaaagctaaagctttgcctctcaaagtcatagcaatcttcgtaatcctcattgcaagcatgattggtgttggagctcctctctttagccgtaacgtttcgttcctccaaccagacggaaacatcttcactatcattaagtgtttcgcctccgggatcatccttggaaccggttttatgcacgttttacctgattctttcgaaatgttgtcatctatatgtcttgaagagaacccgtggcataaatttcctttctccggatttctcgctatgttatcgggtctaatcactctagccattgactccatggccacgagcctatacaccagcaagaacgcagttggtatcatgccccatggtcatggtcatggtcacggccccgcaaatgatgttaccttaccaataaaagaagatgattcgtcaaatgcacagctcttgcgataccgagtcattgccatggtcttggaacttgggatcatagttcactcggtggtcattggattatctctaggagcaactagtgacacttgcaccattaaaggacttatagcagctctttgcttccatcaaatgttcgaaggcatgggtcttggcggttgtatcctccaggctgagtatacaaatatgaagaaatttgttatggcgttctttttcgcggtaacaacaccattcggaatagcgttagggatcgctctatcaactgtttaccaagataatagcccaaaagctttgatcacggttggacttctaaatgcatgctccgctggattgctcatttacatggcactcgtggatcttctagctgcggagttcatgggacctaagcttcaaggtagcatcaaaatgcagttcaagtgtttaatcgcggctcttctcgggtgcggtggaatgtcgattatcgccaaatgggcttaactaatactccagatattgcggaattgaaatcatgtggatttcattatcgaactaaaaccgttttaggtttacgtctcgattctctatcggttttttatcttctcttacaaaagatttgcgtggatctatcacattttaaggaacatgtcttttggtagatatgtaaatgtgataggccccacgattcatagttttcttttgtatcttcctttattttgtcaaggcagtatagttcatatcgtgtaatgtttttgcatctcatataaataaataaaacttttgctgctttttc

SEQ ID NO: 83144 - protein, 344 aa, Arabidopsis thaliana
  peptide (1)..(344): Ceres Seq. ID no. 12668878
  misc_feature (46)..(341): Pfam Name: ZIP Zinc transporter Pfam Description: ZIP Zinc transporter
  misc_feature (6)..(344): Homolog of NCBI NO: 22328811 NR Description: Fe(II) transport protein; protein id: supported by cDNA: gi_1353265 [Arabidopsis thaliana]
  misc_feature (1)..(344): Homolog of NCBI NO: 40782191 NR Description: Fe(II) transport protein IRT1 [Arabidopsis
  misc_feature (2)..(344): Homolog of NCBI NO: 16304676 NR Description: putative Fe(II) transporter [Thlaspi caerulescens]
  misc_feature (7)..(344): Homolog of NCBI NO: 15235143 NR Description: putative Fe(II) transport protein; protein id: [Arabidopsis thaliana] >gi|7488125|pir||T04749 probable iron
  misc_feature (9)..(344): Homolog of NCBI NO: 4836771 NR Description: iron-regulated transporter 1 [Lycopersicon
  misc_feature (7)..(344): Homolog of NCBI NO: 4836773 NR Description: iron-regulated transporter 2 [Lycopersicon
  misc_feature (5)..(344): Homolog of NCBI NO: 27549575 NR Description: root iron transporter protein IRT1 [Malus
  misc_feature (1)..(344): Homolog of NCBI NO: 7488829 NR Description: probable Fe(II) transport protein, root - garden >gi|3153889|gb|AAC17441.1| root iron transporter protein [Pisum
  misc_feature (1)..(194): Homolog of NCBI NO: 30684857 NR Description: iron-regulated transporter (IRT1) [Arabidopsis >gi|21592706|gb|AAM64655.1| Fe(II) transport protein [Arabidopsis
  misc_feature (12)..(344): Homolog of NCBI NO: 15221659 NR Description: iron-regulated transporter protein, putative; id: At1g31260.1 [Arabidopsis thaliana]
NSALLMKTIFLVLIFVSFAISPATSTAPEECGSESANPCVNKAKALPLKVIAIFVILIASMIGVGAPLFSRNVSFLQPDGNIFTIIKCFASGIILGTGFMHVLPDSFEMLSSICLEENPWHKFPFSGFLAMLSGLITLAIDSMATSLYTSKNAVGIMPHGHGHGHGPANDVTLPIKEDDSSNAQLLRYRVIAMVLELGIIVHSVVIGLSLGATSDTCTIKGLIAALCFHQMFEGMGLGGCILQAEYTNMKKFVMAFFFAVTTPFGIALGIALSTVYQDNSPKALITVGLLNACSAGLLIYMALVDLLAAEFMGPKLQGSIKMQFKCLIAALLGCGGMSIIAKWA

SEQ ID NO: 83145 - protein, 339 aa, Arabidopsis thaliana
  peptide (1)..(339): Ceres Seq. ID no. 12668879
  misc_feature (41)..(336): Pfam Name: ZIP Zinc transporter Pfam Description: ZIP Zinc transporter
  misc_feature (1)..(339): Homolog of NCBI NO: 22328811 NR Description: Fe(II) transport protein; protein id: supported by cDNA: gi_1353265 [Arabidopsis thaliana]
  misc_feature (1)..(339): Homolog of NCBI NO: 40782191 NR Description: Fe(II) transport protein IRT1 [Arabidopsis
  misc_feature (1)..(339): Homolog of NCBI NO: 16304676 NR Description: putative Fe(II) transporter [Thlaspi caerulescens]
  misc_feature (2)..(339): Homolog of NCBI NO: 15235143 NR Description: putative Fe(II) transport protein; protein id: [Arabidopsis thaliana] >gi|7488125|pir||T04749 probable iron
  misc_feature (4)..(339): Homolog of NCBI NO: 4836771 NR Description: iron-regulated transporter 1 [Lycopersicon
  misc_feature (2)..(339): Homolog of NCBI NO: 4836773 NR Description: iron-regulated transporter 2 [Lycopersicon
  misc_feature (1)..(339): Homolog of NCBI NO: 27549575 NR Description: root iron transporter protein IRT1 [Malus
  misc_feature (1)..(339): Homolog of NCBI NO: 7488829 NR Description: probable Fe(II) transport protein, root - garden >gi|3153889|gb|AAC17441.1| root iron transporter protein [Pisum
  misc_feature (1)..(189): Homolog of NCBI NO: 30684857 NR Description: iron-regulated transporter (IRT1) [Arabidopsis >gi|21592706|gb|AAM64655.1| Fe(II) transport protein [Arabidopsis
  misc_feature (7)..(339): Homolog of NCBI NO: 15221659 NR Description: iron-regulated transporter protein, putative; id: At1g31260.1 [Arabidopsis thaliana]
MKTIFLVLIFVSFAISPATSTAPEECGSESANPCVNKAKALPLKVIAIFVILIASMIGVGAPLFSRNVSFLQPDGNIFTIIKCFASGIILGTGFMHVLPDSFEMLSSICLEENPWHKFPFSGFLAMLSGLITLAIDSMATSLYTSKNAVGIMPHGHGHGHGPANDVTLPIKEDDSSNAQLLRYRVIAMVLELGIIVHSVVIGLSLGATSDTCTIKGLIAALCFHQMFEGMGLGGCILQAEYTNMKKFVMAFFFAVTTPFGIALGIALSTVYQDNSPKALITVGLLNACSAGLLIYMALVDLLAAEFMGPKLQGSIKMQFKCLIAALLGCGGMSIIAKWA

SEQ ID NO: 83146 - protein, 284 aa, Arabidopsis thaliana
  peptide (1)..(284): Ceres Seq. ID no. 12668880
  misc_feature (1)..(281): Pfam Name: ZIP Zinc transporter Pfam Description: ZIP Zinc transporter
  misc_feature (1)..(284): Homolog of NCBI NO: 22328811 NR Description: Fe(II) transport protein; protein id: supported by cDNA: gi_1353265 [Arabidopsis thaliana]
  misc_feature (1)..(284): Homolog of NCBI NO: 40782191 NR Description: Fe(II) transport protein IRT1 [Arabidopsis
  misc_feature (1)..(284): Homolog of NCBI NO: 16304676 NR Description: putative Fe(II) transporter [Thlaspi caerulescens]
  misc_feature (1)..(284): Homolog of NCBI NO: 15235143 NR Description: putative Fe(II) transport protein; protein id: [Arabidopsis thaliana] >gi|7488125|pir||T04749 probable iron
  misc_feature (1)..(284): Homolog of NCBI NO: 4836771 NR Description: iron-regulated transporter 1 [Lycopersicon
  misc_feature (1)..(284): Homolog of NCBI NO: 4836773 NR Description: iron-regulated transporter 2 [Lycopersicon
  misc_feature (1)..(284): Homolog of NCBI NO: 27549575 NR Description: root iron transporter protein IRT1 [Malus
  misc_feature (1)..(284): Homolog of NCBI NO: 7488829 NR Description: probable Fe(II) transport protein, root - garden >gi|3153889|gb|AAC17441.1| root iron transporter protein [Pisum
  misc_feature (1)..(134): Homolog of NCBI NO: 30684857 NR Description: iron-regulated transporter (IRT1) [Arabidopsis >gi|21592706|gb|AAM64655.1| Fe(II) transport protein [Arabidopsis
  misc_feature (1)..(284): Homolog of NCBI NO: 15221659 NR Description: iron-regulated transporter protein, putative; id: At1g31260.1 [Arabidopsis thaliana]
MIGVGAPLFSRNVSFLQPDGNIFTIIKCFASGIILGTGFMHVLPDSFEMLSSICLEENPWHKFPFSGFLAMLSGLITLAIDSMATSLYTSKNAVGIMPHGHGHGHGPANDVTLPIKEDDSSNAQLLRYRVIAMVLELGIIVHSVVIGLSLGATSDTCTIKGLIAALCFHQMFEGMGLGGCILQAEYTNMKKFVMAFFFAVTTPFGIALGIALSTVYQDNSPKALITVGLLNACSAGLLIYMALVDLLAAEFMGPKLQGSIKMQFKCLIAALLGCGGMSIIAKWA

SEQ ID NO: 83147 - DNA, 2751 bp, Arabidopsis thaliana
  misc_feature (1)..(2751): Ceres Seq. ID no. 12668881
  misc_feature: MA Experiment ID: 20000437 Result: Down-regulated in Transcription
  misc_feature: MA Experiment 20000437 PARAMETER Experiment Name: At_Drought_P Parameter: Age (day) Value: 8
  misc_feature: MA Experiment 20000437 PARAMETER Experiment Name: At_Drought_P Parameter: Organism Value: A. thaliana
  misc_feature: MA Experiment 20000437 PARAMETER Experiment Name: At_Drought_P Parameter: Plant Line Value: WS
  misc_feature: MA Experiment 20000437 PARAMETER Experiment Name: At_Drought_P Parameter: Timepoint (hr) Value: 24
  misc_feature: MA Experiment 20000437 PARAMETER Experiment Name: At_Drought_P Parameter: Tissue Value: Whole Plant
  misc_feature: MA Experiment 20000437 PARAMETER Experiment Name: At_Drought_P Parameter: Treatment Value: Drought vs. No Drought
  misc_feature: MA Experiment ID: 20000438 Result: Up-regulated in Transcription
  misc_feature: MA Experiment 20000438 PARAMETER Experiment Name: At_Shoots__P Parameter: Age (day) Value: 14
  misc_feature: MA Experiment 20000438 PARAMETER Experiment Name: At_Shoots__P Parameter: Tissue Value: Shoots vs. Whole Plant
  misc_feature: MA Experiment ID: 20000495 Result: Down-regulated in Transcription
  misc_feature: MA Experiment 20000495 PARAMETER Experiment Name: At_Guard_Cells_P Parameter: Harvest Date Value: 8/2/2002
  misc_feature: MA Experiment 20000495 PARAMETER Experiment Name: At_Guard_Cells_P Parameter: Organism Value: A. thaliana
  misc_feature: MA Experiment 20000495 PARAMETER Experiment Name: At_Guard_Cells_P Parameter: Tissue Value: Guard Cells vs. Leaves
  misc_feature: MA Experiment ID: 20000496 Result: Down-regulated in Transcription
  misc_feature: MA Experiment 20000496 PARAMETER Experiment Name: At_Guard_Cells_P Parameter: Harvest Date Value: 7/19/2002
  misc_feature: MA Experiment 20000496 PARAMETER Experiment Name: At_Guard_Cells_P Parameter: Organism Value: Canola
  misc_feature: MA Experiment 20000496 PARAMETER Experiment Name: At_Guard_Cells_P Parameter: Tissue Value: Guard Cells vs. Leaves
  misc_feature: MA Experiment ID: 20001450 Result: Down-regulated in Transcription
  misc_feature: MA Experiment 20001450 PARAMETER Experiment Name: At_Far-red-induction_P Parameter: Age (day) Value: 7
  misc_feature: MA Experiment 20001450 PARAMETER Experiment Name: At_Far-red-induction_P Parameter: Light Value: Far-red vs. White
  misc_feature: MA Experiment 20001450 PARAMETER Experiment Name: At_Far-red-induction_P Parameter: Organism Value: A. thaliana
  misc_feature: MA Experiment 20001450 PARAMETER Experiment Name: At_Far-red-induction_P Parameter: Plant Line Value: Columbia
  misc_feature: MA Experiment 20001450 PARAMETER Experiment Name: At_Far-red-induction_P Parameter: Timepoint (hr) Value: 8
  misc_feature: MA Experiment 20001450 PARAMETER Experiment Name: At_Far-red-induction_P Parameter: Tissue Value: Whole Plant
  misc_feature: MA Experiment ID: 20001451 Result: Down-regulated in Transcription
  misc_feature: MA Experiment 20001451 PARAMETER Experiment Name: At_Far-red-induction_P Parameter: Age (day) Value: 7
  misc_feature: MA Experiment 20001451 PARAMETER Experiment Name: At_Far-red-induction_P Parameter: Light Value: Far-red vs. White
  misc_feature: MA Experiment 20001451 PARAMETER Experiment Name: At_Far-red-induction_P Parameter: Organism Value: A. thaliana
  misc_feature: MA Experiment 20001451 PARAMETER Experiment Name: At_Far-red-induction_P Parameter: Plant Line Value: Columbia
  misc_feature: MA Experiment 20001451 PARAMETER Experiment Name: At_Far-red-induction_P Parameter: Timepoint (hr) Value: 24
  misc_feature: MA Experiment 20001451 PARAMETER Experiment Name: At_Far-red-induction_P Parameter: Tissue Value: Whole Plant
atggcgactctgaagccgtcatttactgtttctccgccgaatagtaatccgattagatttggaagttttccgccgcaatgctttctccgtgttccgaaaccgcggcgacttatattgcctaggtttcggaagacgactggtggtggcggcggcttgattcgatgtgagcttccagattttcatctatcagcaacagcaactactgtatcaggtgtatcgacggtgaatttagtggatcaagttcagattcctaaaggtgaaatgtggagtgttcacaagtttggtgggacttgtgtgggaaactctcagaggatcagaaatgtagcagaggttataatcaatgataattccgaaagaaaacttgtggttgtctcggcgatgtcgaaggttacggacatgatgtatgacttaatccgcaaggcacaatcacgagatgattcttatttatccgcgttggaagctgtcttggaaaagcatcgtttaacagctcgtgaccttctcgatggagatgatctcgctagtttcttgtcacatttgcataatgatattagtaatcttaaagcaatgcttcgtgctatatacatagctggccatgcatcagagtcgttttcagattttgttgcaggacatggggagctttggtctgctcagatgctatcatatgttgtcagaaagactgggcttgagtgcaagtggatggatactagagacgtgctcattgttaatcccaccagctctaatcaggttgatcctgattttggtgaatctgagaagagactcgataaatggttctccttaaatccgtcgaaaattattattgcgactgggtttattgctagcactccgcaaaatattccaacaactttgaaaagagatgggagtgatttctcagcagctattatgggtgctttattgagagctcgtcaagtaaccatttggacagatgttgatggtgtatacagtgcggatcctcgtaaagttaatgaggcagtgatactccagacactttcttatcaagaggcctgggaaatgtcttattttggagcaaatgtgttacatcctcgcaccatcattcctgtgatgcgatataatattccgattgtgattagaaatattttcaatctctctgcaccgggaacaataatctgtcaacctcctgaagatgattatgaccttaaactgacaactcctgtcaaagggtttgcaactattgacaatttggccctcataaatgttgaaggtactggaatggctggtgtacccggtactgcaagtgacatttttggctgtgtaaaagatgttggagctaatgtgattatgatatcacaggctagcagtgagcattctgtgtgctttgctgtgcctgagaaggaagtaaacgcagtctctgaggcattgcggtcgagatttagtgaagctttacaagcgggacgtctttctcagattgaggtgataccaaactgtagcatcttagctgcagtcggccagaaaatggctagtacacctggagttagttgtacacttttcagtgctttggcgaaggctaatattaatgtccgagctatatctcaaggttgttctgagtacaatgttactgtcgttattaaacgtgaagatagcgttaaggcgttaagagctgtacactcgaggtttttcttgtcaagaacaacattagcaatgggaatcgtaggaccgggcttgattggtgcaacattacttgaccagctgcgggatcaggctgctgttctcaaacaagaatttaacattgatctgcgtgttttgggaatcactggttcaaagaagatgttattgagtgacattggtattgatttgtcgagatggagagaacttctaaacgagaagggaacagaggcggatttggataaattcactcaacaagtgcatggaaatcattttatccccaactctgtagtggttgattgtacagcagactctgctattgcaagccgttactatgattggttacgaaagggaattcatgtcattaccccaaataaaaaggctaactcaggtcccctcgatcagtacttgaaactgagagatcttcaaaggaaatcctacactcattacttctacgaagccactgttggagctggtcttccaattatcagcactttacgtggtctccttgagacaggagataagatactacgcatagagggcatttgcagtggaactttgagttatctattcaacaattttgttggagatcgaagtttcagcgaggttgtcactgaagcaaagaacgcaggtttcactgagcctgatccaagagatgatttatctggaactgatgttgcaaggaaggtgattatcctcgctcgagaatctggactgaaattggacctcgctgatctccccattagaagtctcgtaccagaacctctaaaaggatgcacttctgttgaagaattcatggagaaactcccacagtacgatggagacctagcaaaagaaaggctagatgctgaaaactctggggaagttctgagatatgttggagtggtggacgctgttaaccaaaagggaacagttgaacttcgaagatacaagaaagaacatccatttgcgcagctcgcaggttcagacaacataatagccttcacaacgacaaggtacaaggatcatccacttatagtccgaggacctggagctggtgctcaagtcacggccggtggtatattcagcgacatactaaggcttgcatcttatctcggtgcaccgtcttaa

SEQ ID NO: 83148 - protein, 916 aa, Arabidopsis thaliana
  peptide (1)..(916): Ceres Seq. ID no. 12668882
  misc_feature (88)..(371): Pfam Name: Amino acid kinase family Pfam Description: Amino acid kinase family
  misc_feature (68)..(729): Homolog of NCBI NO: 6692137 NR Description: T19E23.1 [Arabidopsis thaliana]
  misc_feature (68)..(326): Homolog of NCBI NO: 5701782 NR Description: beta-aspartyl phosphate homoserine [Arabidopsis
  misc_feature (345)..(578): Homolog of NCBI NO: 5701782 NR Description: beta-aspartyl phosphate homoserine [Arabidopsis
  misc_feature (91)..(913): Homolog of NCBI NO: 30061573 NR Description: aspartokinase I, homoserine dehydrogenase I flexneri 2a str. 2457T] >gi|30039815|gb|AAP15549.1| aspartokinase
  misc_feature (644)..(910): Homolog of NCBI NO: 21243765 NR Description: homoserine dehydrogenase [Xanthomonas axonopodis citri str. 306] >gi|21109354|gb|AAM37883.1| homoserine
  misc_feature (644)..(910): Homolog of NCBI NO: 21232286 NR Description: homoserine dehydrogenase [Xanthomonas campestris campestris str. ATCC 33913] >gi|21114051|gb|AAM42127.1| dehydrogenase [Xanthomonas campestris pv. campestris str. ATCC
  misc_feature (93)..(552): Homolog of NCBI NO: 27573345 NR Description: putative aspartate kinase [Oryza sativa (japonica
  misc_feature (85)..(554): Homolog of NCBI NO: 34394347 NR Description: putative precursor monofunctional aspartokinase
  misc_feature (85)..(554): Homolog of NCBI NO: 34394346 NR Description: putative precursor monofunctional aspartokinase
  misc_feature (91)..(571): Homolog of NCBI NO: 15232838 NR Description: putative aspartate kinase; protein id: supported by cDNA: 6203. [Arabidopsis thaliana] putative aspartate kinase [Arabidopsis thaliana]
MATLKPSFTVSPPNSNPIRFGSFPPQCFLRVPKPRRLILPRFRKTTGGGGGLIRCELPDFHLSATATTVSGVSTVNLVDQVQIPKGEMWSVHKFGGTCVGNSQRIRNVAEVIINDNSERKLVVVSAMSKVTDMMYDLIRKAQSRDDSYLSALEAVLEKHRLTARDLLDGDDLASFLSHLHNDISNLKAMLRAIYIAGHASESFSDFVAGHGELWSAQMLSYVVRKTGLECKWMDTRDVLIVNPTSSNQVDPDFGESEKRLDKWFSLNPSKIIIATGFIASTPQNIPTTLKRDGSDFSAAIMGALLRARQVTIWTDVDGVYSADPRKVNEAVILQTLSYQEAWEMSYFGANVLHPRTIIPVMRYNIPIVIRNIFNLSAPGTIICQPPEDDYDLKLTTPVKGFATIDNLALINVEGTGMAGVPGTASDIFGCVKDVGANVIMISQASSEHSVCFAVPEKEVNAVSEALRSRFSEALQAGRLSQIEVIPNCSILAAVGQKMASTPGVSCTLFSALAKANINVRAISQGCSEYNVTVVIKREDSVKALRAVHSRFFLSRTTLAMGIVGPGLIGATLLDQLRDQAAVLKQEFNIDLRVLGITGSKKMLLSDIGIDLSRWRELLNEKGTEADLDKFTQQVHGNHFIPNSVVVDCTADSAIASRYYDWLRKGIHVITPNKKANSGPLDQYLKLRDLQRKSYTHYFYEATVGAGLPIISTLRGLLETGDKILRIEGICSGTLSYLFNNFVGDRSFSEVVTEAKNAGFTEPDPRDDLSGTDVARKVIILARESGLKLDLADLPIRSLVPEPLKGCTSVEEFMEKLPQYDGDLAKERLDAENSGEVLRYVGVVDAVNQKGTVELRRYKKEHPFAQLAGSDNIIAFTTTRYKDHPLIVRGPGAGAQVTAGGIFSDILRLASYLGAPS

SEQ ID NO: 83149 - protein, 829 aa, Arabidopsis thaliana
  peptide (1)..(829): Ceres Seq. ID no. 12668883
  misc_feature (1)..(284): Pfam Name: Amino acid kinase family Pfam Description: Amino acid kinase family
  misc_feature (1)..(642): Homolog of NCBI NO: 6692137 NR Description: T19E23.1 [Arabidopsis thaliana]
  misc_feature (1)..(239): Homolog of NCBI NO: 5701782 NR Description: beta-aspartyl phosphate homoserine [Arabidopsis
  misc_feature (258)..(491): Homolog of NCBI NO: 5701782 NR Description: beta-aspartyl phosphate homoserine [Arabidopsis
  misc_feature (4)..(826): Homolog of NCBI NO: 30061573 NR Description: aspartokinase I, homoserine dehydrogenase I flexneri 2a str. 2457T] >gi|30039815|gb|AAP15549.1| aspartokinase
  misc_feature (557)..(823): Homolog of NCBI NO: 21243765 NR Description: homoserine dehydrogenase [Xanthomonas axonopodis citri str. 306] >gi|21109354|gb|AAM37883.1| homoserine
  misc_feature (557)..(823): Homolog of NCBI NO: 21232286 NR Description: homoserine dehydrogenase [Xanthomonas campestris campestris str. ATCC 33913] >gi|21114051|gb|AAM42127.1| dehydrogenase [Xanthomonas campestris pv. campestris str. ATCC
  misc_feature (6)..(465): Homolog of NCBI NO: 27573345 NR Description: putative aspartate kinase [Oryza sativa (japonica
  misc_feature (1)..(467): Homolog of NCBI NO: 34394347 NR Description: putative precursor monofunctional aspartokinase
  misc_feature (1)..(467): Homolog of NCBI NO: 34394346 NR Description: putative precursor monofunctional aspartokinase
  misc_feature (4)..(484): Homolog of NCBI NO: 15232838 NR Description: putative aspartate kinase; protein id: supported by cDNA: 6203. [Arabidopsis thaliana] putative aspartate kinase [Arabidopsis thaliana]
MWSVHKFGGTCVGNSQRIRNVAEVIINDNSERKLVVVSAMSKVTDMMYDLIRKAQSRDDSYLSALEAVLEKHRLTARDLLDGDDLASFLSHLHNDISNLKAMLRAIYIAGHASESFSDFVAGHGELWSAQMLSYVVRKTGLECKWMDTRDVLIVNPTSSNQVDPDFGESEKRLDKWFSLNPSKIIIATGFIASTPQNIPTTLKRDGSDFSAAIMGALLRARQVTIWTDVDGVYSADPRKVNEAVILQTLSYQEAWEMSYFGANVLHPRTIIPVMRYNIPIVIRNIFNLSAPGTIICQPPEDDYDLKLTTPVKGFATIDNLALINVEGTGMAGVPGTASDIFGCVKDVGANVIMISQASSEHSVCFAVPEKEVNAVSEALRSRFSEALQAGRLSQIEVIPNCSILAAVGQKMASTPGVSCTLFSALAKANINVRAISQGCSEYNVTVVIKREDSVKALRAVHSRFFLSRTTLAMGIVGPGLIGATLLDQLRDQAAVLKQEFNIDLRVLGITGSKKMLLSDIGIDLSRWRELLNEKGTEADLDKFTQQVHGNHFIPNSVVVDCTADSAIASRYYDWLRKGIHVITPNKKANSGPLDQYLKLRDLQRKSYTHYFYEATVGAGLPIISTLRGLLETGDKILRIEGICSGTLSYLFNNFVGDRSFSEVVTEAKNAGFTEPDPRDDLSGTDVARKVIILARESGLKLDLADLPIRSLVPEPLKGCTSVEEFMEKLPQYDGDLAKERLDAENSGEVLRYVGVVDAVNQKGTVELRRYKKEHPFAQLAGSDNIIAFTTTRYKDHPLIVRGPGAGAQVTAGGIFSDILRLASYLGAPS

SEQ ID NO: 83150 - protein, 790 aa, Arabidopsis thaliana
  peptide (1)..(790): Ceres Seq. ID no. 12668884
  misc_feature (1)..(245): Pfam Name: Amino acid kinase family Pfam Description: Amino acid kinase family
  misc_feature (1)..(603): Homolog of NCBI NO: 6692137 NR Description: T19E23.1 [Arabidopsis thaliana]
  misc_feature (1)..(200): Homolog of NCBI NO: 5701782 NR Description: beta-aspartyl phosphate homoserine [Arabidopsis
  misc_feature (219)..(452): Homolog of NCBI NO: 5701782 NR Description: beta-aspartyl phosphate homoserine [Arabidopsis
  misc_feature (1)..(787): Homolog of NCBI NO: 30061573 NR Description: aspartokinase I, homoserine dehydrogenase I flexneri 2a str. 2457T] >gi|30039815|gb|AAP15549.1| aspartokinase
  misc_feature (518)..(784): Homolog of NCBI NO: 21243765 NR Description: homoserine dehydrogenase [Xanthomonas axonopodis citri str. 306] >gi|21109354|gb|AAM37883.1| homoserine
  misc_feature (518)..(784): Homolog of NCBI NO: 21232286 NR Description: homoserine dehydrogenase [Xanthomonas campestris campestris str. ATCC 33913] >gi|21114051|gb|AAM42127.1| dehydrogenase [Xanthomonas campestris pv. campestris str. ATCC
  misc_feature (1)..(426): Homolog of NCBI NO: 27573345 NR Description: putative aspartate kinase [Oryza sativa (japonica
  misc_feature (1)..(428): Homolog of NCBI NO: 34394347 NR Description: putative precursor monofunctional aspartokinase
  misc_feature (1)..(428): Homolog of NCBI NO: 34394346 NR Description: putative precursor monofunctional aspartokinase
  misc_feature (1)..(445): Homolog of NCBI NO: 15232838 NR Description: putative aspartate kinase; protein id: supported by cDNA: 6203. [Arabidopsis thaliana] putative aspartate kinase [Arabidopsis thaliana]
MSKVTDMMYDLIRKAQSRDDSYLSALEAVLEKHRLTARDLLDGDDLASFLSHLHNDISNLKAMLRAIYIAGHASESFSDFVAGHGELWSAQMLSYVVRKTGLECKWMDTRDVLIVNPTSSNQVDPDFGESEKRLDKWFSLNPSKIIIATGFIASTPQNIPTTLKRDGSDFSAAIMGALLRARQVTIWTDVDGVYSADPRKVNEAVILQTLSYQEAWEMSYFGANVLHPRTIIPVMRYNIPIVIRNIFNLSAPGTIICQPPEDDYDLKLTTPVKGFATIDNLALINVEGTGMAGVPGTASDIFGCVKDVGANVIMISQASSEHSVCFAVPEKEVNAVSEALRSRFSEALQAGRLSQIEVIPNCSILAAVGQKMASTPGVSCTLFSALAKANINVRAISQGCSEYNVTVVIKREDSVKALRAVHSRFFLSRTTLAMGIVGPGLIGATLLDQLRDQAAVLKQEFNIDLRVLGITGSKKMLLSDIGIDLSRWRELLNEKGTEADLDKFTQQVHGNHFIPNSVVVDCTADSAIASRYYDWLRKGIHVITPNKKANSGPLDQYLKLRDLQRKSYTHYFYEATVGAGLPIISTLRGLLETGDKILRIEGICSGTLSYLFNNFVGDRSFSEVVTEAKNAGFTEPDPRDDLSGTDVARKVIILARESGLKLDLADLPIRSLVPEPLKGCTSVEEFMEKLPQYDGDLAKERLDAENSGEVLRYVGVVDAVNQKGTVELRRYKKEHPFAQLAGSDNIIAFTTTRYKDHPLIVRGPGAGAQVTAGGIFSDILRLASYLGAPS

SEQ ID NO: 83151 - DNA, 1272 bp, Arabidopsis thaliana
  misc_feature (1)..(1272): Ceres Seq. ID no. 12668910
  misc_feature: MA Experiment ID: 20000169 Result: Up-regulated in Transcription
  misc_feature: MA Experiment 20000169 PARAMETER Experiment Name: At_100uM_ABA_P Parameter: Age (day) Value: 14
  misc_feature: MA Experiment 20000169 PARAMETER Experiment Name: At_100uM_ABA_P Parameter: Organism Value: A. thaliana
  misc_feature: MA Experiment 20000169 PARAMETER Experiment Name: At_100uM_ABA_P Parameter: Plant Line Value: WS
  misc_feature: MA Experiment 20000169 PARAMETER Experiment Name: At_100uM_ABA_P Parameter: Timepoint (hr) Value: 6
  misc_feature: MA Experiment 20000169 PARAMETER Experiment Name: At_100uM_ABA_P Parameter: Tissue Value: Aerial
  misc_feature: MA Experiment 20000169 PARAMETER Experiment Name: At_100uM_ABA_P Parameter: Treatment Value: 100uM ABA vs. No Treatment
  misc_feature: MA Experiment ID: 20000184 Result: Up-regulated in Transcription
  misc_feature: MA Experiment 20000184 PARAMETER Experiment Name: At_Shoots__P Parameter: Age (day) Value: 7
  misc_feature: MA Experiment 20000184 PARAMETER Experiment Name: At_Shoots__P Parameter: Tissue Value: Shoots vs. Whole Plant
  misc_feature: MA Experiment ID: 20000211 Result: Up-regulated in Transcription
  misc_feature: MA Experiment 20000211 PARAMETER Experiment Name: At_0.001percent_MeJA__P Parameter: Age (day) Value: 14
  misc_feature: MA Experiment 20000211 PARAMETER Experiment Name: At_0.001percent_MeJA__P Parameter: Organism Value: A. thaliana
  misc_feature: MA Experiment 20000211 PARAMETER Experiment Name: At_0.001percent_MeJA__P Parameter: Plant Line Value: WS
  misc_feature: MA Experiment 20000211 PARAMETER Experiment Name: At_0.001percent_MeJA__P Parameter: Timepoint (hr) Value: 1
  misc_feature: MA Experiment 20000211 PARAMETER Experiment Name: At_0.001percent_MeJA__P Parameter: Tissue Value: Aerial
  misc_feature: MA Experiment 20000211 PARAMETER Experiment Name: At_0.001percent_MeJA__P Parameter: Treatment Value: 0.001percent MeJA vs. No Treatment
  misc_feature: MA Experiment ID: 20000267 Result: Up-regulated in Transcription
  misc_feature: MA Experiment 20000267 PARAMETER Experiment Name: At_Drought_P Parameter: Age (day) Value: 7
  misc_feature: MA Experiment 20000267 PARAMETER Experiment Name: At_Drought_P Parameter: Organism Value: A. thaliana
  misc_feature: MA Experiment 20000267 PARAMETER Experiment Name: At_Drought_P Parameter: Plant Line Value: WS
  misc_feature: MA Experiment 20000267 PARAMETER Experiment Name: At_Drought_P Parameter: Timepoint (hr) Value: 6
  misc_feature: MA Experiment 20000267 PARAMETER Experiment Name: At_Drought_P Parameter: Tissue Value: Whole Plant
  misc_feature: MA Experiment 20000267 PARAMETER Experiment Name: At_Drought_P Parameter: Treatment Value: Drought vs. No Drought
  misc_feature: MA Experiment ID: 20000286 Result: Up-regulated in Transcription
  misc_feature: MA Experiment 20000286 PARAMETER Experiment Name: At_Open_Flower_P Parameter: Age (day) Value: 21
  misc_feature: MA Experiment 20000286 PARAMETER Experiment Name: At_Open_Flower_P Parameter: Plant Line Value: WS
  misc_feature: MA Experiment 20000286 PARAMETER Experiment Name: At_Open_Flower_P Parameter: Tissue Value: Half Open vs. Whole Plant
  misc_feature: MA Experiment ID: 20000436 Result: Up-regulated in Transcription
  misc_feature: MA Experiment 20000436 PARAMETER Experiment Name: At_Drought_P Parameter: Age (day) Value: 7
  misc_feature: MA Experiment 20000436 PARAMETER Experiment Name: At_Drought_P Parameter: Organism Value: A. thaliana
  misc_feature: MA Experiment 20000436 PARAMETER Experiment Name: At_Drought_P Parameter: Plant Line Value: WS
  misc_feature: MA Experiment 20000436 PARAMETER Experiment Name: At_Drought_P Parameter: Timepoint (hr) Value: 12
  misc_feature: MA Experiment 20000436 PARAMETER Experiment Name: At_Drought_P Parameter: Tissue Value: Whole Plant
  misc_feature: MA Experiment 20000436 PARAMETER Experiment Name: At_Drought_P Parameter: Treatment Value: Drought vs. No Drought
  misc_feature: MA Experiment ID: 20000437 Result: Up-regulated in Transcription
  misc_feature: MA Experiment 20000437 PARAMETER Experiment Name: At_Drought_P Parameter: Age (day) Value: 8
  misc_feature: MA Experiment 20000437 PARAMETER Experiment Name: At_Drought_P Parameter: Organism Value: A. thaliana
  misc_feature: MA Experiment 20000437 PARAMETER Experiment Name: At_Drought_P Parameter: Plant Line Value: WS
  misc_feature: MA Experiment 20000437 PARAMETER Experiment Name: At_Drought_P Parameter: Timepoint (hr) Value: 24
  misc_feature: MA Experiment 20000437 PARAMETER Experiment Name: At_Drought_P Parameter: Tissue Value: Whole Plant
  misc_feature: MA Experiment 20000437 PARAMETER Experiment Name: At_Drought_P Parameter: Treatment Value: Drought vs. No Drought
  misc_feature: MA Experiment ID: 20000438 Result: Up-regulated in Transcription
  misc_feature: MA Experiment 20000438 PARAMETER Experiment Name: At_Shoots__P Parameter: Age (day) Value: 14
  misc_feature: MA Experiment 20000438 PARAMETER Experiment Name: At_Shoots__P Parameter: Tissue Value: Shoots vs. Whole Plant
  misc_feature: MA Experiment ID: 20000495 Result: Down-regulated in Transcription
  misc_feature: MA Experiment 20000495 PARAMETER Experiment Name: At_Guard_Cells_P Parameter: Harvest Date Value: 8/2/2002
  misc_feature: MA Experiment 20000495 PARAMETER Experiment Name: At_Guard_Cells_P Parameter: Organism Value: A. thaliana
  misc_feature: MA Experiment 20000495 PARAMETER Experiment Name: At_Guard_Cells_P Parameter: Tissue Value: Guard Cells vs. Leaves
  misc_feature: MA Experiment ID: 20000527 Result: Up-regulated in Transcription
  misc_feature: MA Experiment 20000527 PARAMETER Experiment Name: At_10percent_PEG_P Parameter: Age (day) Value: 20
  misc_feature: MA Experiment 20000527 PARAMETER Experiment Name: At_10percent_PEG_P Parameter: Organism Value: A. thaliana
  misc_feature: MA Experiment 20000527 PARAMETER Experiment Name: At_10percent_PEG_P Parameter: Plant Line Value: WS
  misc_feature: MA Experiment 20000527 PARAMETER Experiment Name: At_10percent_PEG_P Parameter: Timepoint (day) Value: 20
  misc_feature: MA Experiment 20000527 PARAMETER Experiment Name: At_10percent_PEG_P Parameter: Tissue Value: Whole Plant
  misc_feature: MA Experiment 20000527 PARAMETER Experiment Name: At_10percent_PEG_P Parameter: Treatment Value: 10percent PEG vs. No Treatment
  misc_feature: MA Experiment ID: 20001555 Result: Up-regulated in Transcription
  misc_feature: MA Experiment 20001555 PARAMETER Experiment Name: At_Drought_Soil_Dry_P Parameter: Age (day) Value: 24
  misc_feature: MA Experiment 20001555 PARAMETER Experiment Name: At_Drought_Soil_Dry_P Parameter: Organism Value: A. thaliana
  misc_feature: MA Experiment 20001555 PARAMETER Experiment Name: At_Drought_Soil_Dry_P Parameter: Plant Line Value: WS
  misc_feature: MA Experiment 20001555 PARAMETER Experiment Name: At_Drought_Soil_Dry_P Parameter: Post Timepoint (hr) Value: None
  misc_feature: MA Experiment 20001555 PARAMETER Experiment Name: At_Drought_Soil_Dry_P Parameter: Post-Treatment Value: None
  misc_feature: MA Experiment 20001555 PARAMETER Experiment Name: At_Drought_Soil_Dry_P Parameter: Timepoint (day) Value: 10
  misc_feature: MA Experiment 20001555 PARAMETER Experiment Name: At_Drought_Soil_Dry_P Parameter: Treatment Value: Drought vs. No Drought
  misc_feature: MA Experiment ID: 20001556 Result: Up-regulated in Transcription
  misc_feature: MA Experiment 20001556 PARAMETER Experiment Name: At_Drought_Soil_Dry_P Parameter: Age (day) Value: 26
  misc_feature: MA Experiment 20001556 PARAMETER Experiment Name: At_Drought_Soil_Dry_P Parameter: Organism Value: A. thaliana
  misc_feature: MA Experiment 20001556 PARAMETER Experiment Name: At_Drought_Soil_Dry_P Parameter: Plant Line Value: WS
  misc_feature: MA Experiment 20001556 PARAMETER Experiment Name: At_Drought_Soil_Dry_P Parameter: Post Timepoint (hr) Value: None
  misc_feature: MA Experiment 20001556 PARAMETER Experiment Name: At_Drought_Soil_Dry_P Parameter: Post-Treatment Value: None
  misc_feature: MA Experiment 20001556 PARAMETER Experiment Name: At_Drought_Soil_Dry_P Parameter: Timepoint (day) Value: 12
  misc_feature: MA Experiment 20001556 PARAMETER Experiment Name: At_Drought_Soil_Dry_P Parameter: Treatment Value: Drought vs. No Drought
  misc_feature: MA Experiment ID: 20001557 Result: Up-regulated in Transcription
  misc_feature: MA Experiment 20001557 PARAMETER Experiment Name: At_Drought_Soil_Dry_P Parameter: Age (day) Value: 27
  misc_feature: MA Experiment 20001557 PARAMETER Experiment Name: At_Drought_Soil_Dry_P Parameter: Organism Value: A. thaliana
  misc_feature: MA Experiment 20001557 PARAMETER Experiment Name: At_Drought_Soil_Dry_P Parameter: Plant Line Value: WS
  misc_feature: MA Experiment 20001557 PARAMETER Experiment Name: At_Drought_Soil_Dry_P Parameter: Post Timepoint (hr) Value: 3
  misc_feature: MA Experiment 20001557 PARAMETER Experiment Name: At_Drought_Soil_Dry_P Parameter: Post-Treatment Value: Re-Water vs. No Drought
  misc_feature: MA Experiment 20001557 PARAMETER Experiment Name: At_Drought_Soil_Dry_P Parameter: Timepoint (day) Value: 13
  misc_feature: MA Experiment 20001557 PARAMETER Experiment Name: At_Drought_Soil_Dry_P Parameter: Treatment Value: Drought vs. No Drought
  misc_feature: MA Experiment ID: 20001558 Result: Up-regulated in Transcription
  misc_feature: MA Experiment 20001558 PARAMETER Experiment Name: At_Drought_Soil_Dry_P Parameter: Age (day) Value: 27
  misc_feature: MA Experiment 20001558 PARAMETER Experiment Name: At_Drought_Soil_Dry_P Parameter: Organism Value: A. thaliana
  misc_feature: MA Experiment 20001558 PARAMETER Experiment Name: At_Drought_Soil_Dry_P Parameter: Plant Line Value: WS
  misc_feature: MA Experiment 20001558 PARAMETER Experiment Name: At_Drought_Soil_Dry_P Parameter: Post Timepoint (hr) Value: 6
  misc_feature: MA Experiment 20001558 PARAMETER Experiment Name: At_Drought_Soil_Dry_P Parameter: Post-Treatment Value: Re-Water vs. No Drought
  misc_feature: MA Experiment 20001558 PARAMETER Experiment Name: At_Drought_Soil_Dry_P Parameter: Timepoint (day) Value: 13
  misc_feature: MA Experiment 20001558 PARAMETER Experiment Name: At_Drought_Soil_Dry_P Parameter: Treatment Value: Drought vs. No Drought
  misc_feature: MA Experiment ID: 20001904 Result: Up-regulated in Transcription
  misc_feature: MA Experiment 20001904 PARAMETER Experiment Name: At_Drought_Reproduction_P Parameter: Age (day) Value: 37
  misc_feature: MA Experiment 20001904 PARAMETER Experiment Name: At_Drought_Reproduction_P Parameter: Organism Value: A. thaliana
  misc_feature: MA Experiment 20001904 PARAMETER Experiment Name: At_Drought_Reproduction_P Parameter: Plant Line Value: WS
  misc_feature: MA Experiment 20001904 PARAMETER Experiment Name: At_Drought_Reproduction_P Parameter: Timepoint (day) Value: 7
  misc_feature: MA Experiment 20001904 PARAMETER Experiment Name: At_Drought_Reproduction_P Parameter: Tissue Value: Rosettes
  misc_feature: MA Experiment 20001904 PARAMETER Experiment Name: At_Drought_Reproduction_P Parameter: Treatment Value: Drought vs. No Drought
atgagcgaggacaaagattacatgtcggagccatttatcgttaagaagattgatgatgaagaatcattgcttgatgattataatccacagggcaatacttctttctccaagacttgtttccatggcattaacgccttatcaggtgtgggtatattatcggtcccttatgccttagcatccggaggatggctaagtttgatcatacttttcaccgtagcgatcacaactttctactgtgccattctcattaagagatgtatggaaatggatccacttcttagatcatacccggacattggctacaaagcctttggaaacacaggacgtgttatcgtctccatcttcatgaacctcgagctttacctagttgcaactagtttcttgatcctagaaggtgacaaccttaacaaactcttctcaaacgttggactcaacttcatggggcttgaattccaaggcaagcaaatgttcatcatcatggtggctctcattattcttccttcggtttggttagacaatatgaggattctttcttatgtttccgcgagtggtgtctttgcttccggggttattcttgcttctatcttttcggttggagcttttgaaggcgtagggttcaagaacaatgactcagaggtctttcgacttaatggagtcgctacttcggtgagcttatacgcgttttgttattgcgctcatccagttttcccaactctatacacttccatgaagaacaaacgccaattctcaaacgttatgattatatgtttcacaatatgcaccttcatatatgcatcagtggcggtattgggttacttaatgtatggatcagatgttgaatcacagatcactttgaatcttcctactgataagcttagttcaaaagtggcgatatggactacattggtcaacccaatagctaagtttgctctcatggttacacctattattgacgcaatgagaagccggttttctcgagttttgcctaataaaagagcttctggatttttgctaagtacaatactagttactagcaatgtgattgtggcattgcttcttccgttttttggtgatcttatgagtcttgtgggagcattcttgagcgcatccgcatcggttatattgccatgtttatgttacttaaagatctctgggaaatatcaaagactcggattcgaaacattggtgctcatcggaatcactctaaccggtatcgtggttgtgataaccggaacttaccaagcggtcaaggacatttttggtcgattttga

SEQ ID NO: 83152 - protein, 423 aa, Arabidopsis thaliana
  peptide (1)..(423): Ceres Seq. ID no. 12668911
  misc_feature (1)..(423): Homolog of NCBI NO: 15242252 NR Description: putative protein; protein id: At5g15240.1
  misc_feature (18)..(416): Homolog of NCBI NO: 7939546 NR Description: gb|AAC79623.2~gene_id:K5K13.9~similar to unknown
  misc_feature (18)..(423): Homolog of NCBI NO: 38344962 NR Description: OSJNBa0072F16.7 [Oryza sativa (japonica
  misc_feature (1)..(423): Homolog of NCBI NO: 15290054 NR Description: P0025A05.3 [Oryza sativa (japonica
  misc_feature (36)..(419): Homolog of NCBI NO: 38344961 NR Description: OSJNBa0072F16.6 [Oryza sativa (japonica
  misc_feature (34)..(423): Homolog of NCBI NO: 34912160 NR Description: P0712E02.23 [Oryza sativa (japonica
  misc_feature (34)..(423): Homolog of NCBI NO: 20521331 NR Description: B1103C09.36 [Oryza sativa (japonica
  misc_feature (25)..(421): Homolog of NCBI NO: 22326569 NR Description: putative protein; protein id: At5g02170.1, by cDNA: gi_20856760 [Arabidopsis thaliana] AT5g02170/T7H20_220 [Arabidopsis thaliana]
  misc_feature (18)..(419): Homolog of NCBI NO: 30687791 NR Description: amino acid transporter family [Arabidopsis
  misc_feature (29)..(416): Homolog of NCBI NO: 30679549 NR Description: amino acid transporter family [Arabidopsis >gi|26449931|dbj|BAC42086.1| unknown protein [Arabidopsis
MSEDKDYMSEPFIVKKIDDEESLLDDYNPQGNTSFSKTCFHGINALSGVGILSVPYALASGGWLSLIILFTVAITTFYCAILIKRCMEMDPLLRSYPDIGYKAFGNTGRVIVSIFMNLELYLVATSFLILEGDNLNKLFSNVGLNFMGLEFQGKQMFIIMVALIILPSVWLDNMRILSYVSASGVFASGVILASIFSVGAFEGVGFKNNDSEVFRLNGVATSVSLYAFCYCAHPVFPTLYTSMKNKRQFSNVMIICFTICTFIYASVAVLGYLMYGSDVESQITLNLPTDKLSSKVAIWTTLVNPIAKFALMVTPIIDAMRSRFSRVLPNKRASGFLLSTILVTSNVIVALLLPFFGDLMSLVGAFLSASASVILPCLCYLKISGKYQRLGFETLVLIGITLTGIVVVITGTYQAVKDIFGRF

SEQ ID NO: 83153 - protein, 416 aa, Arabidopsis thaliana
  peptide (1)..(416): Ceres Seq. ID no. 12668912
  misc_feature (1)..(416): Homolog of NCBI NO: 15242252 NR Description: putative protein; protein id: At5g15240.1
  misc_feature (11)..(409): Homolog of NCBI NO: 7939546 NR Description: gb|AAC79623.2~gene_id:K5K13.9~similar to unknown
  misc_feature (11)..(416): Homolog of NCBI NO: 38344962 NR Description: OSJNBa0072F16.7 [Oryza sativa (japonica
  misc_feature (1)..(416): Homolog of NCBI NO: 15290054 NR Description: P0025A05.3 [Oryza sativa (japonica
  misc_feature (29)..(412): Homolog of NCBI NO: 38344961 NR Description: OSJNBa0072F16.6 [Oryza sativa (japonica
  misc_feature (27)..(416): Homolog of NCBI NO: 34912160 NR Description: P0712E02.23 [Oryza sativa (japonica
  misc_feature (27)..(416): Homolog of NCBI NO: 20521331 NR Description: B1103C09.36 [Oryza sativa (japonica
  misc_feature (18)..(414): Homolog of NCBI NO: 22326569 NR Description: putative protein; protein id: At5g02170.1, by cDNA: gi_20856760 [Arabidopsis thaliana] AT5g02170/T7H20_220 [Arabidopsis thaliana]
  misc_feature (11)..(412): Homolog of NCBI NO: 30687791 NR Description: amino acid transporter family [Arabidopsis
  misc_feature (22)..(409): Homolog of NCBI NO: 30679549 NR Description: amino acid transporter family [Arabidopsis >gi|26449931|dbj|BAC42086.1| unknown protein [Arabidopsis
MSEPFIVKKIDDEESLLDDYNPQGNTSFSKTCFHGINALSGVGILSVPYALASGGWLSLIILFTVAITTFYCAILIKRCMEMDPLLRSYPDIGYKAFGNTGRVIVSIFMNLELYLVATSFLILEGDNLNKLFSNVGLNFMGLEFQGKQMFIIMVALIILPSVWLDNMRILSYVSASGVFASGVILASIFSVGAFEGVGFKNNDSEVFRLNGVATSVSLYAFCYCAHPVFPTLYTSMKNKRQFSNVMIICFTICTFIYASVAVLGYLMYGSDVESQITLNLPTDKLSSKVAIWTTLVNPIAKFALMVTPIIDAMRSRFSRVLPNKRASGFLLSTILVTSNVIVALLLPFFGDLMSLVGAFLSASASVILPCLCYLKISGKYQRLGFETLVLIGITLTGIVVVITGTYQAVKDIFGRF

SEQ ID NO: 83154 - protein, 337 aa, Arabidopsis thaliana
  peptide (1)..(337): Ceres Seq. ID no. 12668913
  misc_feature (1)..(337): Homolog of NCBI NO: 15242252 NR Description: putative protein; protein id: At5g15240.1
  misc_feature (1)..(330): Homolog of NCBI NO: 7939546 NR Description: gb|AAC79623.2~gene_id:K5K13.9~similar to unknown
  misc_feature (1)..(337): Homolog of NCBI NO: 38344962 NR Description: OSJNBa0072F16.7 [Oryza sativa (japonica
  misc_feature (1)..(337): Homolog of NCBI NO: 15290054 NR Description: P0025A05.3 [Oryza sativa (japonica
  misc_feature (1)..(333): Homolog of NCBI NO: 38344961 NR Description: OSJNBa0072F16.6 [Oryza sativa (japonica
  misc_feature (1)..(337): Homolog of NCBI NO: 34912160 NR Description: P0712E02.23 [Oryza sativa (japonica
  misc_feature (1)..(337): Homolog of NCBI NO: 20521331 NR Description: B1103C09.36 [Oryza sativa (japonica
  misc_feature (1)..(335): Homolog of NCBI NO: 22326569 NR Description: putative protein; protein id: At5g02170.1, by cDNA: gi_20856760 [Arabidopsis thaliana] AT5g02170/T7H20_220 [Arabidopsis thaliana]
  misc_feature (1)..(333): Homolog of NCBI NO: 30687791 NR Description: amino acid transporter family [Arabidopsis
  misc_feature (1)..(330): Homolog of NCBI NO: 30679549 NR Description: amino acid transporter family [Arabidopsis >gi|26449931|dbj|BAC42086.1| unknown protein [Arabidopsis
MEMDPLLRSYPDIGYKAFGNTGRVIVSIFMNLELYLVATSFLILEGDNLNKLFSNVGLNFMGLEFQGKQMFIIMVALIILPSVWLDNMRILSYVSASGVFASGVILASIFSVGAFEGVGFKNNDSEVFRLNGVATSVSLYAFCYCAHPVFPTLYTSMKNKRQFSNVMIICFTICTFIYASVAVLGYLMYGSDVESQITLNLPTDKLSSKVAIWTTLVNPIAKFALMVTPIIDAMRSRFSRVLPNKRASGFLLSTILVTSNVIVALLLPFFGDLMSLVGAFLSASASVILPCLCYLKISGKYQRLGFETLVLIGITLTGIVVVITGTYQAVKDIFGRF

SEQ ID NO: 83155 - DNA, 3092 bp, Arabidopsis thaliana
  misc_feature (1)..(3092): Ceres Seq. ID no. 12668948
  misc_feature: MA Experiment ID: 20000171 Result: Up-regulated in Transcription
  misc_feature: MA Experiment 20000171 PARAMETER Experiment Name: At_42deg_Heat_P Parameter: Age (day) Value: 14
  misc_feature: MA Experiment 20000171 PARAMETER Experiment Name: At_42deg_Heat_P Parameter: Organism Value: A. thaliana
  misc_feature: MA Experiment 20000171 PARAMETER Experiment Name: At_42deg_Heat_P Parameter: Plant Line Value: WS
  misc_feature: MA Experiment 20000171 PARAMETER Experiment Name: At_42deg_Heat_P Parameter: Temperature (deg C) Value: 42 vs. 22
  misc_feature: MA Experiment 20000171 PARAMETER Experiment Name: At_42deg_Heat_P Parameter: Timepoint (hr) Value: 1
  misc_feature: MA Experiment 20000171 PARAMETER Experiment Name: At_42deg_Heat_P Parameter: Tissue Value: Aerial
  misc_feature: MA Experiment ID: 20000173 Result: Up-regulated in Transcription
  misc_feature: MA Experiment 20000173 PARAMETER Experiment Name: At_42deg_Heat_P Parameter: Age (day) Value: 14
  misc_feature: MA Experiment 20000173 PARAMETER Experiment Name: At_42deg_Heat_P Parameter: Organism Value: A. thaliana
  misc_feature: MA Experiment 20000173 PARAMETER Experiment Name: At_42deg_Heat_P Parameter: Plant Line Value: WS
  misc_feature: MA Experiment 20000173 PARAMETER Experiment Name: At_42deg_Heat_P Parameter: Temperature (deg C) Value: 42 vs. 22
  misc_feature: MA Experiment 20000173 PARAMETER Experiment Name: At_42deg_Heat_P Parameter: Timepoint (hr) Value: 6
  misc_feature: MA Experiment 20000173 PARAMETER Experiment Name: At_42deg_Heat_P Parameter: Tissue Value: Aerial
  misc_feature: MA Experiment ID: 20000234 Result: Up-regulated in Transcription
  misc_feature: MA Experiment 20000234 PARAMETER Experiment Name: At_Siliques_P Parameter: Age (day) Value: 21
  misc_feature: MA Experiment 20000234 PARAMETER Experiment Name: At_Siliques_P Parameter: Organism Value: A. thaliana
  misc_feature: MA Experiment 20000234 PARAMETER Experiment Name: At_Siliques_P Parameter: Plant Line Value: WS
  misc_feature: MA Experiment 20000234 PARAMETER Experiment Name: At_Siliques_P Parameter: Tissue Value: Less Than 5mm Siliques vs. Whole Plant
  misc_feature: MA Experiment ID: 20000286 Result: Up-regulated in Transcription
  misc_feature: MA Experiment 20000286 PARAMETER Experiment Name: At_Open_Flower_P Parameter: Age (day) Value: 21
  misc_feature: MA Experiment 20000286 PARAMETER Experiment Name: At_Open_Flower_P Parameter: Plant Line Value: WS
  misc_feature: MA Experiment 20000286 PARAMETER Experiment Name: At_Open_Flower_P Parameter: Tissue Value: Half Open vs. Whole Plant
  misc_feature: MA Experiment ID: 20000436 Result: Up-regulated in Transcription
  misc_feature: MA Experiment 20000436 PARAMETER Experiment Name: At_Drought_P Parameter: Age (day) Value: 7
  misc_feature: MA Experiment 20000436 PARAMETER Experiment Name: At_Drought_P Parameter: Organism Value: A. thaliana
  misc_feature: MA Experiment 20000436 PARAMETER Experiment Name: At_Drought_P Parameter: Plant Line Value: WS
  misc_feature: MA Experiment 20000436 PARAMETER Experiment Name: At_Drought_P Parameter: Timepoint (hr) Value: 12
  misc_feature: MA Experiment 20000436 PARAMETER Experiment Name: At_Drought_P Parameter: Tissue Value: Whole Plant
  misc_feature: MA Experiment 20000436 PARAMETER Experiment Name: At_Drought_P Parameter: Treatment Value: Drought vs. No Drought
  misc_feature: MA Experiment ID: 20000438 Result: Up-regulated in Transcription
  misc_feature: MA Experiment 20000438 PARAMETER Experiment Name: At_Shoots__P Parameter: Age (day) Value: 14
  misc_feature: MA Experiment 20000438 PARAMETER Experiment Name: At_Shoots__P Parameter: Tissue Value: Shoots vs. Whole Plant
  misc_feature: MA Experiment ID: 20000495 Result: Down-regulated in Transcription
  misc_feature: MA Experiment 20000495 PARAMETER Experiment Name: At_Guard_Cells_P Parameter: Harvest Date Value: 8/2/2002
  misc_feature: MA Experiment 20000495 PARAMETER Experiment Name: At_Guard_Cells_P Parameter: Organism Value: A. thaliana
  misc_feature: MA Experiment 20000495 PARAMETER Experiment Name: At_Guard_Cells_P Parameter: Tissue Value: Guard Cells vs. Leaves
  misc_feature: MA Experiment ID: 20000794 Result: Up-regulated in Transcription
  misc_feature: MA Experiment 20000794 PARAMETER Experiment Name: At_Petals_P Parameter: Age (day) Value: 23-25 days
  misc_feature: MA Experiment 20000794 PARAMETER Experiment Name: At_Petals_P Parameter: Plant Line Value: WS
  misc_feature: MA Experiment 20000794 PARAMETER Experiment Name: At_Petals_P Parameter: Tissue Value: Petals vs. Whole plant
  misc_feature: MA Experiment ID: 20001248 Result: Down-regulated in Transcription
  misc_feature: MA Experiment 20001248 PARAMETER Experiment Name: At_Far-red-induction_P Parameter: Age (day) Value: 7
  misc_feature: MA Experiment 20001248 PARAMETER Experiment Name: At_Far-red-induction_P Parameter: Light Value: Far-red vs. White
  misc_feature: MA Experiment 20001248 PARAMETER Experiment Name: At_Far-red-induction_P Parameter: Organism Value: A. thaliana
  misc_feature: MA Experiment 20001248 PARAMETER Experiment Name: At_Far-red-induction_P Parameter: Plant Line Value: Columbia
  misc_feature: MA Experiment 20001248 PARAMETER Experiment Name: At_Far-red-induction_P Parameter: Timepoint (hr) Value: 4
  misc_feature: MA Experiment 20001248 PARAMETER Experiment Name: At_Far-red-induction_P Parameter: Tissue Value: Whole Plant
  misc_feature: MA Experiment ID: 20001451 Result: Down-regulated in Transcription
  misc_feature: MA Experiment 20001451 PARAMETER Experiment Name: At_Far-red-induction_P Parameter: Age (day) Value: 7
  misc_feature: MA Experiment 20001451 PARAMETER Experiment Name: At_Far-red-induction_P Parameter: Light Value: Far-red vs. White
  misc_feature: MA Experiment 20001451 PARAMETER Experiment Name: At_Far-red-induction_P Parameter: Organism Value: A. thaliana
  misc_feature: MA Experiment 20001451 PARAMETER Experiment Name: At_Far-red-induction_P Parameter: Plant Line Value: Columbia
  misc_feature: MA Experiment 20001451 PARAMETER Experiment Name: At_Far-red-induction_P Parameter: Timepoint (hr) Value: 24
  misc_feature: MA Experiment 20001451 PARAMETER Experiment Name: At_Far-red-induction_P Parameter: Tissue Value: Whole Plant
atggcgacggctacgacgactgctacggcggcgtttagtggtgtagtcagtgtaggaacggagactcgaaggatttattcgttttctcatcttcaaccttctgcggcttttccggcgaagcctagttccttcaaatctctcaaattaaagcagagcgcgaggctcacacggcggcttgatcatcggccgttcgttgtccgatgtgaagcttcttcttctaatggaaggcttacacagcaagaattcacagaaatggcgtggcaatcgatagtttcgtcaccagatgttgcaaaagagaataagcaacagattgtggagacagagcatctaatgaaagctcttttggagcagaagaatggtttagctcgtaggattttctctaagatcggtgtggataacacaaaggttctagaagcaacagagaagttcattcaacgccaaccaaaggtgtatggagatgctgctggttcgatgttggggcgtgatttggaagctctgttccagagagcaagacagtttaagaaagatttaaaggactcttatgtgtcagtggagcatttggttcttgcttttgctgatgataagcggtttgggaaacagttgtttaaggattttcagatatcagagaggagcttgaaatctgcaattgaatccattagagggaaacaatcagtcattgaccaagatccggaaggcaagtatgaggcgttggagaagtatggaaaagacttgacagcaatggcaagagagggaaaactagatcctgtgataggtagagatgacgagatccgaagatgcattcagattctctcaaggagaacaaagaacaaccctgtgttgatcggtgaaccaggtgttggtaaaactgcaatttcagaaggacttgctcagaggattgtgcaaggagatgtacctcaagcattgatgaacagaaagttgatatctcttgatatgggtgctctcattgctggagcaaagtatcggggagaattcgaagacagactaaaagctgtgcttaaggaagtcacagactcagaaggccaaatcattttgttcatcgatgagatccatacagttgttggtgcaggtgcgactaatggggccatggatgctggtaatctgctgaaaccgatgctgggccgaggcgagttacgttgtatcggtgcaaccacgcttgatgaatataggaaatacatagagaaagatccagccttggagcgtaggtttcaacaggtttatgttgatcaacctacggttgaagacacgatttctattctccgtggtttgcgggaaaggtatgaactacatcatggagttcgcatctcagatagtgctctagtggaagctgctatcctctcagaccgttacatcagtggccggtttctacccgataaagcaattgacttggtcgatgaagcggcagccaaattgaaaatggaaatcacttcgaaacctacagctcttgacgagcttgaccgttcggtaataaagcttgaaatggagaggctttcacttaccaatgatacagacaaagcttctagagagagattgaatcgaattgaaactgagttagtgctattaaaggagaaacaagctgagttaactgaacagtgggagcacgagaggtctgttatgtcccgtcttcagtcgattaaagaggagattgatcgagtaaacctcgagatccagcaggcggaacgtgaatacgatctcaaccgtgcagctgagctcaaatacggaagcttaaactcattgcagcgacagcttaatgaagcagagaaagagctgaacgagtacttaagctctgggaaatctatgttcagagaagaggttttgggtagcgatatcgccgagattgtgagtaaatggactggaatcccggtatcaaaacttcaacagtctgaacgagataagcttctacatttggaagaagaattgcataaaagagtagtcggtcaaaacccagcagtgactgcggtagctgaagcaatccaacgatcaagagctggtctttcggatccaggccgtcctatagctagtttcatgtttatgggaccaactggtgttggtaaaacagagctagccaaagcacttgcttcttatatgttcaacactgaagaagctttagtgagaattgacatgagtgaatacatggagaagcatgcggtgtctaggctcattggagctccacctggatatgttggttacgaagaaggaggacagttaacagaaacggttagaagaaggccttattcggtcattctatttgatgagattgagaaagctcatggagatgtcttcaatgtgtttctccaaatcttggacgatgggcgagtcacagattctcaaggacgtacagtgagtttcaccaataccgtcattattatgacctcaaatgttggttcgcagtttattctgaacaacacagatgatgatgctaatgagctctcttatgaaacgattaaagagagagtgatgaatgctgcaaggtcaatctttcgtcctgaattcatgaatagggttgatgagtatatagttttcaaacctcttgaccgcgagcagatcaaccgcattgtccggttacagctggcacgtgtgcagaagcgaattgcagacaggaaaatgaagataaacatcacggatgcagcagtcgatcttcttggaagcctagggtatgatccaaactatggagctagacctgttaagcgtgtgatacagcaaaacattgagaatgagcttgctaagggtatcttgagaggagatttcaaggaggaagatggcattttgatcgataccgaggtcacagcgttctccaatggccagttacctcagcaaaagctcacattcaagaagattgagtcagaaacagcagatgctgaacaagaagaagcagctttctcaaaatagagtagttgaaaatgcaaccttttggagcccaagaagattcagacttttcagtacagaacttctagtgagttacttgtcacaaaagactgataatatttatctcaatgtgagagtttatataaatcataagcttatgagtcattgtactgatgtctcaaaggtccagaggttatgaaaattgttga

SEQ ID NO: 83156 - protein, 968 aa, Arabidopsis thaliana
  peptide (1)..(968): Ceres Seq. ID no. 12668949
  misc_feature (277)..(471): Pfam Name: ATPase family associated with various cellular Pfam Description: ATPase family associated with various cellular
  misc_feature (80)..(933): Homolog of NCBI NO: 23128455 NR Description: hypothetical protein [Nostoc punctiforme]
  misc_feature (111)..(943): Homolog of NCBI NO: 17232576 NR Description: endopeptidase Clp ATP-binding chain B [Nostoc sp.
  misc_feature (80)..(948): Homolog of NCBI NO: 3360502 NR Description: heat shock protein [Plectonema boryanum]
  misc_feature (72)..(931): Homolog of NCBI NO: 33866037 NR Description: endopeptidase Clp ATP-binding chain B
  misc_feature (81)..(933): Homolog of NCBI NO: 30019323 NR Description: ClpB protein [Bacillus cereus ATCC 14579]
  misc_feature (81)..(933): Homolog of NCBI NO: 30261278 NR Description: ATP-dependent Clp protease, ATP-binding subunit
  misc_feature (77)..(513): Homolog of NCBI NO: 23480353 NR Description: ClpB protein [Plasmodium yoelii yoelii]
  misc_feature (511)..(940): Homolog of NCBI NO: 23480353 NR Description: ClpB protein [Plasmodium yoelii yoelii]
  misc_feature (77)..(511): Homolog of NCBI NO: 23612849 NR Description: hypothetical protein [Plasmodium falciparum 3D7]
  misc_feature (515)..(930): Homolog of NCBI NO: 23612849 NR Description: hypothetical protein [Plasmodium falciparum 3D7]
MATATTTATAAFSGVVSVGTETRRIYSFSHLQPSAAFPAKPSSFKSLKLKQSARLTRRLDHRPFVVRCEASSSNGRLTQQEFTEMAWQSIVSSPDVAKENKQQIVETEHLMKALLEQKNGLARRIFSKIGVDNTKVLEATEKFIQRQPKVYGDAAGSMLGRDLEALFQRARQFKKDLKDSYVSVEHLVLAFADDKRFGKQLFKDFQISERSLKSAIESIRGKQSVIDQDPEGKYEALEKYGKDLTAMAREGKLDPVIGRDDEIRRCIQILSRRTKNNPVLIGEPGVGKTAISEGLAQRIVQGDVPQALMNRKLISLDMGALIAGAKYRGEFEDRLKAVLKEVTDSEGQIILFIDEIHTVVGAGATNGAMDAGNLLKPMLGRGELRCIGATTLDEYRKYIEKDPALERRFQQVYVDQPTVEDTISILRGLRERYELHHGVRISDSALVEAAILSDRYISGRFLPDKAIDLVDEAAAKLKMEITSKPTALDELDRSVIKLEMERLSLTNDTDKASRERLNRIETELVLLKEKQAELTEQWEHERSVMSRLQSIKEEIDRVNLEIQQAEREYDLNRAAELKYGSLNSLQRQLNEAEKELNEYLSSGKSMFREEVLGSDIAEIVSKWTGIPVSKLQQSERDKLLHLEEELHKRVVGQNPAVTAVAEAIQRSRAGLSDPGRPIASFMFMGPTGVGKTELAKALASYMFNTEEALVRIDMSEYMEKHAVSRLIGAPPGYVGYEEGGQLTETVRRRPYSVILFDEIEKAHGDVFNVFLQILDDGRVTDSQGRTVSFTNTVIIMTSNVGSQFILNNTDDDANELSYETIKERVMNAARSIFRPEFMNRVDEYIVFKPLDREQINRIVRLQLARVQKRIADRKMKINITDAAVDLLGSLGYDPNYGARPVKRVIQQNIENELAKGILRGDFKEEDGILIDTEVTAFSNGQLPQQKLTFKKIESETADAEQEEAAFSK

SEQ ID NO: 83157 - protein, 884 aa, Arabidopsis thaliana
  peptide (1)..(884): Ceres Seq. ID no. 12668950
  misc_feature (193)..(387): Pfam Name: ATPase family associated with various cellular Pfam Description: ATPase family associated with various cellular
  misc_feature (1)..(849): Homolog of NCBI NO: 23128455 NR Description: hypothetical protein [Nostoc punctiforme]
  misc_feature (27)..(859): Homolog of NCBI NO: 17232576 NR Description: endopeptidase Clp ATP-binding chain B [Nostoc sp.
  misc_feature (1)..(864): Homolog of NCBI NO: 3360502 NR Description: heat shock protein [Plectonema boryanum]
  misc_feature (1)..(847): Homolog of NCBI NO: 33866037 NR Description: endopeptidase Clp ATP-binding chain B
  misc_feature (1)..(849): Homolog of NCBI NO: 30019323 NR Description: ClpB protein [Bacillus cereus ATCC 14579]
  misc_feature (1)..(849): Homolog of NCBI NO: 30261278 NR Description: ATP-dependent Clp protease, ATP-binding subunit
  misc_feature (1)..(429): Homolog of NCBI NO: 23480353 NR Description: ClpB protein [Plasmodium yoelii yoelii]
  misc_feature (427)..(856): Homolog of NCBI NO: 23480353 NR Description: ClpB protein [Plasmodium yoelii yoelii]
  misc_feature (1)..(427): Homolog of NCBI NO: 23612849 NR Description: hypothetical protein [Plasmodium falciparum 3D7]
  misc_feature (431)..(846): Homolog of NCBI NO: 23612849 NR Description: hypothetical protein [Plasmodium falciparum 3D7]
MAWQSIVSSPDVAKENKQQIVETEHLMKALLEQKNGLARRIFSKIGVDNTKVLEATEKFIQRQPKVYGDAAGSMLGRDLEALFQRARQFKKDLKDSYVSVEHLVLAFADDKRFGKQLFKDFQISERSLKSAIESIRGKQSVIDQDPEGKYEALEKYGKDLTAMAREGKLDPVIGRDDEIRRCIQILSRRTKNNPVLIGEPGVGKTAISEGLAQRIVQGDVPQALMNRKLISLDMGALIAGAKYRGEFEDRLKAVLKEVTDSEGQIILFIDEIHTVVGAGATNGAMDAGNLLKPMLGRGELRCIGATTLDEYRKYIEKDPALERRFQQVYVDQPTVEDTISILRGLRERYELHHGVRISDSALVEAAILSDRYISGRFLPDKAIDLVDEAAAKLKMEITSKPTALDELDRSVIKLEMERLSLTNDTDKASRERLNRIETELVLLKEKQAELTEQWEHERSVMSRLQSIKEEIDRVNLEIQQAEREYDLNRAAELKYGSLNSLQRQLNEAEKELNEYLSSGKSMFREEVLGSDIAEIVSKWTGIPVSKLQQSERDKLLHLEEELHKRVVGQNPAVTAVAEAIQRSRAGLSDPGRPIASFMFMGPTGVGKTELAKALASYMFNTEEALVRIDMSEYMEKHAVSRLIGAPPGYVGYEEGGQLTETVRRRPYSVILFDEIEKAHGDVFNVFLQILDDGRVTDSQGRTVSFTNTVIIMTSNVGSQFILNNTDDDANELSYETIKERVMNAARSIFRPEFMNRVDEYIVFKPLDREQINRIVRLQLARVQKRIADRKMKINITDAAVDLLGSLGYDPNYGARPVKRVIQQNIENELAKGILRGDFKEEDGILIDTEVTAFSNGQLPQQKLTFKKIESETADAEQEEAAFSK

SEQ ID NO: 83158 - protein, 858 aa, Arabidopsis thaliana
  peptide (1)..(858): Ceres Seq. ID no. 12668951
  misc_feature (167)..(361): Pfam Name: ATPase family associated with various cellular Pfam Description: ATPase family associated with various cellular
  misc_feature (1)..(823): Homolog of NCBI NO: 23128455 NR Description: hypothetical protein [Nostoc punctiforme]
  misc_feature (1)..(833): Homolog of NCBI NO: 17232576 NR Description: endopeptidase Clp ATP-binding chain B [Nostoc sp.
  misc_feature (1)..(838): Homolog of NCBI NO: 3360502 NR Description: heat shock protein [Plectonema boryanum]
  misc_feature (1)..(821): Homolog of NCBI NO: 33866037 NR Description: endopeptidase Clp ATP-binding chain B
  misc_feature (1)..(823): Homolog of NCBI NO: 30019323 NR Description: ClpB protein [Bacillus cereus ATCC 14579]
  misc_feature (1)..(823): Homolog of NCBI NO: 30261278 NR Description: ATP-dependent Clp protease, ATP-binding subunit
  misc_feature (1)..(403): Homolog of NCBI NO: 23480353 NR Description: ClpB protein [Plasmodium yoelii yoelii]
  misc_feature (401)..(830): Homolog of NCBI NO: 23480353 NR Description: ClpB protein [Plasmodium yoelii yoelii]
  misc_feature (1)..(401): Homolog of NCBI NO: 23612849 NR Description: hypothetical protein [Plasmodium falciparum 3D7]
  misc_feature (405)..(820): Homolog of NCBI NO: 23612849 NR Description: hypothetical protein [Plasmodium falciparum 3D7]
MKALLEQKNGLARRIFSKIGVDNTKVLEATEKFIQRQPKVYGDAAGSMLGRDLEALFQRARQFKKDLKDSYVSVEHLVLAFADDKRFGKQLFKDFQISERSLKSAIESIRGKQSVIDQDPEGKYEALEKYGKDLTAMAREGKLDPVIGRDDEIRRCIQILSRRTKNNPVLIGEPGVGKTAISEGLAQRIVQGDVPQALMNRKLISLDMGALIAGAKYRGEFEDRLKAVLKEVTDSEGQIILFIDEIHTVVGAGATNGAMDAGNLLKPMLGRGELRCIGATTLDEYRKYIEKDPALERRFQQVYVDQPTVEDTISILRGLRERYELHHGVRISDSALVEAAILSDRYISGRFLPDKAIDLVDEAAAKLKMEITSKPTALDELDRSVIKLEMERLSLTNDTDKASRERLNRIETELVLLKEKQAELTEQWEHERSVMSRLQSIKEEIDRVNLEIQQAEREYDLNRAAELKYGSLNSLQRQLNEAEKELNEYLSSGKSMFREEVLGSDIAEIVSKWTGIPVSKLQQSERDKLLHLEEELHKRVVGQNPAVTAVAEAIQRSRAGLSDPGRPIASFMFMGPTGVGKTELAKALASYMFNTEEALVRIDMSEYMEKHAVSRLIGAPPGYVGYEEGGQLTETVRRRPYSVILFDEIEKAHGDVFNVFLQILDDGRVTDSQGRTVSFTNTVIIMTSNVGSQFILNNTDDDANELSYETIKERVMNAARSIFRPEFMNRVDEYIVFKPLDREQINRIVRLQLARVQKRIADRKMKINITDAAVDLLGSLGYDPNYGARPVKRVIQQNIENELAKGILRGDFKEEDGILIDTEVTAFSNGQLPQQKLTFKKIESETADAEQEEAAFSK

SEQ ID NO: 83159 - DNA, 1518 bp, Arabidopsis thaliana
  misc_feature (1)..(1518): Ceres Seq. ID no. 12668971
  misc_feature: MA Experiment ID: 20000306 Result: Up-regulated in Transcription
  misc_feature: MA Experiment 20000306 PARAMETER Experiment Name: At_Germinating_Seeds_Sub_P Parameter: Age (hr) Value: 6 vs. 0
  misc_feature: MA Experiment 20000306 PARAMETER Experiment Name: At_Germinating_Seeds_Sub_P Parameter: Organism Value: A. thaliana
  misc_feature: MA Experiment 20000306 PARAMETER Experiment Name: At_Germinating_Seeds_Sub_P Parameter: Plant Line Value: WS
  misc_feature: MA Experiment 20000306 PARAMETER Experiment Name: At_Germinating_Seeds_Sub_P Parameter: Tissue Value: Germinating Seeds
  misc_feature: MA Experiment ID: 20000307 Result: Up-regulated in Transcription
  misc_feature: MA Experiment 20000307 PARAMETER Experiment Name: At_Germinating_Seeds_Sub_P Parameter: Age (hr) Value: 24 vs. 0
  misc_feature: MA Experiment 20000307 PARAMETER Experiment Name: At_Germinating_Seeds_Sub_P Parameter: Organism Value: A. thaliana
  misc_feature: MA Experiment 20000307 PARAMETER Experiment Name: At_Germinating_Seeds_Sub_P Parameter: Plant Line Value: WS
  misc_feature: MA Experiment 20000307 PARAMETER Experiment Name: At_Germinating_Seeds_Sub_P Parameter: Tissue Value: Germinating Seeds
  misc_feature: MA Experiment ID: 20000314 Result: Up-regulated in Transcription
  misc_feature: MA Experiment 20000314 PARAMETER Experiment Name: At_14day_Shoots-Roots_Sub_P Parameter: Age (day) Value: 14
  misc_feature: MA Experiment 20000314 PARAMETER Experiment Name: At_14day_Shoots-Roots_Sub_P Parameter: Organism Value: A. thaliana
  misc_feature: MA Experiment 20000314 PARAMETER Experiment Name: At_14day_Shoots-Roots_Sub_P Parameter: Plant Line Value: WS
  misc_feature: MA Experiment 20000314 PARAMETER Experiment Name: At_14day_Shoots-Roots_Sub_P Parameter: Tissue Value: Roots vs. Whole Plant
  misc_feature: MA Experiment ID: 20000355 Result: Up-regulated in Transcription
  misc_feature: MA Experiment 20000355 PARAMETER Experiment Name: At_Siliques_Sub_P Parameter: Age (day) Value: 21
  misc_feature: MA Experiment 20000355 PARAMETER Experiment Name: At_Siliques_Sub_P Parameter: Organism Value: A. thaliana
  misc_feature: MA Experiment 20000355 PARAMETER Experiment Name: At_Siliques_Sub_P Parameter: Plant Line Value: WS
  misc_feature: MA Experiment 20000355 PARAMETER Experiment Name: At_Siliques_Sub_P Parameter: Tissue Value: Less Than 5mm Siliques vs. Whole Plant
atggagaagtttctttaccacaggaaactatgggagatgaatgttaagcttttaggagagagcaaagttgagaaactcaagaactcttttgtttcgaggcctcgtatgagcttatggatgattcgtgctgttactgtattgttgctttggagctgttttgttcatttgatggctttgggagagatgtggggaccaagattgtttaaaggttggccttcttgtttcaatcaccatcaactgtccactgccgcagagatgacgtctcttcctaccaaaattgctcttccacctaaaagggtatatgtgaacaatggttatcttatggtttcctgcaatggaggactcaatcaaatgcgagcagctatatgtgatatggtaaccgttgcaagatacatgaatgttacacttattgtgccggagcttgacaagacctctttttggaacgatccaagtgagtttaaagacatattcgatgtggatcacttcataagttcgttaagagatgaagttcggatactcaaagagttacctccaaggcttaagaaaagggttgagcttggagtgtaccacgaaatgcctcctattagttggtcaaacatgtcttactaccaaaatcagattcttccactggtgaaaaaacataaggttttacatctgaacagaacggatacccgacttgctaataatggactgcctgtggaggttcagaagctgaggtgccgagtaaatttcaatgggcttaagtttactcctcagattgaggaattaggtagacgagtagtcaagattctgagagagaaaggtccctttcttgtcctgcatctcagatatgagatggatatgttagcattttctggttgttcacatggttgcaaccccgaggaagaagaagaactaacaagaatgagatatgcttatccatggtggaaagagaaagtcataaactctgagctgaagaggaaagatggcctttgccctttaactcctgaggaaaccgctctcactctgaccgcgttgggtattgaccgaaatgttcaaatttacatagctgctggagaaatctatggtggtcaaaggcggatgaaggctttaacagacgcttttccaaatgtggtccggaaagaaaccctactcgaatcctctgatctggatttttgccggaaccattcatctcaaatggctgcacttgattacctagtggcacttgagagcgacatatttgttccaaccaatgatgggaacatggcaagagttgttgaaggtcatcgcagattcttggggttcaagaagacaatccagctgaataggaggttcctagttaagctgatagatgagtatactgaaggattgttgagttgggatgtattttcatccacggtgaaggcatttcactctactcgaatgggaagccctaagagacggttagtgattcccaatagacccaaggaagaagactacttctacgccaacccacaagaatgtctgcagctgttagatgaaccattgagagtcatttga

SEQ ID NO: 83160 - protein, 505 aa, Arabidopsis thaliana
  peptide (1)..(505): Ceres Seq. ID no. 12668972
  misc_feature (108)..(456): Pfam Name: Plant protein family Pfam Description: Plant protein family
  misc_feature (1)..(505): Homolog of NCBI NO: 15242375 NR Description: putative protein; protein id: At5g15740.1
  misc_feature (2)..(500): Homolog of NCBI NO: 30678517 NR Description: auxin-independent growth promoter -related
  misc_feature (108)..(500): Homolog of NCBI NO: 6041793 NR Description: putative auxin-independent growth promoter
  misc_feature (31)..(495): Homolog of NCBI NO: 8778398 NR Description: F16A14.24 [Arabidopsis thaliana]
  misc_feature (31)..(495): Homolog of NCBI NO: 15223028 NR Description: putative growth regulator protein; protein id:
  misc_feature (31)..(495): Homolog of NCBI NO: 27754419 NR Description: putative axi 1 protein [Arabidopsis thaliana]
  misc_feature (31)..(495): Homolog of NCBI NO: 19071634 NR Description: putative auxin independent growth-related protein
  misc_feature (63)..(495): Homolog of NCBI NO: 15227586 NR Description: similar to axi 1 protein from Nicotiana tabacum; id: At2g03280.1 [Arabidopsis thaliana] >gi|7459609|pir||T02698
  misc_feature (36)..(495): Homolog of NCBI NO: 34902158 NR Description: Putative growth regulator protein [Oryza sativa
  misc_feature (104)..(505): Homolog of NCBI NO: 15224418 NR Description: similar to axi 1 protein from Nicotiana tabacum; id: At2g37980.1, supported by cDNA: gi_13430693 [Arabidopsis >gi|25408582|pir||E84799 similar to axi 1 protein from Nicotiana
MEKFLYHRKLWEMNVKLLGESKVEKLKNSFVSRPRMSLWMIRAVTVLLLWSCFVHLMALGEMWGPRLFKGWPSCFNHHQLSTAAEMTSLPTKIALPPKRVYVNNGYLMVSCNGGLNQMRAAICDMVTVARYMNVTLIVPELDKTSFWNDPSEFKDIFDVDHFISSLRDEVRILKELPPRLKKRVELGVYHEMPPISWSNMSYYQNQILPLVKKHKVLHLNRTDTRLANNGLPVEVQKLRCRVNFNGLKFTPQIEELGRRVVKILREKGPFLVLHLRYEMDMLAFSGCSHGCNPEEEEELTRMRYAYPWWKEKVINSELKRKDGLCPLTPEETALTLTALGIDRNVQIYIAAGEIYGGQRRMKALTDAFPNVVRKETLLESSDLDFCRNHSSQMAALDYLVALESDIFVPTNDGNMARVVEGHRRFLGFKKTIQLNRRFLVKLIDEYTEGLLSWDVFSSTVKAFHSTRMGSPKRRLVIPNRPKEEDYFYANPQECLQLLDEPLRVI

SEQ ID NO: 83161 - protein, 493 aa, Arabidopsis thaliana
  peptide (1)..(493): Ceres Seq. ID no. 12668973
  misc_feature (96)..(444): Pfam Name: Plant protein family Pfam Description: Plant protein family
  misc_feature (1)..(493): Homolog of NCBI NO: 15242375 NR Description: putative protein; protein id: At5g15740.1
  misc_feature (1)..(488): Homolog of NCBI NO: 30678517 NR Description: auxin-independent growth promoter -related
  misc_feature (96)..(488): Homolog of NCBI NO: 6041793 NR Description: putative auxin-independent growth promoter
  misc_feature (19)..(483): Homolog of NCBI NO: 8778398 NR Description: F16A14.24 [Arabidopsis thaliana]
  misc_feature (19)..(483): Homolog of NCBI NO: 15223028 NR Description: putative growth regulator protein; protein id:
  misc_feature (19)..(483): Homolog of NCBI NO: 27754419 NR Description: putative axi 1 protein [Arabidopsis thaliana]
  misc_feature (19)..(483): Homolog of NCBI NO: 19071634 NR Description: putative auxin independent growth-related protein
  misc_feature (51)..(483): Homolog of NCBI NO: 15227586 NR Description: similar to axi 1 protein from Nicotiana tabacum; id: At2g03280.1 [Arabidopsis thaliana] >gi|7459609|pir||T02698
  misc_feature (24)..(483): Homolog of NCBI NO: 34902158 NR Description: Putative growth regulator protein [Oryza sativa
  misc_feature (92)..(493): Homolog of NCBI NO: 15224418 NR Description: similar to axi 1 protein from Nicotiana tabacum; id: At2g37980.1, supported by cDNA: gi_13430693 [Arabidopsis >gi|25408582|pir||E84799 similar to axi 1 protein from Nicotiana
MNVKLLGESKVEKLKNSFVSRPRMSLWMIRAVTVLLLWSCFVHLMALGEMWGPRLFKGWPSCFNHHQLSTAAEMTSLPTKIALPPKRVYVNNGYLMVSCNGGLNQMRAAICDMVTVARYMNVTLIVPELDKTSFWNDPSEFKDIFDVDHFISSLRDEVRILKELPPRLKKRVELGVYHEMPPISWSNMSYYQNQILPLVKKHKVLHLNRTDTRLANNGLPVEVQKLRCRVNFNGLKFTPQIEELGRRVVKILREKGPFLVLHLRYEMDMLAFSGCSHGCNPEEEEELTRMRYAYPWWKEKVINSELKRKDGLCPLTPEETALTLTALGIDRNVQIYIAAGEIYGGQRRMKALTDAFPNVVRKETLLESSDLDFCRNHSSQMAALDYLVALESDIFVPTNDGNMARVVEGHRRFLGFKKTIQLNRRFLVKLIDEYTEGLLSWDVFSSTVKAFHSTRMGSPKRRLVIPNRPKEEDYFYANPQECLQLLDEPLRVI

SEQ ID NO: 83162 - protein, 470 aa, Arabidopsis thaliana
  peptide (1)..(470): Ceres Seq. ID no. 12668974
  misc_feature (73)..(421): Pfam Name: Plant protein family Pfam Description: Plant protein family
  misc_feature (1)..(470): Homolog of NCBI NO: 15242375 NR Description: putative protein; protein id: At5g15740.1
  misc_feature (1)..(465): Homolog of NCBI NO: 30678517 NR Description: auxin-independent growth promoter -related
  misc_feature (73)..(465): Homolog of NCBI NO: 6041793 NR Description: putative auxin-independent growth promoter
  misc_feature (1)..(460): Homolog of NCBI NO: 8778398 NR Description: F16A14.24 [Arabidopsis thaliana]
  misc_feature (1)..(460): Homolog of NCBI NO: 15223028 NR Description: putative growth regulator protein; protein id:
  misc_feature (1)..(460): Homolog of NCBI NO: 27754419 NR Description: putative axi 1 protein [Arabidopsis thaliana]
  misc_feature (1)..(460): Homolog of NCBI NO: 19071634 NR Description: putative auxin independent growth-related protein
  misc_feature (28)..(460): Homolog of NCBI NO: 15227586 NR Description: similar to axi 1 protein from Nicotiana tabacum; id: At2g03280.1 [Arabidopsis thaliana] >gi|7459609|pir||T02698
  misc_feature (1)..(460): Homolog of NCBI NO: 34902158 NR Description: Putative growth regulator protein [Oryza sativa
  misc_feature (69)..(470): Homolog of NCBI NO: 15224418 NR Description: similar to axi 1 protein from Nicotiana tabacum; id: At2g37980.1, supported by cDNA: gi_13430693 [Arabidopsis >gi|25408582|pir||E84799 similar to axi 1 protein from Nicotiana
MSLWMIRAVTVLLLWSCFVHLMALGEMWGPRLFKGWPSCFNHHQLSTAAEMTSLPTKIALPPKRVYVNNGYLMVSCNGGLNQMRAAICDMVTVARYMNVTLIVPELDKTSFWNDPSEFKDIFDVDHFISSLRDEVRILKELPPRLKKRVELGVYHEMPPISWSNMSYYQNQILPLVKKHKVLHLNRTDTRLANNGLPVEVQKLRCRVNFNGLKFTPQIEELGRRVVKILREKGPFLVLHLRYEMDMLAFSGCSHGCNPEEEEELTRMRYAYPWWKEKVINSELKRKDGLCPLTPEETALTLTALGIDRNVQIYIAAGEIYGGQRRMKALTDAFPNVVRKETLLESSDLDFCRNHSSQMAALDYLVALESDIFVPTNDGNMARVVEGHRRFLGFKKTIQLNRRFLVKLIDEYTEGLLSWDVFSSTVKAFHSTRMGSPKRRLVIPNRPKEEDYFYANPQECLQLLDEPLRVI

SEQ ID NO: 83163 - DNA, 1521 bp, Arabidopsis thaliana
  misc_feature (1)..(1521): Ceres Seq. ID no. 12668996
  misc_feature: MA Experiment ID: 20000171 Result: Up-regulated in Transcription
  misc_feature: MA Experiment 20000171 PARAMETER Experiment Name: At_42deg_Heat_P Parameter: Age (day) Value: 14
  misc_feature: MA Experiment 20000171 PARAMETER Experiment Name: At_42deg_Heat_P Parameter: Organism Value: A. thaliana
  misc_feature: MA Experiment 20000171 PARAMETER Experiment Name: At_42deg_Heat_P Parameter: Plant Line Value: WS
  misc_feature: MA Experiment 20000171 PARAMETER Experiment Name: At_42deg_Heat_P Parameter: Temperature (deg C) Value: 42 vs. 22
  misc_feature: MA Experiment 20000171 PARAMETER Experiment Name: At_42deg_Heat_P Parameter: Timepoint (hr) Value: 1
  misc_feature: MA Experiment 20000171 PARAMETER Experiment Name: At_42deg_Heat_P Parameter: Tissue Value: Aerial
  misc_feature: MA Experiment ID: 20000173 Result: Up-regulated in Transcription
  misc_feature: MA Experiment 20000173 PARAMETER Experiment Name: At_42deg_Heat_P Parameter: Age (day) Value: 14
  misc_feature: MA Experiment 20000173 PARAMETER Experiment Name: At_42deg_Heat_P Parameter: Organism Value: A. thaliana
  misc_feature: MA Experiment 20000173 PARAMETER Experiment Name: At_42deg_Heat_P Parameter: Plant Line Value: WS
  misc_feature: MA Experiment 20000173 PARAMETER Experiment Name: At_42deg_Heat_P Parameter: Temperature (deg C) Value: 42 vs. 22
  misc_feature: MA Experiment 20000173 PARAMETER Experiment Name: At_42deg_Heat_P Parameter: Timepoint (hr) Value: 6
  misc_feature: MA Experiment 20000173 PARAMETER Experiment Name: At_42deg_Heat_P Parameter: Tissue Value: Aerial
  misc_feature: MA Experiment ID: 20000182 Result: Up-regulated in Transcription
  misc_feature: MA Experiment 20000182 PARAMETER Experiment Name: At_2mM_SA_P Parameter: Age (day) Value: 14
  misc_feature: MA Experiment 20000182 PARAMETER Experiment Name: At_2mM_SA_P Parameter: Organism Value: A. thaliana
  misc_feature: MA Experiment 20000182 PARAMETER Experiment Name: At_2mM_SA_P Parameter: Plant Line Value: WS
  misc_feature: MA Experiment 20000182 PARAMETER Experiment Name: At_2mM_SA_P Parameter: Timepoint (hr) Value: 6
  misc_feature: MA Experiment 20000182 PARAMETER Experiment Name: At_2mM_SA_P Parameter: Tissue Value: Aerial
  misc_feature: MA Experiment 20000182 PARAMETER Experiment Name: At_2mM_SA_P Parameter: Treatment Value: 2mM SA vs. No Treatment
  misc_feature: MA Experiment ID: 20000436 Result: Up-regulated in Transcription
  misc_feature: MA Experiment 20000436 PARAMETER Experiment Name: At_Drought_P Parameter: Age (day) Value: 7
  misc_feature: MA Experiment 20000436 PARAMETER Experiment Name: At_Drought_P Parameter: Organism Value: A. thaliana
  misc_feature: MA Experiment 20000436 PARAMETER Experiment Name: At_Drought_P Parameter: Plant Line Value: WS
  misc_feature: MA Experiment 20000436 PARAMETER Experiment Name: At_Drought_P Parameter: Timepoint (hr) Value: 12
  misc_feature: MA Experiment 20000436 PARAMETER Experiment Name: At_Drought_P Parameter: Tissue Value: Whole Plant
  misc_feature: MA Experiment 20000436 PARAMETER Experiment Name: At_Drought_P Parameter: Treatment Value: Drought vs. No Drought
  misc_feature: MA Experiment ID: 20001248 Result: Down-regulated in Transcription
  misc_feature: MA Experiment 20001248 PARAMETER Experiment Name: At_Far-red-induction_P Parameter: Age (day) Value: 7
  misc_feature: MA Experiment 20001248 PARAMETER Experiment Name: At_Far-red-induction_P Parameter: Light Value: Far-red vs. White
  misc_feature: MA Experiment 20001248 PARAMETER Experiment Name: At_Far-red-induction_P Parameter: Organism Value: A. thaliana
  misc_feature: MA Experiment 20001248 PARAMETER Experiment Name: At_Far-red-induction_P Parameter: Plant Line Value: Columbia
  misc_feature: MA Experiment 20001248 PARAMETER Experiment Name: At_Far-red-induction_P Parameter: Timepoint (hr) Value: 4
  misc_feature: MA Experiment 20001248 PARAMETER Experiment Name: At_Far-red-induction_P Parameter: Tissue Value: Whole Plant
gtagaaggaaatggaaagcgcacaaaagcgaagataacaaaaagagtttgaaattcaaaagagaagagcaacacgaagaatcttggaattcgagatccactatttcacggcggaaaagatgcattcgcctcttcagactcagcagccggagcagcgatgctggccgatgacctcgacggtatcggagatcgaggaagttctacccgatgaggactccgatagaacgactcttcttaacggtgaaccgttacgtcgtcgagtttccgggaagtcgccggttgacgaaggacctcgtcggattttccggcagcaatcgttcggtcgcgatatcggccacgcggcagctgaaacgtatctaattactggacttagcttcaagcttcttcgatacctcggggtaggctatcgatggatgacaaaattacttgcccttacatgttatgctatgcttcttatgcctggctttcttcaagttgcatatagttattttttctcaaagcaagtccggaggagtatagtgtatggagatcaaccaaggaacaggctggatctgtacttgccaagcaacaacgatggcttgaagccggttgtggtttttgtgacgggtggagcttggattattgggtacaaagcttggggctcgctcttgggaatgcagctagcagaaagagatatcattgtagcatgccttgactacaggaactttcctcagggaacaattagtgatatggtgactgatgcttctcaaggaatctcatttgtctgcaataacatctctgcatttggaggtgaccccaacaggatctacctgatggggcaatcagctggtgcccatatagccgcttgtgctctattggaacaagctactaaagaattaaaaggagagagcatctcctggacagtgtcccagataaaagcttattttggattatctggagggtacaatctatacaagttggttgatcacttccataatcggggtctgtatcgctcgattttcctaagcataatggaaggagaagagtcctttgagaaattctctccggaagtaagactgaaagacccagttgttggaaaagctgcttctcttttacctcctattatacttttccacggatcctcagattattccataccatgcgatgaaagcaaaacttttacagacgctctgcaagctgttggagcaaaagccgagcttgttttatacagcggaaagacacatactgacttatttcttcaggatcccttacgaggaggtaaagacgaactctttgatgacatagtctctgtgatacatgcggaggacaatgatgggctgaccaaagactcgttggctcctcccagaaagcgtcttgtaccagagttgttactgaaactggctcgtgagattagccctttctgactgccaagaaaggaaaacaagctttgtttgttgatcctcagtttttacctttgttagttgctgtgtttttaattgcatcagtagaacatcatgtaaataaaaacaaactttgttgctcc

SEQ ID NO: 83164 - protein, 427 aa, Arabidopsis thaliana
  peptide (1)..(427): Ceres Seq. ID no. 12668997
  misc_feature (1)..(427): Homolog of NCBI NO: 22326830 NR Description: Carboxylesterase-like protein; protein id: supported by cDNA: gi_15027944, supported by cDNA: gi_20259180 thaliana] >gi|15027945|gb|AAK76503.1| putative putative
  misc_feature (1)..(427): Homolog of NCBI NO: 11357218 NR Description: Carboxylesterase-like protein - Arabidopsis
  misc_feature (143)..(427): Homolog of NCBI NO: 15232904 NR Description: hypothetical protein; protein id: At3g02410.1 thaliana] >gi|6957704|gb|AAF32448.1| hypothetical protein
  misc_feature (10)..(94): Homolog of NCBI NO: 15232904 NR Description: hypothetical protein; protein id: At3g02410.1 thaliana] >gi|6957704|gb|AAF32448.1| hypothetical protein
  misc_feature (63)..(427): Homolog of NCBI NO: 22329792 NR Description: hypothetical protein; protein id: At1g26120.1, by cDNA: gi_17979291, supported by cDNA: gi_20259110 [Arabidopsis >gi|17979292|gb|AAL49871.1| unknown protein [Arabidopsis
  misc_feature (63)..(427): Homolog of NCBI NO: 25518434 NR Description: hypothetical protein F28B23.20 [imported] - thaliana >gi|12320750|gb|AAG50528.1|AC084221_10 hypothetical [Arabidopsis thaliana] >gi|12321166|gb|AAG50668.1|AC079829_1
  misc_feature (143)..(282): Homolog of NCBI NO: 21231723 NR Description: carboxylesterase [Xanthomonas campestris pv. str. ATCC 33913] >gi|21113426|gb|AAM41564.1| carboxylesterase
  misc_feature (288)..(373): Homolog of NCBI NO: 21231723 NR Description: carboxylesterase [Xanthomonas campestris pv. str. ATCC 33913] >gi|21113426|gb|AAM41564.1| carboxylesterase
  misc_feature (133)..(276): Homolog of NCBI NO: 28871958 NR Description: esterase/lipase/thioesterase family protein syringae pv. tomato str. DC3000] >gi|28855211|gb|AAO58272.1|
  misc_feature (132)..(276): Homolog of NCBI NO: 23470769 NR Description: hypothetical protein [Pseudomonas syringae pv.
MHSPLQTQQPEQRCWPMTSTVSEIEEVLPDEDSDRTTLLNGEPLRRRVSGKSPVDEGPRRIFRQQSFGRDIGHAAAETYLITGLSFKLLRYLGVGYRWMTKLLALTCYAMLLMPGFLQVAYSYFFSKQVRRSIVYGDQPRNRLDLYLPSNNDGLKPVVVFVTGGAWIIGYKAWGSLLGMQLAERDIIVACLDYRNFPQGTISDMVTDASQGISFVCNNISAFGGDPNRIYLMGQSAGAHIAACALLEQATKELKGESISWTVSQIKAYFGLSGGYNLYKLVDHFHNRGLYRSIFLSIMEGEESFEKFSPEVRLKDPVVGKAASLLPPIILFHGSSDYSIPCDESKTFTDALQAVGAKAELVLYSGKTHTDLFLQDPLRGGKDELFDDIVSVIHAEDNDGLTKDSLAPPRKRLVPELLLKLAREISPF

SEQ ID NO: 83165 - protein, 411 aa, Arabidopsis thaliana
  peptide (1)..(411): Ceres Seq. ID no. 12668998
  misc_feature (1)..(411): Homolog of NCBI NO: 22326830 NR Description: Carboxylesterase-like protein; protein id: supported by cDNA: gi_15027944, supported by cDNA: gi_20259180 thaliana] >gi|15027945|gb|AAK76503.1| putative putative
  misc_feature (1)..(411): Homolog of NCBI NO: 11357218 NR Description: Carboxylesterase-like protein - Arabidopsis
  misc_feature (127)..(411): Homolog of NCBI NO: 15232904 NR Description: hypothetical protein; protein id: At3g02410.1 thaliana] >gi|6957704|gb|AAF32448.1| hypothetical protein
  misc_feature (1)..(78): Homolog of NCBI NO: 15232904 NR Description: hypothetical protein; protein id: At3g02410.1 thaliana] >gi|6957704|gb|AAF32448.1| hypothetical protein
  misc_feature (47)..(411): Homolog of NCBI NO: 22329792 NR Description: hypothetical protein; protein id: At1g26120.1, by cDNA: gi_17979291, supported by cDNA: gi_20259110 [Arabidopsis >gi|17979292|gb|AAL49871.1| unknown protein [Arabidopsis
  misc_feature (47)..(411): Homolog of NCBI NO: 25518434 NR Description: hypothetical protein F28B23.20 [imported] - thaliana >gi|12320750|gb|AAG50528.1|AC084221_10 hypothetical [Arabidopsis thaliana] >gi|12321166|gb|AAG50668.1|AC079829_1
  misc_feature (127)..(266): Homolog of NCBI NO: 21231723 NR Description: carboxylesterase [Xanthomonas campestris pv. str. ATCC 33913] >gi|21113426|gb|AAM41564.1| carboxylesterase
  misc_feature (272)..(357): Homolog of NCBI NO: 21231723 NR Description: carboxylesterase [Xanthomonas campestris pv. str. ATCC 33913] >gi|21113426|gb|AAM41564.1| carboxylesterase
  misc_feature (117)..(260): Homolog of NCBI NO: 28871958 NR Description: esterase/lipase/thioesterase family protein syringae pv. tomato str. DC3000] >gi|28855211|gb|AAO58272.1|
  misc_feature (116)..(260): Homolog of NCBI NO: 23470769 NR Description: hypothetical protein [Pseudomonas syringae pv.
MTSTVSEIEEVLPDEDSDRTTLLNGEPLRRRVSGKSPVDEGPRRIFRQQSFGRDIGHAAAETYLITGLSFKLLRYLGVGYRWMTKLLALTCYAMLLMPGFLQVAYSYFFSKQVRRSIVYGDQPRNRLDLYLPSNNDGLKPVVVFVTGGAWIIGYKAWGSLLGMQLAERDIIVACLDYRNFPQGTISDMVTDASQGISFVCNNISAFGGDPNRIYLMGQSAGAHIAACALLEQATKELKGESISWTVSQIKAYFGLSGGYNLYKLVDHFHNRGLYRSIFLSIMEGEESFEKFSPEVRLKDPVVGKAASLLPPIILFHGSSDYSIPCDESKTFTDALQAVGAKAELVLYSGKTHTDLFLQDPLRGGKDELFDDIVSVIHAEDNDGLTKDSLAPPRKRLVPELLLKLAREISPF

SEQ ID NO: 83166 - protein, 329 aa, Arabidopsis thaliana
  peptide (1)..(329): Ceres Seq. ID no. 12668999
  misc_feature (1)..(329): Homolog of NCBI NO: 22326830 NR Description: Carboxylesterase-like protein; protein id: supported by cDNA: gi_15027944, supported by cDNA: gi_20259180 thaliana] >gi|15027945|gb|AAK76503.1| putative putative
  misc_feature (1)..(329): Homolog of NCBI NO: 11357218 NR Description: Carboxylesterase-like protein - Arabidopsis
  misc_feature (45)..(329): Homolog of NCBI NO: 15232904 NR Description: hypothetical protein; protein id: At3g02410.1 thaliana] >gi|6957704|gb|AAF32448.1| hypothetical protein
  misc_feature (1)..(329): Homolog of NCBI NO: 22329792 NR Description: hypothetical protein; protein id: At1g26120.1, by cDNA: gi_17979291, supported by cDNA: gi_20259110 [Arabidopsis >gi|17979292|gb|AAL49871.1| unknown protein [Arabidopsis
  misc_feature (1)..(329): Homolog of NCBI NO: 25518434 NR Description: hypothetical protein F28B23.20 [imported] - thaliana >gi|12320750|gb|AAG50528.1|AC084221_10 hypothetical [Arabidopsis thaliana] >gi|12321166|gb|AAG50668.1|AC079829_1
  misc_feature (45)..(184): Homolog of NCBI NO: 21231723 NR Description: carboxylesterase [Xanthomonas campestris pv. str. ATCC 33913] >gi|21113426|gb|AAM41564.1| carboxylesterase
  misc_feature (190)..(275): Homolog of NCBI NO: 21231723 NR Description: carboxylesterase [Xanthomonas campestris pv. str. ATCC 33913] >gi|21113426|gb|AAM41564.1| carboxylesterase
  misc_feature (35)..(178): Homolog of NCBI NO: 28871958 NR Description: esterase/lipase/thioesterase family protein syringae pv. tomato str. DC3000] >gi|28855211|gb|AAO58272.1|
  misc_feature (34)..(178): Homolog of NCBI NO: 23470769 NR Description: hypothetical protein [Pseudomonas syringae pv.
  misc_feature (32)..(256): Homolog of NCBI NO: 15607361 NR Description: lipC [Mycobacterium tuberculosis H37Rv]
MTKLLALTCYAMLLMPGFLQVAYSYFFSKQVRRSIVYGDQPRNRLDLYLPSNNDGLKPVVVFVTGGAWIIGYKAWGSLLGMQLAERDIIVACLDYRNFPQGTISDMVTDASQGISFVCNNISAFGGDPNRIYLMGQSAGAHIAACALLEQATKELKGESISWTVSQIKAYFGLSGGYNLYKLVDHFHNRGLYRSIFLSIMEGEESFEKFSPEVRLKDPVVGKAASLLPPIILFHGSSDYSIPCDESKTFTDALQAVGAKAELVLYSGKTHTDLFLQDPLRGGKDELFDDIVSVIHAEDNDGLTKDSLAPPRKRLVPELLLKLAREISPF

SEQ ID NO: 83167 - DNA, 1581 bp, Arabidopsis thaliana
  misc_feature (1)..(1581): Ceres Seq. ID no. 12669012
  misc_feature: MA Experiment ID: 20000307 Result: Up-regulated in Transcription
  misc_feature: MA Experiment 20000307 PARAMETER Experiment Name: At_Germinating_Seeds_Sub_P Parameter: Age (hr) Value: 24 vs. 0
  misc_feature: MA Experiment 20000307 PARAMETER Experiment Name: At_Germinating_Seeds_Sub_P Parameter: Organism Value: A. thaliana
  misc_feature: MA Experiment 20000307 PARAMETER Experiment Name: At_Germinating_Seeds_Sub_P Parameter: Plant Line Value: WS
  misc_feature: MA Experiment 20000307 PARAMETER Experiment Name: At_Germinating_Seeds_Sub_P Parameter: Tissue Value: Germinating Seeds
atggagcttcctttgtttgcaatccttcaaagaacaccaagagttgcaattacattagcatttgttctatttgtcctcacaatagttcctgctttatatactctccttgccgatccaatcttacctccatcaatctcatctttcgagactgatcatacacgtctcagtcatttgaattcttcatcaaatcagattccttcacccgtgaatggttccattcccacgccaccctaccatacgccttcaaaacatcggaagtcttctttccatcggattcctaaacccaagaaaggtcccatttcctctccaaccgatcatatacctttaagacaacggagttcttcattcgatcagattccttcacccatgaatagtcccgttcccgctccaccacatcggaattcttcagctgatcagagtccttcacctgtgaacggtcccattcccgctccactcaatcacacgtccttaagacatctgaattcttcatctgatgatcattcatccccagtcaccacatcaccatcaaggacgcggatcagagatgatgagcaaatgtgtgacctttttaccggggagtgggtaccaaacgaagaagctccatactacaccaacacgacatgctgggcaatacatgagcaccagaactgcatgaaatatgggagacctgataccggattcatgagatggaggtggaagccggagagttgcgaccttcccatctttgatcctcaagagttcttggaaatggttagagggaaagccatggggtttgttggtgactccattagcagaaaccaagtccaatctctcttgtgccttctctctagggtggaataccctgaagacatttctccttcaccagatacggatttcaaagtatggaactacacatcctataacttcactcttcatgtcatgtggtcaccatttctagtgaaggctactaaacctgatccgaagtccaacttcttcagcctatacctcgacgaatatgacacgaagtggacgagtcagctcgaccaactcgactacctggttatatcatccggccactggttttcccggccggttattttctatgaaaaccaacaaatctctgggtgccaatactgtgcgttaccaaacacgactgaattgcctttgacctatggatacaggaaggctttaagaatatctctaaaagctataatcgagaatttcaagggtctggcatttttaaggagtttttctcctcaacatttcgaaggtggggcttggaacgaaggaggggactgtgtacggacacaaccttacagaagaaacgagactatacccgaggcagatctcaaggttcacgacattcaaagggaggaatttagagctgcagaagaagatgggatgaagaagagtggtttgagactgaagttaatggacacgacacaggcaatgctattgcgaccagatgggcatcctgggagatatggacatctacagaatccaaatgtgactttaagaaatgactgtattcattggtgcctgcctggacctatcgatactctgaatgatatattgctacaaatgatgaagacagataactag

SEQ ID NO: 83168 - protein, 526 aa, Arabidopsis thaliana
  peptide (1)..(526): Ceres Seq. ID no. 12669013
  misc_feature (354)..(522): Pfam Name: Arabidopsis proteins of unknown function Pfam Description: Arabidopsis proteins of unknown function
  misc_feature (1)..(526): Homolog of NCBI NO: 15237211 NR Description: putative protein; protein id: At5g15890.1
  misc_feature (187)..(525): Homolog of NCBI NO: 15237213 NR Description: putative protein; protein id: At5g15900.1
  misc_feature (146)..(522): Homolog of NCBI NO: 34911880 NR Description: OSJNBb0032K15.17 [Oryza sativa (japonica
  misc_feature (187)..(522): Homolog of NCBI NO: 34911888 NR Description: OSJNBb0032K15.21 [Oryza sativa (japonica
  misc_feature (170)..(522): Homolog of NCBI NO: 34898638 NR Description: contains ESTs to Oryza sativa chromosome 1, OSJNBb0032K15.17~unknown protein
  misc_feature (134)..(522): Homolog of NCBI NO: 30678135 NR Description: expressed protein [Arabidopsis thaliana] unknown protein [Arabidopsis thaliana]
  misc_feature (169)..(520): Homolog of NCBI NO: 15234058 NR Description: hypothetical protein; protein id: At4g01080.1
  misc_feature (169)..(520): Homolog of NCBI NO: 28393189 NR Description: unknown protein [Arabidopsis thaliana]
  misc_feature (81)..(423): Homolog of NCBI NO: 15232907 NR Description: hypothetical protein; protein id: At3g02440.1 thaliana] >gi|6957707|gb|AAF32451.1| hypothetical protein
  misc_feature (201)..(522): Homolog of NCBI NO: 25518737 NR Description: hypothetical protein F6F3.23 [imported] - thaliana >gi|9665154|gb|AAF97338.1|AC023628_19 Unknown protein
MELPLFAILQRTPRVAITLAFVLFVLTIVPALYTLLADPILPPSISSFETDHTRLSHLNSSSNQIPSPVNGSIPTPPYHTPSKHRKSSFHRIPKPKKGPISSPTDHIPLRQRSSSFDQIPSPMNSPVPAPPHRNSSADQSPSPVNGPIPAPLNHTSLRHLNSSSDDHSSPVTTSPSRTRIRDDEQMCDLFTGEWVPNEEAPYYTNTTCWAIHEHQNCMKYGRPDTGFMRWRWKPESCDLPIFDPQEFLEMVRGKAMGFVGDSISRNQVQSLLCLLSRVEYPEDISPSPDTDFKVWNYTSYNFTLHVMWSPFLVKATKPDPKSNFFSLYLDEYDTKWTSQLDQLDYLVISSGHWFSRPVIFYENQQISGCQYCALPNTTELPLTYGYRKALRISLKAIIENFKGLAFLRSFSPQHFEGGAWNEGGDCVRTQPYRRNETIPEADLKVHDIQREEFRAAEEDGMKKSGLRLKLMDTTQAMLLRPDGHPGRYGHLQNPNVTLRNDCIHWCLPGPIDTLNDILLQMMKTDN

SEQ ID NO: 83169 - protein, 404 aa, Arabidopsis thaliana
  peptide (1)..(404): Ceres Seq. ID no. 12669014
  misc_feature (232)..(400): Pfam Name: Arabidopsis proteins of unknown function Pfam Description: Arabidopsis proteins of unknown function
  misc_feature (1)..(404): Homolog of NCBI NO: 15237211 NR Description: putative protein; protein id: At5g15890.1
  misc_feature (65)..(403): Homolog of NCBI NO: 15237213 NR Description: putative protein; protein id: At5g15900.1
  misc_feature (24)..(400): Homolog of NCBI NO: 34911880 NR Description: OSJNBb0032K15.17 [Oryza sativa (japonica
  misc_feature (65)..(400): Homolog of NCBI NO: 34911888 NR Description: OSJNBb0032K15.21 [Oryza sativa (japonica
  misc_feature (48)..(400): Homolog of NCBI NO: 34898638 NR Description: contains ESTs to Oryza sativa chromosome 1, OSJNBb0032K15.17~unknown protein
  misc_feature (12)..(400): Homolog of NCBI NO: 30678135 NR Description: expressed protein [Arabidopsis thaliana] unknown protein [Arabidopsis thaliana]
  misc_feature (47)..(398): Homolog of NCBI NO: 15234058 NR Description: hypothetical protein; protein id: At4g01080.1
  misc_feature (47)..(398): Homolog of NCBI NO: 28393189 NR Description: unknown protein [Arabidopsis thaliana]
  misc_feature (1)..(301): Homolog of NCBI NO: 15232907 NR Description: hypothetical protein; protein id: At3g02440.1 thaliana] >gi|6957707|gb|AAF32451.1| hypothetical protein
  misc_feature (79)..(400): Homolog of NCBI NO: 25518737 NR Description: hypothetical protein F6F3.23 [imported] - thaliana >gi|9665154|gb|AAF97338.1|AC023628_19 Unknown protein
MNSPVPAPPHRNSSADQSPSPVNGPIPAPLNHTSLRHLNSSSDDHSSPVTTSPSRTRIRDDEQMCDLFTGEWVPNEEAPYYTNTTCWAIHEHQNCMKYGRPDTGFMRWRWKPESCDLPIFDPQEFLEMVRGKAMGFVGDSISRNQVQSLLCLLSRVEYPEDISPSPDTDFKVWNYTSYNFTLHVMWSPFLVKATKPDPKSNFFSLYLDEYDTKWTSQLDQLDYLVISSGHWFSRPVIFYENQQISGCQYCALPNTTELPLTYGYRKALRISLKAIIENFKGLAFLRSFSPQHFEGGAWNEGGDCVRTQPYRRNETIPEADLKVHDIQREEFRAAEEDGMKKSGLRLKLMDTTQAMLLRPDGHPGRYGHLQNPNVTLRNDCIHWCLPGPIDTLNDILLQMMKTDN

SEQ ID NO: 83170 - protein, 341 aa, Arabidopsis thaliana
  peptide (1)..(341): Ceres Seq. ID no. 12669015
  misc_feature (169)..(337): Pfam Name: Arabidopsis proteins of unknown function Pfam Description: Arabidopsis proteins of unknown function
  misc_feature (1)..(341): Homolog of NCBI NO: 15237211 NR Description: putative protein; protein id: At5g15890.1
  misc_feature (2)..(340): Homolog of NCBI NO: 15237213 NR Description: putative protein; protein id: At5g15900.1
  misc_feature (1)..(337): Homolog of NCBI NO: 34911880 NR Description: OSJNBb0032K15.17 [Oryza sativa (japonica
  misc_feature (2)..(337): Homolog of NCBI NO: 34911888 NR Description: OSJNBb0032K15.21 [Oryza sativa (japonica
  misc_feature (1)..(337): Homolog of NCBI NO: 34898638 NR Description: contains ESTs to Oryza sativa chromosome 1, OSJNBb0032K15.17~unknown protein
  misc_feature (1)..(337): Homolog of NCBI NO: 30678135 NR Description: expressed protein [Arabidopsis thaliana] unknown protein [Arabidopsis thaliana]
  misc_feature (1)..(335): Homolog of NCBI NO: 15234058 NR Description: hypothetical protein; protein id: At4g01080.1
  misc_feature (1)..(335): Homolog of NCBI NO: 28393189 NR Description: unknown protein [Arabidopsis thaliana]
  misc_feature (1)..(238): Homolog of NCBI NO: 15232907 NR Description: hypothetical protein; protein id: At3g02440.1 thaliana] >gi|6957707|gb|AAF32451.1| hypothetical protein
  misc_feature (16)..(337): Homolog of NCBI NO: 25518737 NR Description: hypothetical protein F6F3.23 [imported] - thaliana >gi|9665154|gb|AAF97338.1|AC023628_19 Unknown protein
MCDLFTGEWVPNEEAPYYTNTTCWAIHEHQNCMKYGRPDTGFMRWRWKPESCDLPIFDPQEFLEMVRGKAMGFVGDSISRNQVQSLLCLLSRVEYPEDISPSPDTDFKVWNYTSYNFTLHVMWSPFLVKATKPDPKSNFFSLYLDEYDTKWTSQLDQLDYLVISSGHWFSRPVIFYENQQISGCQYCALPNTTELPLTYGYRKALRISLKAIIENFKGLAFLRSFSPQHFEGGAWNEGGDCVRTQPYRRNETIPEADLKVHDIQREEFRAAEEDGMKKSGLRLKLMDTTQAMLLRPDGHPGRYGHLQNPNVTLRNDCIHWCLPGPIDTLNDILLQMMKTDN

SEQ ID NO: 83171 - DNA, 990 bp, Arabidopsis thaliana
  misc_feature (1)..(990): Ceres Seq. ID no. 12669022
  misc_feature: MA Experiment ID: 20000328 Result: Down-regulated in Transcription
  misc_feature: MA Experiment 20000328 PARAMETER Experiment Name: At_42deg_Heat_Sub_P Parameter: Age (day) Value: 14
  misc_feature: MA Experiment 20000328 PARAMETER Experiment Name: At_42deg_Heat_Sub_P Parameter: Organism Value: A. thaliana
  misc_feature: MA Experiment 20000328 PARAMETER Experiment Name: At_42deg_Heat_Sub_P Parameter: Plant Line Value: WS
  misc_feature: MA Experiment 20000328 PARAMETER Experiment Name: At_42deg_Heat_Sub_P Parameter: Temperature (deg C) Value: 42 vs. 22
  misc_feature: MA Experiment 20000328 PARAMETER Experiment Name: At_42deg_Heat_Sub_P Parameter: Timepoint (hr) Value: 6
  misc_feature: MA Experiment 20000328 PARAMETER Experiment Name: At_42deg_Heat_Sub_P Parameter: Tissue Value: Aerial
  misc_feature: MA Experiment ID: 20000347 Result: Up-regulated in Transcription
  misc_feature: MA Experiment 20000347 PARAMETER Experiment Name: At_2mM_SA_Sub_P Parameter: Age (day) Value: 14
  misc_feature: MA Experiment 20000347 PARAMETER Experiment Name: At_2mM_SA_Sub_P Parameter: Organism Value: A. thaliana
  misc_feature: MA Experiment 20000347 PARAMETER Experiment Name: At_2mM_SA_Sub_P Parameter: Plant Line Value: WS
  misc_feature: MA Experiment 20000347 PARAMETER Experiment Name: At_2mM_SA_Sub_P Parameter: Timepoint (hr) Value: 6
  misc_feature: MA Experiment 20000347 PARAMETER Experiment Name: At_2mM_SA_Sub_P Parameter: Tissue Value: Aerial
  misc_feature: MA Experiment 20000347 PARAMETER Experiment Name: At_2mM_SA_Sub_P Parameter: Treatment Value: 2mM SA vs. No Treatment
  misc_feature: MA Experiment ID: 20000355 Result: Down-regulated in Transcription
  misc_feature: MA Experiment 20000355 PARAMETER Experiment Name: At_Siliques_Sub_P Parameter: Age (day) Value: 21
  misc_feature: MA Experiment 20000355 PARAMETER Experiment Name: At_Siliques_Sub_P Parameter: Organism Value: A. thaliana
  misc_feature: MA Experiment 20000355 PARAMETER Experiment Name: At_Siliques_Sub_P Parameter: Plant Line Value: WS
  misc_feature: MA Experiment 20000355 PARAMETER Experiment Name: At_Siliques_Sub_P Parameter: Tissue Value: Less Than 5mm Siliques vs. Whole Plant
  misc_feature: MA Experiment ID: 20000440 Result: Down-regulated in Transcription
  misc_feature: MA Experiment 20000440 PARAMETER Experiment Name: At_Closed-Flower__Sub_P Parameter: Tissue Value: Closed Flower vs. Whole Plant
atggatatcaaacaagagttgcaactacaagtacttcaacacaacatgagtgatcaagaactcttcaccaaggcctcgtcattatcatcaccaacatcatccttatcgtcatcatcatggttagggaggagacataataatgatgggaagatggctgtgaaggtggctttcatgttcatgacaggtggaagactcccattggctggcttgtgggaaaagttctttgaaggacatgaagggttttattccatatatgttcatactaatccatcttttcaagattctttccccgaaacttccgtcttctattcaagaagaatcccaagtcagccggtgtattggggaacatcatcaatggtagacgcagagaaaagactattagccaacgcacttctcgacgaatccaaccaaagattcgtcctcttgtccgattcttgcatcccactctacaatttcacaaccatctacgattacttaaccggcaccaatctcagcttcattggctcattcgacgacccaagaaaatccggtagaggccgttacaaccacacaatgtatccacacatcaacatcacacattggagaaaaggatcacagtggtttgaaacaactcgagaacttgctcttcatataatcgaagacacggtttactacaaaatattcgatcaacattgtaaaccgccttgttacatggacgagcattatatcccaactctcgttcacatgttgcatggagagatgagcgctaaccggaccttgacgtgggttgattggtccaaagctggtccacatcctggccggtttatttggcctgatataaccgatgagtttcttaaccgaatccggtttaaggaggagtgtgtctattttggccgtggtggagagaatgttacaacttccaagtgttttttatttgcgaggaaatttacagccgaaactttagaaccattgttaagaatttcgccaatagttcttggttttggtccatag

SEQ ID NO: 83172 - protein, 329 aa, Arabidopsis thaliana
  peptide (1)..(329): Ceres Seq. ID no. 12669023
  misc_feature (90)..(201): Pfam Name: Arabidopsis protein of unknown function, DUF266 Pfam Description: Arabidopsis protein of unknown function, DUF266
  misc_feature (1)..(329): Homolog of NCBI NO: 15237293 NR Description: putative protein; protein id: At5g16170.1
  misc_feature (11)..(327): Homolog of NCBI NO: 15239155 NR Description: putative protein; protein id: At5g11730.1, by cDNA: gi_20260569 [Arabidopsis thaliana]
  misc_feature (12)..(327): Homolog of NCBI NO: 15218485 NR Description: unknown protein; protein id: At1g10280.1 thaliana] >gi|4914330|gb|AAD32878.1|AC005489_16 F14N23.16
  misc_feature (54)..(295): Homolog of NCBI NO: 15220232 NR Description: hypothetical protein; protein id: At1g10880.1
  misc_feature (14)..(327): Homolog of NCBI NO: 17473869 NR Description: unknown protein [Arabidopsis thaliana]
  misc_feature (9)..(325): Homolog of NCBI NO: 15239557 NR Description: putative protein; protein id: At5g25970.1 thaliana] >gi|5107829|gb|AAD40142.1|AF149413_23 contains to several Arabidopsis thaliana hypothetical proteins including
  misc_feature (14)..(327): Homolog of NCBI NO: 15219555 NR Description: hypothetical protein; protein id: At1g73810.1, by cDNA: gi_17473868 [Arabidopsis thaliana]
  misc_feature (50)..(327): Homolog of NCBI NO: 18402952 NR Description: expressed protein; protein id: At3g21310.1,
  misc_feature (50)..(327): Homolog of NCBI NO: 21554566 NR Description: unknown [Arabidopsis thaliana]
  misc_feature (12)..(327): Homolog of NCBI NO: 15221386 NR Description: hypothetical protein; protein id: At1g68390.1
MDIKQELQLQVLQHNMSDQELFTKASSLSSPTSSLSSSSWLGRRHNNDGKMAVKVAFMFMTGGRLPLAGLWEKFFEGHEGFYSIYVHTNPSFQDSFPETSVFYSRRIPSQPVYWGTSSMVDAEKRLLANALLDESNQRFVLLSDSCIPLYNFTTIYDYLTGTNLSFIGSFDDPRKSGRGRYNHTMYPHINITHWRKGSQWFETTRELALHIIEDTVYYKIFDQHCKPPCYMDEHYIPTLVHMLHGEMSANRTLTWVDWSKAGPHPGRFIWPDITDEFLNRIRFKEECVYFGRGGENVTTSKCFLFARKFTAETLEPLLRISPIVLGFGP

SEQ ID NO: 83173 - protein, 314 aa, Arabidopsis thaliana
  peptide (1)..(314): Ceres Seq. ID no. 12669024
  misc_feature (75)..(186): Pfam Name: Arabidopsis protein of unknown function, DUF266 Pfam Description: Arabidopsis protein of unknown function, DUF266
  misc_feature (1)..(314): Homolog of NCBI NO: 15237293 NR Description: putative protein; protein id: At5g16170.1
  misc_feature (1)..(312): Homolog of NCBI NO: 15239155 NR Description: putative protein; protein id: At5g11730.1, by cDNA: gi_20260569 [Arabidopsis thaliana]
  misc_feature (1)..(312): Homolog of NCBI NO: 15218485 NR Description: unknown protein; protein id: At1g10280.1 thaliana] >gi|4914330|gb|AAD32878.1|AC005489_16 F14N23.16
  misc_feature (39)..(280): Homolog of NCBI NO: 15220232 NR Description: hypothetical protein; protein id: At1g10880.1
  misc_feature (1)..(312): Homolog of NCBI NO: 17473869 NR Description: unknown protein [Arabidopsis thaliana]
  misc_feature (1)..(310): Homolog of NCBI NO: 15239557 NR Description: putative protein; protein id: At5g25970.1 thaliana] >gi|5107829|gb|AAD40142.1|AF149413_23 contains to several Arabidopsis thaliana hypothetical proteins including
  misc_feature (1)..(312): Homolog of NCBI NO: 15219555 NR Description: hypothetical protein; protein id: At1g73810.1, by cDNA: gi_17473868 [Arabidopsis thaliana]
  misc_feature (35)..(312): Homolog of NCBI NO: 18402952 NR Description: expressed protein; protein id: At3g21310.1,
  misc_feature (35)..(312): Homolog of NCBI NO: 21554566 NR Description: unknown [Arabidopsis thaliana]
  misc_feature (1)..(312): Homolog of NCBI NO: 15221386 NR Description: hypothetical protein; protein id: At1g68390.1
MSDQELFTKASSLSSPTSSLSSSSWLGRRHNNDGKMAVKVAFMFMTGGRLPLAGLWEKFFEGHEGFYSIYVHTNPSFQDSFPETSVFYSRRIPSQPVYWGTSSMVDAEKRLLANALLDESNQRFVLLSDSCIPLYNFTTIYDYLTGTNLSFIGSFDDPRKSGRGRYNHTMYPHINITHWRKGSQWFETTRELALHIIEDTVYYKIFDQHCKPPCYMDEHYIPTLVHMLHGEMSANRTLTWVDWSKAGPHPGRFIWPDITDEFLNRIRFKEECVYFGRGGENVTTSKCFLFARKFTAETLEPLLRISPIVLGFGP

SEQ ID NO: 83174 - protein, 279 aa, Arabidopsis thaliana
  peptide (1)..(279): Ceres Seq. ID no. 12669025
  misc_feature (40)..(151): Pfam Name: Arabidopsis protein of unknown function, DUF266 Pfam Description: Arabidopsis protein of unknown function, DUF266
  misc_feature (1)..(279): Homolog of NCBI NO: 15237293 NR Description: putative protein; protein id: At5g16170.1
  misc_feature (1)..(277): Homolog of NCBI NO: 15239155 NR Description: putative protein; protein id: At5g11730.1, by cDNA: gi_20260569 [Arabidopsis thaliana]
  misc_feature (1)..(277): Homolog of NCBI NO: 15218485 NR Description: unknown protein; protein id: At1g10280.1 thaliana] >gi|4914330|gb|AAD32878.1|AC005489_16 F14N23.16
  misc_feature (4)..(245): Homolog of NCBI NO: 15220232 NR Description: hypothetical protein; protein id: At1g10880.1
  misc_feature (1)..(277): Homolog of NCBI NO: 17473869 NR Description: unknown protein [Arabidopsis thaliana]
  misc_feature (1)..(275): Homolog of NCBI NO: 15239557 NR Description: putative protein; protein id: At5g25970.1 thaliana] >gi|5107829|gb|AAD40142.1|AF149413_23 contains to several Arabidopsis thaliana hypothetical proteins including
  misc_feature (1)..(277): Homolog of NCBI NO: 15219555 NR Description: hypothetical protein; protein id: At1g73810.1, by cDNA: gi_17473868 [Arabidopsis thaliana]
  misc_feature (1)..(277): Homolog of NCBI NO: 18402952 NR Description: expressed protein; protein id: At3g21310.1,
  misc_feature (1)..(277): Homolog of NCBI NO: 21554566 NR Description: unknown [Arabidopsis thaliana]
  misc_feature (1)..(277): Homolog of NCBI NO: 15221386 NR Description: hypothetical protein; protein id: At1g68390.1
MAVKVAFMFMTGGRLPLAGLWEKFFEGHEGFYSIYVHTNPSFQDSFPETSVFYSRRIPSQPVYWGTSSMVDAEKRLLANALLDESNQRFVLLSDSCIPLYNFTTIYDYLTGTNLSFIGSFDDPRKSGRGRYNHTMYPHINITHWRKGSQWFETTRELALHIIEDTVYYKIFDQHCKPPCYMDEHYIPTLVHMLHGEMSANRTLTWVDWSKAGPHPGRFIWPDITDEFLNRIRFKEECVYFGRGGENVTTSKCFLFARKFTAETLEPLLRISPIVLGFGP

SEQ ID NO: 83175 - DNA, 1652 bp, Arabidopsis thaliana
  misc_feature (1)..(1652): Ceres Seq. ID no. 12669034
  misc_feature: MA Experiment ID: 20000184 Result: Up-regulated in Transcription
  misc_feature: MA Experiment 20000184 PARAMETER Experiment Name: At_Shoots__P Parameter: Age (day) Value: 7
  misc_feature: MA Experiment 20000184 PARAMETER Experiment Name: At_Shoots__P Parameter: Tissue Value: Shoots vs. Whole Plant
  misc_feature: MA Experiment ID: 20000265 Result: Up-regulated in Transcription
  misc_feature: MA Experiment 20000265 PARAMETER Experiment Name: At_Open_Flower_P Parameter: Age (day) Value: 21
  misc_feature: MA Experiment 20000265 PARAMETER Experiment Name: At_Open_Flower_P Parameter: Plant Line Value: WS
  misc_feature: MA Experiment 20000265 PARAMETER Experiment Name: At_Open_Flower_P Parameter: Tissue Value: Closed Flower vs. Whole Plant
  misc_feature: MA Experiment ID: 20000286 Result: Up-regulated in Transcription
  misc_feature: MA Experiment 20000286 PARAMETER Experiment Name: At_Open_Flower_P Parameter: Age (day) Value: 21
  misc_feature: MA Experiment 20000286 PARAMETER Experiment Name: At_Open_Flower_P Parameter: Plant Line Value: WS
  misc_feature: MA Experiment 20000286 PARAMETER Experiment Name: At_Open_Flower_P Parameter: Tissue Value: Half Open vs. Whole Plant
acgttccagagagttttctgaaattgatcgttttggttcttcacctttccttttctttgctttctgcttcctcccttaaatacatttcactctgttatcatcgatttttttttcttatatctcaatcttattttgtttgtcttttctccatttttgtttcgttaagaagaaacaatggttatggctatggatcggatcgctttgttctcttcctcatcatctgtttatcatcacggttcttctcattctcatggctccaaatcttccagagttttcactattcgttccgactctacagcggttggaaggaaactgtatattcctcctcgagaggttcatcttcaagtgaagtattcaatgccaccacaaaagctggagattttcaagtccttagaaggatgggctaatgacaacttgttggcttacttaaaacctgttgagaaatcatggcaaccaactgattttctccctgaacctgagtcagaaggattctatgaccaagttaaggagttaagagaaaggtgtaaggagctctctgatgactaccttatagtgcttgttggtgatatgatcacagaggaagcacttccgacttatcagaccatgattaatacattggacggggttagagatgagacgggagcaagtccaactccttgggcagtatggactagggcatggactgcggaagagaatagacatggtgatcttcttaacaagtacctttatctgtctggacgagtagacatgagacagattgaaaaaactattcaatacctcattggttctggaatggatccaaaaactgaaaacaatccttacttgggattcatatatacttcttttcaagaaagagctacattcatctcccatggaaacactgctagactggcaaaggatcttggagacttgacacttgggaagatttgtggcaccattgctgctgatgagaggcgccatgaacacgcctacaccaagattgtagagaagctctttgaaattgatcctgataccacagtcgtgggctttgctgacatgatgaggaaaaagatctcgatgcctgctcatttgatgtatgatggtcgtgatgataatctatttgatcacttctcgtccgtggcccagaggcttggtgtctacactgccaaggactatgctgatatactgcaacatcttgtggaaaggtggaatgtggagaagttgtcagacctttctagtgaaggaaacagggcccaggactacctctgtggattacctgctagaatccgcaaacttgaagagagggctcaagggagaaccaaagaagcagcaaaaaacataccattcagctggatttttggtcgagaagtcagggcttaaaagaagtaatgttaagcaattaattcttccatattataatcccaagcaagctataaaagatcttcaccaacaccttgatgaagaagccagaagtatgttatgttggaaacgtgtgtagataaagtatgtgttagactttgctttgtttggatcacttaaatgacttactccaaagaatttgctttgttttgacgattttatttatttatttctgcacctctatttgttgctagtattgaatccacttctgtaatgttttctcttcttctgaatccaataagatatttaaaaag

SEQ ID NO: 83176 - protein, 394 aa, Arabidopsis thaliana
  peptide (1)..(394): Ceres Seq. ID no. 12669035
  misc_feature (1)..(394): Homolog of NCBI NO: 15237308 NR Description: stearoyl-acyl carrier protein desaturase; protein At5g16240.1, supported by cDNA: 41275., supported by cDNA: supported by cDNA: gi_19699237 [Arabidopsis thaliana] Arabidopsis
  misc_feature (1)..(394): Homolog of NCBI NO: 21593675 NR Description: stearoyl-acyl carrier protein desaturase
  misc_feature (1)..(394): Homolog of NCBI NO: 15232943 NR Description: putative stearoyl-acyl carrier protein protein id: At3g02630.1, supported by cDNA: 33739., supported by gi_20466635 [Arabidopsis thaliana] >gi|6957726|gb|AAF32470.1|
  misc_feature (1)..(394): Homolog of NCBI NO: 20466636 NR Description: putative stearoyl-acyl carrier protein desaturase
  misc_feature (1)..(394): Homolog of NCBI NO: 21592896 NR Description: putative stearoyl-acyl carrier protein desaturase
  misc_feature (1)..(392): Homolog of NCBI NO: 3355632 NR Description: stearoyl-acyl carrier protein desaturase [Linum
  misc_feature (1)..(392): Homolog of NCBI NO: 3355634 NR Description: stearoyl-acyl carrier protein desaturase [Linum
  misc_feature (35)..(393): Homolog of NCBI NO: 575942 NR Description: stearoyl-acyl carrier protein desaturase [Sesamum
  misc_feature (1)..(393): Homolog of NCBI NO: 7433271 NR Description: acyl-[acyl-carrier-protein] desaturase (EC
  misc_feature (35)..(393): Homolog of NCBI NO: 417820 NR Description: Acyl-[acyl-carrier protein] desaturase,
MVMAMDRIALFSSSSSVYHHGSSHSHGSKSSRVFTIRSDSTAVGRKLYIPPREVHLQVKYSMPPQKLEIFKSLEGWANDNLLAYLKPVEKSWQPTDFLPEPESEGFYDQVKELRERCKELSDDYLIVLVGDMITEEALPTYQTMINTLDGVRDETGASPTPWAVWTRAWTAEENRHGDLLNKYLYLSGRVDMRQIEKTIQYLIGSGMDPKTENNPYLGFIYTSFQERATFISHGNTARLAKDLGDLTLGKICGTIAADERRHEHAYTKIVEKLFEIDPDTTVVGFADMMRKKISMPAHLMYDGRDDNLFDHFSSVAQRLGVYTAKDYADILQHLVERWNVEKLSDLSSEGNRAQDYLCGLPARIRKLEERAQGRTKEAAKNIPFSWIFGREVRA

SEQ ID NO: 83177 - protein, 392 aa, Arabidopsis thaliana
  peptide (1)..(392): Ceres Seq. ID no. 12669036
  misc_feature (1)..(392): Homolog of NCBI NO: 15237308 NR Description: stearoyl-acyl carrier protein desaturase; protein At5g16240.1, supported by cDNA: 41275., supported by cDNA: supported by cDNA: gi_19699237 [Arabidopsis thaliana] Arabidopsis
  misc_feature (1)..(392): Homolog of NCBI NO: 21593675 NR Description: stearoyl-acyl carrier protein desaturase
  misc_feature (1)..(392): Homolog of NCBI NO: 15232943 NR Description: putative stearoyl-acyl carrier protein protein id: At3g02630.1, supported by cDNA: 33739., supported by gi_20466635 [Arabidopsis thaliana] >gi|6957726|gb|AAF32470.1|
  misc_feature (1)..(392): Homolog of NCBI NO: 20466636 NR Description: putative stearoyl-acyl carrier protein desaturase
  misc_feature (1)..(392): Homolog of NCBI NO: 21592896 NR Description: putative stearoyl-acyl carrier protein desaturase
  misc_feature (1)..(390): Homolog of NCBI NO: 3355632 NR Description: stearoyl-acyl carrier protein desaturase [Linum
  misc_feature (1)..(390): Homolog of NCBI NO: 3355634 NR Description: stearoyl-acyl carrier protein desaturase [Linum
  misc_feature (33)..(391): Homolog of NCBI NO: 575942 NR Description: stearoyl-acyl carrier protein desaturase [Sesamum
  misc_feature (1)..(391): Homolog of NCBI NO: 7433271 NR Description: acyl-[acyl-carrier-protein] desaturase (EC
  misc_feature (33)..(391): Homolog of NCBI NO: 417820 NR Description: Acyl-[acyl-carrier protein] desaturase,
MAMDRIALFSSSSSVYHHGSSHSHGSKSSRVFTIRSDSTAVGRKLYIPPREVHLQVKYSMPPQKLEIFKSLEGWANDNLLAYLKPVEKSWQPTDFLPEPESEGFYDQVKELRERCKELSDDYLIVLVGDMITEEALPTYQTMINTLDGVRDETGASPTPWAVWTRAWTAEENRHGDLLNKYLYLSGRVDMRQIEKTIQYLIGSGMDPKTENNPYLGFIYTSFQERATFISHGNTARLAKDLGDLTLGKICGTIAADERRHEHAYTKIVEKLFEIDPDTTVVGFADMMRKKISMPAHLMYDGRDDNLFDHFSSVAQRLGVYTAKDYADILQHLVERWNVEKLSDLSSEGNRAQDYLCGLPARIRKLEERAQGRTKEAAKNIPFSWIFGREVRA

SEQ ID NO: 83178 - protein, 390 aa, Arabidopsis thaliana
  peptide (1)..(390): Ceres Seq. ID no. 12669037
  misc_feature (1)..(390): Homolog of NCBI NO: 15237308 NR Description: stearoyl-acyl carrier protein desaturase; protein At5g16240.1, supported by cDNA: 41275., supported by cDNA: supported by cDNA: gi_19699237 [Arabidopsis thaliana] Arabidopsis
  misc_feature (1)..(390): Homolog of NCBI NO: 21593675 NR Description: stearoyl-acyl carrier protein desaturase
  misc_feature (1)..(390): Homolog of NCBI NO: 15232943 NR Description: putative stearoyl-acyl carrier protein protein id: At3g02630.1, supported by cDNA: 33739., supported by gi_20466635 [Arabidopsis thaliana] >gi|6957726|gb|AAF32470.1|
  misc_feature (1)..(390): Homolog of NCBI NO: 20466636 NR Description: putative stearoyl-acyl carrier protein desaturase
  misc_feature (1)..(390): Homolog of NCBI NO: 21592896 NR Description: putative stearoyl-acyl carrier protein desaturase
  misc_feature (1)..(388): Homolog of NCBI NO: 3355632 NR Description: stearoyl-acyl carrier protein desaturase [Linum
  misc_feature (1)..(388): Homolog of NCBI NO: 3355634 NR Description: stearoyl-acyl carrier protein desaturase [Linum
  misc_feature (31)..(389): Homolog of NCBI NO: 575942 NR Description: stearoyl-acyl carrier protein desaturase [Sesamum
  misc_feature (1)..(389): Homolog of NCBI NO: 7433271 NR Description: acyl-[acyl-carrier-protein] desaturase (EC
  misc_feature (31)..(389): Homolog of NCBI NO: 417820 NR Description: Acyl-[acyl-carrier protein] desaturase,
MDRIALFSSSSSVYHHGSSHSHGSKSSRVFTIRSDSTAVGRKLYIPPREVHLQVKYSMPPQKLEIFKSLEGWANDNLLAYLKPVEKSWQPTDFLPEPESEGFYDQVKELRERCKELSDDYLIVLVGDMITEEALPTYQTMINTLDGVRDETGASPTPWAVWTRAWTAEENRHGDLLNKYLYLSGRVDMRQIEKTIQYLIGSGMDPKTENNPYLGFIYTSFQERATFISHGNTARLAKDLGDLTLGKICGTIAADERRHEHAYTKIVEKLFEIDPDTTVVGFADMMRKKISMPAHLMYDGRDDNLFDHFSSVAQRLGVYTAKDYADILQHLVERWNVEKLSDLSSEGNRAQDYLCGLPARIRKLEERAQGRTKEAAKNIPFSWIFGREVRA

SEQ ID NO: 83179 - DNA, 2046 bp, Arabidopsis thaliana
  misc_feature (1)..(2046): Ceres Seq. ID no. 12669064
  misc_feature: MA Experiment ID: 20000173 Result: Down-regulated in Transcription
  misc_feature: MA Experiment 20000173 PARAMETER Experiment Name: At_42deg_Heat_P Parameter: Age (day) Value: 14
  misc_feature: MA Experiment 20000173 PARAMETER Experiment Name: At_42deg_Heat_P Parameter: Organism Value: A. thaliana
  misc_feature: MA Experiment 20000173 PARAMETER Experiment Name: At_42deg_Heat_P Parameter: Plant Line Value: WS
  misc_feature: MA Experiment 20000173 PARAMETER Experiment Name: At_42deg_Heat_P Parameter: Temperature (deg C) Value: 42 vs. 22
  misc_feature: MA Experiment 20000173 PARAMETER Experiment Name: At_42deg_Heat_P Parameter: Timepoint (hr) Value: 6
  misc_feature: MA Experiment 20000173 PARAMETER Experiment Name: At_42deg_Heat_P Parameter: Tissue Value: Aerial
  misc_feature: MA Experiment ID: 20000184 Result: Down-regulated in Transcription
  misc_feature: MA Experiment 20000184 PARAMETER Experiment Name: At_Shoots__P Parameter: Age (day) Value: 7
  misc_feature: MA Experiment 20000184 PARAMETER Experiment Name: At_Shoots__P Parameter: Tissue Value: Shoots vs. Whole Plant
  misc_feature: MA Experiment ID: 20000185 Result: Down-regulated in Transcription
  misc_feature: MA Experiment 20000185 PARAMETER Experiment Name: At_Roots__P Parameter: Age (day) Value: 7 vs. 21
  misc_feature: MA Experiment 20000185 PARAMETER Experiment Name: At_Roots__P Parameter: Organism Value: A. thaliana
  misc_feature: MA Experiment 20000185 PARAMETER Experiment Name: At_Roots__P Parameter: Tissue Value: Roots vs. Whole Plant
  misc_feature: MA Experiment ID: 20000234 Result: Down-regulated in Transcription
  misc_feature: MA Experiment 20000234 PARAMETER Experiment Name: At_Siliques_P Parameter: Age (day) Value: 21
  misc_feature: MA Experiment 20000234 PARAMETER Experiment Name: At_Siliques_P Parameter: Organism Value: A. thaliana
  misc_feature: MA Experiment 20000234 PARAMETER Experiment Name: At_Siliques_P Parameter: Plant Line Value: WS
  misc_feature: MA Experiment 20000234 PARAMETER Experiment Name: At_Siliques_P Parameter: Tissue Value: Less Than 5mm Siliques vs. Whole Plant
  misc_feature: MA Experiment ID: 20001555 Result: Down-regulated in Transcription
  misc_feature: MA Experiment 20001555 PARAMETER Experiment Name: At_Drought_Soil_Dry_P Parameter: Age (day) Value: 24
  misc_feature: MA Experiment 20001555 PARAMETER Experiment Name: At_Drought_Soil_Dry_P Parameter: Organism Value: A. thaliana
  misc_feature: MA Experiment 20001555 PARAMETER Experiment Name: At_Drought_Soil_Dry_P Parameter: Plant Line Value: WS
  misc_feature: MA Experiment 20001555 PARAMETER Experiment Name: At_Drought_Soil_Dry_P Parameter: Post Timepoint (hr) Value: None
  misc_feature: MA Experiment 20001555 PARAMETER Experiment Name: At_Drought_Soil_Dry_P Parameter: Post-Treatment Value: None
  misc_feature: MA Experiment 20001555 PARAMETER Experiment Name: At_Drought_Soil_Dry_P Parameter: Timepoint (day) Value: 10
  misc_feature: MA Experiment 20001555 PARAMETER Experiment Name: At_Drought_Soil_Dry_P Parameter: Treatment Value: Drought vs. No Drought
  misc_feature: MA Experiment ID: 20001556 Result: Down-regulated in Transcription
  misc_feature: MA Experiment 20001556 PARAMETER Experiment Name: At_Drought_Soil_Dry_P Parameter: Age (day) Value: 26
  misc_feature: MA Experiment 20001556 PARAMETER Experiment Name: At_Drought_Soil_Dry_P Parameter: Organism Value: A. thaliana
  misc_feature: MA Experiment 20001556 PARAMETER Experiment Name: At_Drought_Soil_Dry_P Parameter: Plant Line Value: WS
  misc_feature: MA Experiment 20001556 PARAMETER Experiment Name: At_Drought_Soil_Dry_P Parameter: Post Timepoint (hr) Value: None
  misc_feature: MA Experiment 20001556 PARAMETER Experiment Name: At_Drought_Soil_Dry_P Parameter: Post-Treatment Value: None
  misc_feature: MA Experiment 20001556 PARAMETER Experiment Name: At_Drought_Soil_Dry_P Parameter: Timepoint (day) Value: 12
  misc_feature: MA Experiment 20001556 PARAMETER Experiment Name: At_Drought_Soil_Dry_P Parameter: Treatment Value: Drought vs. No Drought
  misc_feature: MA Experiment ID: 20001560 Result: Down-regulated in Transcription
  misc_feature: MA Experiment 20001560 PARAMETER Experiment Name: At_Drought_Soil_Dry_P Parameter: Age (day) Value: 28
  misc_feature: MA Experiment 20001560 PARAMETER Experiment Name: At_Drought_Soil_Dry_P Parameter: Organism Value: A. thaliana
  misc_feature: MA Experiment 20001560 PARAMETER Experiment Name: At_Drought_Soil_Dry_P Parameter: Plant Line Value: WS
  misc_feature: MA Experiment 20001560 PARAMETER Experiment Name: At_Drought_Soil_Dry_P Parameter: Post Timepoint (hr) Value: None
  misc_feature: MA Experiment 20001560 PARAMETER Experiment Name: At_Drought_Soil_Dry_P Parameter: Post-Treatment Value: None
  misc_feature: MA Experiment 20001560 PARAMETER Experiment Name: At_Drought_Soil_Dry_P Parameter: Timepoint (day) Value: 14
  misc_feature: MA Experiment 20001560 PARAMETER Experiment Name: At_Drought_Soil_Dry_P Parameter: Treatment Value: Drought vs. No Drought
gtttcttcaagaagatcatcactcaacttctctctcttcttctaagcttctctttaacttcatctctctcactttctcctttctttctgagatatagagagagaaagagaacaaaaaaaatatcaaatctttcagacacccttttgacttctttgcctaaagaatctctctgctttctcttctccttagagaaaatcattttaaattcctaagcaaaaccctcaggagaaaaaaaaaacaaaagaatagtcatcatcatcatcaccatcatcatccttatcatcatcaacaacttcagtggcagcaatagcaagagaaaggtttctttaattatgtctatggaaggtgtttttctagagaaaaccaaaacaaacacaacaactactctccctgatctatctctccacatcagtctcccagatattcatcaataccatcacaatgaatcttctaaagaatcttcaagaagatcctcccaactcgaaaacaacaaccgatcgtccaactttgaactctctttatctcatcataaccatccaacagcaagaatcttccattgtcctgatcgaagaacccttaatcttcctcatcagcagcattacaacaaccctatcatcaatggtgttcatcaaagggtcgatgaatccgagattagtaatctccaccgtccaattagaggcatcccggtctatcacaaccgttcattccctttccaccaacaaaactcttcattaccttctcttggaggaggagacatggatcaaatctcaatcttaaactcatcttccggctacaacaacgcttaccgatcattacaatcttccccgaggcttaaaggtgttcctttgcatcatcatcatcatcataatcagtatggagtcgttggatcttcagattcgtcttctcctcatcaccataaccatcatcatcatgggatgatcagatcaagattcttgcctaagatgccgacaaagcgaagcatgagagctccaaggatgcgttggactagtagcctccacgcgcggtttgttcacgctgttgagcttctaggcggccatgaaagagcaactccaaagtcggttcttgagctcatggatgtaaaagacttaactttagcacatgtgaagagccatttgcagatgtatcgaactgttaagaccactaacaagcctgctgcttcatcagatgggtcaggagaagaagaaatgggcataaatggaaacgaagttcatcatcaatcatcgacggatcaaagggcacaatctgatgatacttctcttcatcaagaaactgacatttcttccacacaacctcgttggagtaactcttcacgagagacatggccattaagtaataactgctcaagcgacatagatacaatgatcagaacttcatcaacatcaatgatctctcattatcaaagatccagcattcaaaatcaggagcaaaggtcgaatgatcaagcaaagaggtgtggaaatcttagttgtgaaaatccaagtttggagtttacattaggcagaccagattggcacgagaaatgactttcttgatcaatttggatttttatatatattggattttttatttttttgtttcatctttctctctctatatatactcagaaacatgtatgcagtatatatctttgtgacgatgaaattctcagcgtaaaagaaggagaacacgtagagagccaagctgctcaagagtgttgatttttgcacagagagagagaatatcactaccaaaatgaagaaatttggaggttcctcttctcaagttccattgatgatttgattataaagtggatgatcaatgtatgagtttttgtttttgggttttcgggtttttagttttttgaggttgatctggtggtgtgatcataagttatataattggaagatcatcaaaatgtggtgaaagtttggatatttttttgaaagcctcttggttggctagagggtttcaagtttttttttttttttttgcagccgaaatgtagagagagggagagatctgagttgagatttcatatggatactg

SEQ ID NO: 83180 - protein, 403 aa, Arabidopsis thaliana
  peptide (1)..(403): Ceres Seq. ID no. 12669065
  misc_feature (221)..(272): Pfam Name: Myb-like DNA-binding domain Pfam Description: Myb-like DNA-binding domain
  misc_feature (1)..(403): Homolog of NCBI NO: 18418011 NR Description: putative protein; protein id: At5g16560.1, by cDNA: gi_14345994, supported by cDNA: gi_15723590 [Arabidopsis >gi|14345995|gb|AAK59989.1| KANADI protein [Arabidopsis thaliana]
  misc_feature (1)..(270): Homolog of NCBI NO: 9759140 NR Description: gb|AAD20098.1~gene_id:MQK4.31~similar to unknown
  misc_feature (20)..(397): Homolog of NCBI NO: 18398337 NR Description: expressed protein; protein id: At1g32240.1, by cDNA: gi_15723594 [Arabidopsis thaliana]
  misc_feature (201)..(357): Homolog of NCBI NO: 29837235 NR Description: OSJNBb0032E15.1 [Oryza sativa (japonica
  misc_feature (167)..(306): Homolog of NCBI NO: 34905232 NR Description: P0672D01.18 [Oryza sativa (japonica
  misc_feature (130)..(353): Homolog of NCBI NO: 15239014 NR Description: putative protein; protein id: At5g42630.1, by cDNA: 114074., supported by cDNA: gi_15723592 [Arabidopsis >gi|10177141|dbj|BAB10501.1|
  misc_feature (197)..(353): Homolog of NCBI NO: 18414945 NR Description: Expressed protein; protein id: At4g17695.1,
  misc_feature (344)..(403): Homolog of NCBI NO: 14345997 NR Description: KANADI protein [Arabidopsis thaliana]
  misc_feature (214)..(293): Homolog of NCBI NO: 40737024 NR Description: putative transfactor [Oryza sativa (japonica
  misc_feature (212)..(312): Homolog of NCBI NO: 7527727 NR Description: T5E21.10 [Arabidopsis thaliana]
MSMEGVFLEKTKTNTTTTLPDLSLHISLPDIHQYHHNESSKESSRRSSQLENNNRSSNFELSLSHHNHPTARIFHCPDRRTLNLPHQQHYNNPIINGVHQRVDESEISNLHRPIRGIPVYHNRSFPFHQQNSSLPSLGGGDMDQISILNSSSGYNNAYRSLQSSPRLKGVPLHHHHHHNQYGVVGSSDSSSPHHHNHHHHGMIRSRFLPKMPTKRSMRAPRMRWTSSLHARFVHAVELLGGHERATPKSVLELMDVKDLTLAHVKSHLQMYRTVKTTNKPAASSDGSGEEEMGINGNEVHHQSSTDQRAQSDDTSLHQETDISSTQPRWSNSSRETWPLSNNCSSDIDTMIRTSSTSMISHYQRSSIQNQEQRSNDQAKRCGNLSCENPSLEFTLGRPDWHEK

SEQ ID NO: 83181 - protein, 401 aa, Arabidopsis thaliana
  peptide (1)..(401): Ceres Seq. ID no. 12669066
  misc_feature (219)..(270): Pfam Name: Myb-like DNA-binding domain Pfam Description: Myb-like DNA-binding domain
  misc_feature (1)..(401): Homolog of NCBI NO: 18418011 NR Description: putative protein; protein id: At5g16560.1, by cDNA: gi_14345994, supported by cDNA: gi_15723590 [Arabidopsis >gi|14345995|gb|AAK59989.1| KANADI protein [Arabidopsis thaliana]
  misc_feature (1)..(268): Homolog of NCBI NO: 9759140 NR Description: gb|AAD20098.1~gene_id:MQK4.31~similar to unknown
  misc_feature (18)..(395): Homolog of NCBI NO: 18398337 NR Description: expressed protein; protein id: At1g32240.1, by cDNA: gi_15723594 [Arabidopsis thaliana]
  misc_feature (199)..(355): Homolog of NCBI NO: 29837235 NR Description: OSJNBb0032E15.1 [Oryza sativa (japonica
  misc_feature (165)..(304): Homolog of NCBI NO: 34905232 NR Description: P0672D01.18 [Oryza sativa (japonica
  misc_feature (128)..(351): Homolog of NCBI NO: 15239014 NR Description: putative protein; protein id: At5g42630.1, by cDNA: 114074., supported by cDNA: gi_15723592 [Arabidopsis >gi|10177141|dbj|BAB10501.1|
  misc_feature (195)..(351): Homolog of NCBI NO: 18414945 NR Description: Expressed protein; protein id: At4g17695.1,
  misc_feature (342)..(401): Homolog of NCBI NO: 14345997 NR Description: KANADI protein [Arabidopsis thaliana]
  misc_feature (212)..(291): Homolog of NCBI NO: 40737024 NR Description: putative transfactor [Oryza sativa (japonica
  misc_feature (210)..(310): Homolog of NCBI NO: 7527727 NR Description: T5E21.10 [Arabidopsis thaliana]
MEGVFLEKTKTNTTTTLPDLSLHISLPDIHQYHHNESSKESSRRSSQLENNNRSSNFELSLSHHNHPTARIFHCPDRRTLNLPHQQHYNNPIINGVHQRVDESEISNLHRPIRGIPVYHNRSFPFHQQNSSLPSLGGGDMDQISILNSSSGYNNAYRSLQSSPRLKGVPLHHHHHHNQYGVVGSSDSSSPHHHNHHHHGMIRSRFLPKMPTKRSMRAPRMRWTSSLHARFVHAVELLGGHERATPKSVLELMDVKDLTLAHVKSHLQMYRTVKTTNKPAASSDGSGEEEMGINGNEVHHQSSTDQRAQSDDTSLHQETDISSTQPRWSNSSRETWPLSNNCSSDIDTMIRTSSTSMISHYQRSSIQNQEQRSNDQAKRCGNLSCENPSLEFTLGRPDWHEK

SEQ ID NO: 83182 - protein, 262 aa, Arabidopsis thaliana
  peptide (1)..(262): Ceres Seq. ID no. 12669067
  misc_feature (80)..(131): Pfam Name: Myb-like DNA-binding domain Pfam Description: Myb-like DNA-binding domain
  misc_feature (1)..(262): Homolog of NCBI NO: 18418011 NR Description: putative protein; protein id: At5g16560.1, by cDNA: gi_14345994, supported by cDNA: gi_15723590 [Arabidopsis >gi|14345995|gb|AAK59989.1| KANADI protein [Arabidopsis thaliana]
  misc_feature (1)..(129): Homolog of NCBI NO: 9759140 NR Description: gb|AAD20098.1~gene_id:MQK4.31~similar to unknown
  misc_feature (1)..(256): Homolog of NCBI NO: 18398337 NR Description: expressed protein; protein id: At1g32240.1, by cDNA: gi_15723594 [Arabidopsis thaliana]
  misc_feature (60)..(216): Homolog of NCBI NO: 29837235 NR Description: OSJNBb0032E15.1 [Oryza sativa (japonica
  misc_feature (26)..(165): Homolog of NCBI NO: 34905232 NR Description: P0672D01.18 [Oryza sativa (japonica
  misc_feature (1)..(212): Homolog of NCBI NO: 15239014 NR Description: putative protein; protein id: At5g42630.1, by cDNA: 114074., supported by cDNA: gi_15723592 [Arabidopsis >gi|10177141|dbj|BAB10501.1|
  misc_feature (56)..(212): Homolog of NCBI NO: 18414945 NR Description: Expressed protein; protein id: At4g17695.1,
  misc_feature (203)..(262): Homolog of NCBI NO: 14345997 NR Description: KANADI protein [Arabidopsis thaliana]
  misc_feature (73)..(152): Homolog of NCBI NO: 40737024 NR Description: putative transfactor [Oryza sativa (japonica
  misc_feature (71)..(171): Homolog of NCBI NO: 7527727 NR Description: T5E21.10 [Arabidopsis thaliana]
MDQISILNSSSGYNNAYRSLQSSPRLKGVPLHHHHHHNQYGVVGSSDSSSPHHHNHHHHGMIRSRFLPKMPTKRSMRAPRMRWTSSLHARFVHAVELLGGHERATPKSVLELMDVKDLTLAHVKSHLQMYRTVKTTNKPAASSDGSGEEEMGINGNEVHHQSSTDQRAQSDDTSLHQETDISSTQPRWSNSSRETWPLSNNCSSDIDTMIRTSSTSMISHYQRSSIQNQEQRSNDQAKRCGNLSCENPSLEFTLGRPDWHEK

SEQ ID NO: 83183 - DNA, 1038 bp, Arabidopsis thaliana
  misc_feature (1)..(1038): Ceres Seq. ID no. 12669110
  misc_feature: MA Experiment ID: 20000314 Result: Down-regulated in Transcription
  misc_feature: MA Experiment 20000314 PARAMETER Experiment Name: At_14day_Shoots-Roots_Sub_P Parameter: Age (day) Value: 14
  misc_feature: MA Experiment 20000314 PARAMETER Experiment Name: At_14day_Shoots-Roots_Sub_P Parameter: Organism Value: A. thaliana
  misc_feature: MA Experiment 20000314 PARAMETER Experiment Name: At_14day_Shoots-Roots_Sub_P Parameter: Plant Line Value: WS
  misc_feature: MA Experiment 20000314 PARAMETER Experiment Name: At_14day_Shoots-Roots_Sub_P Parameter: Tissue Value: Roots vs. Whole Plant
  misc_feature: MA Experiment ID: 20000346 Result: Up-regulated in Transcription
  misc_feature: MA Experiment 20000346 PARAMETER Experiment Name: At_2mM_SA_Sub_P Parameter: Age (day) Value: 14
  misc_feature: MA Experiment 20000346 PARAMETER Experiment Name: At_2mM_SA_Sub_P Parameter: Organism Value: A. thaliana
  misc_feature: MA Experiment 20000346 PARAMETER Experiment Name: At_2mM_SA_Sub_P Parameter: Plant Line Value: WS
  misc_feature: MA Experiment 20000346 PARAMETER Experiment Name: At_2mM_SA_Sub_P Parameter: Timepoint (hr) Value: 1
  misc_feature: MA Experiment 20000346 PARAMETER Experiment Name: At_2mM_SA_Sub_P Parameter: Tissue Value: Aerial
  misc_feature: MA Experiment 20000346 PARAMETER Experiment Name: At_2mM_SA_Sub_P Parameter: Treatment Value: 2mM SA vs. No Treatment
  misc_feature: MA Experiment ID: 20000355 Result: Down-regulated in Transcription
  misc_feature: MA Experiment 20000355 PARAMETER Experiment Name: At_Siliques_Sub_P Parameter: Age (day) Value: 21
  misc_feature: MA Experiment 20000355 PARAMETER Experiment Name: At_Siliques_Sub_P Parameter: Organism Value: A. thaliana
  misc_feature: MA Experiment 20000355 PARAMETER Experiment Name: At_Siliques_Sub_P Parameter: Plant Line Value: WS
  misc_feature: MA Experiment 20000355 PARAMETER Experiment Name: At_Siliques_Sub_P Parameter: Tissue Value: Less Than 5mm Siliques vs. Whole Plant
atgacggcgacgaacaagcaagtcatattgaaagactacgtgagtggtttccctacggaatccgatttcgatttcactaccaccaccgtcgaacttagggttccggaaggtactaactctgttctagtgaagaatctctacttgtcatgcgatccttacatgagaattcgcatggggaaacctgatccttccactgctgctcttgctcaagcttacactcccggccagccaatccaagggtatggagtgtctagaataatagaatctggacatccagattacaagaaaggagatttactctggggtatagttgcatgggaggagtacagtgttatcactccaatgactcacgcgcatttcaagatccaacatactgatgttccattatcttattacactggacttttaggtatgcctggtatgactgcctatgctgggttttatgaagtttgttctccaaaggaaggagagacagtttatgtgtcagctgcatctggtgctgttggtcagcttgtgggacaacttgctaagatgatgggctgttatgttgttggaagcgctggaagtaaagagaaggttgatcttctgaagaccaagtttgggtttgatgatgcatttaactacaaggaagaatctgaccttactgctgccctaaaaaggtgtttccctaatggcattgacatatactttgagaatgtaggaggcaaaatgctagatgcagtgcttgtgaacatgaacatgcacgggcgtatcgctgtctgtggaatgatctcacagtacaatcttgagaaccaggaaggtgtacacaacctatccaacataatctacaaaagaatccgcattcaaggctttgtagtgtctgatttctacgacaaatactcaaagttcttggagtttgtgcttccccacattagagaagggaagataacgtacgtggaagatgtagctgatgggcttgagaaagctcccgaagctcttgtgggactcttccatggtaagaatgttgggaaacaagttgttgttgttgctcgtgagtga

SEQ ID NO: 83184 - protein, 345 aa, Arabidopsis thaliana; identical to SEQ ID NO: 76666
  peptide (1)..(345): Ceres Seq. ID no. 12669111
  misc_feature (134)..(342): Pfam Name: Zinc-binding dehydrogenase Pfam Description: Zinc-binding dehydrogenase
  misc_feature (1)..(345): Homolog of NCBI NO: 15237888 NR Description: quinone oxidoreductase -like protein; protein id:
  misc_feature (1)..(345): Homolog of NCBI NO: 21539447 NR Description: quinone oxidoreductase-like protein [Arabidopsis
  misc_feature (1)..(345): Homolog of NCBI NO: 22326861 NR Description: quinone oxidoreductase - like protein; protein At5g17000.1, supported by cDNA: gi_16604343, supported by cDNA: [Arabidopsis thaliana] >gi|16604344|gb|AAL24178.1|
  misc_feature (1)..(345): Homolog of NCBI NO: 17529140 NR Description: putative quinone oxidoreductase [Arabidopsis
  misc_feature (1)..(345): Homolog of NCBI NO: 15237890 NR Description: quinone oxidoreductase - like protein; protein At5g16990.1, supported by cDNA: gi_17529037, supported by cDNA:
  misc_feature (1)..(345): Homolog of NCBI NO: 21554121 NR Description: quinone oxidoreductase-like protein [Arabidopsis
  misc_feature (1)..(345): Homolog of NCBI NO: 1362014 NR Description: probable NADPH2:quinone reductase (EC 1.6.5.5) P2
  misc_feature (1)..(345): Homolog of NCBI NO: 11358742 NR Description: quinone oxidoreductase-like protein - Arabidopsis
  misc_feature (2)..(345): Homolog of NCBI NO: 15228456 NR Description: putative NADP-dependent oxidoreductase; protein At3g03080.1 [Arabidopsis thaliana]
  misc_feature (115)..(345): Homolog of NCBI NO: 11358740 NR Description: quinone oxidoreductase-like protein - Arabidopsis

SEQ ID NO: 83185 - protein, 292 aa, Arabidopsis thaliana; identical to SEQ ID NO: 76667
  peptide (1)..(292): Ceres Seq. ID no. 12669112
  misc_feature (81)..(289): Pfam Name: Zinc-binding dehydrogenase Pfam Description: Zinc-binding dehydrogenase
  misc_feature (1)..(292): Homolog of NCBI NO: 15237888 NR Description: quinone oxidoreductase -like protein; protein id:
  misc_feature (1)..(292): Homolog of NCBI NO: 21539447 NR Description: quinone oxidoreductase-like protein [Arabidopsis
  misc_feature (1)..(292): Homolog of NCBI NO: 22326861 NR Description: quinone oxidoreductase - like protein; protein At5g17000.1, supported by cDNA: gi_16604343, supported by cDNA: [Arabidopsis thaliana] >gi|16604344|gb|AAL24178.1|
  misc_feature (1)..(292): Homolog of NCBI NO: 17529140 NR Description: putative quinone oxidoreductase [Arabidopsis
  misc_feature (1)..(292): Homolog of NCBI NO: 15237890 NR Description: quinone oxidoreductase - like protein; protein At5g16990.1, supported by cDNA: gi_17529037, supported by cDNA:
  misc_feature (1)..(292): Homolog of NCBI NO: 21554121 NR Description: quinone oxidoreductase-like protein [Arabidopsis
  misc_feature (1)..(292): Homolog of NCBI NO: 1362014 NR Description: probable NADPH2:quinone reductase (EC 1.6.5.5) P2
  misc_feature (1)..(292): Homolog of NCBI NO: 11358742 NR Description: quinone oxidoreductase-like protein - Arabidopsis
  misc_feature (1)..(292): Homolog of NCBI NO: 15228456 NR Description: putative NADP-dependent oxidoreductase; protein At3g03080.1 [Arabidopsis thaliana]
  misc_feature (62)..(292): Homolog of NCBI NO: 11358740 NR Description: quinone oxidoreductase-like protein - Arabidopsis

SEQ ID NO: 83186 - protein, 288 aa, Arabidopsis thaliana; identical to SEQ ID NO: 76668
  peptide (1)..(288): Ceres Seq. ID no. 12669113
  misc_feature (77)..(285): Pfam Name: Zinc-binding dehydrogenase Pfam Description: Zinc-binding dehydrogenase
  misc_feature (1)..(288): Homolog of NCBI NO: 15237888 NR Description: quinone oxidoreductase -like protein; protein id:
  misc_feature (1)..(288): Homolog of NCBI NO: 21539447 NR Description: quinone oxidoreductase-like protein [Arabidopsis
  misc_feature (1)..(288): Homolog of NCBI NO: 22326861 NR Description: quinone oxidoreductase - like protein; protein At5g17000.1, supported by cDNA: gi_16604343, supported by cDNA: [Arabidopsis thaliana] >gi|16604344|gb|AAL24178.1|
  misc_feature (1)..(288): Homolog of NCBI NO: 17529140 NR Description: putative quinone oxidoreductase [Arabidopsis
  misc_feature (1)..(288): Homolog of NCBI NO: 15237890 NR Description: quinone oxidoreductase - like protein; protein At5g16990.1, supported by cDNA: gi_17529037, supported by cDNA:
  misc_feature (1)..(288): Homolog of NCBI NO: 21554121 NR Description: quinone oxidoreductase-like protein [Arabidopsis
  misc_feature (1)..(288): Homolog of NCBI NO: 1362014 NR Description: probable NADPH2:quinone reductase (EC 1.6.5.5) P2
  misc_feature (1)..(288): Homolog of NCBI NO: 11358742 NR Description: quinone oxidoreductase-like protein - Arabidopsis
  misc_feature (1)..(288): Homolog of NCBI NO: 15228456 NR Description: putative NADP-dependent oxidoreductase; protein At3g03080.1 [Arabidopsis thaliana]
  misc_feature (58)..(288): Homolog of NCBI NO: 11358740 NR Description: quinone oxidoreductase-like protein - Arabidopsis

SEQ ID NO: 83187 - DNA, 1034 bp, Arabidopsis thaliana
  misc_feature (1)..(1034): Ceres Seq. ID no. 12669126
  misc_feature: MA Experiment ID: 20001906 Result: Up-regulated in Transcription
  misc_feature: MA Experiment 20001906 PARAMETER Experiment Name: At_Drought_Reproduction_P Parameter: Age (day) Value: 35
  misc_feature: MA Experiment 20001906 PARAMETER Experiment Name: At_Drought_Reproduction_P Parameter: Organism Value: A. thaliana
  misc_feature: MA Experiment 20001906 PARAMETER Experiment Name: At_Drought_Reproduction_P Parameter: Plant Line Value: WS
  misc_feature: MA Experiment 20001906 PARAMETER Experiment Name: At_Drought_Reproduction_P Parameter: Timepoint (day) Value: 5
  misc_feature: MA Experiment 20001906 PARAMETER Experiment Name: At_Drought_Reproduction_P Parameter: Tissue Value: Siliques
  misc_feature: MA Experiment 20001906 PARAMETER Experiment Name: At_Drought_Reproduction_P Parameter: Treatment Value: Drought vs. No Drought
atgaaatctctgtagttttttttttgttcctttcttaaatttcgaaagaaagacatttattaaaccaaaataactctttagatcattgcaaggaaaaatgttgaaaagtgcaagtccaatggcattctacgatatcggagagcagcaatactctactttcgggtacattttaagcaaacctgggaacgcaggagcttacgagattgacccttcgatcccaaacatcgacgatgcgatctacggctcagatgagttccgtatgtacgcttacaaaatcaaacggtgtcctcgtactcgtagccacgactggacggagtgtccctacgctcaccgtggcgagaaagccacacgccgtgatcctcgccgttacacttactgtgcagtcgcatgcccggctttccgaaatggcgcatgccaccgtggcgactcatgcgaattcgcacatggcgtattcgagtactggctccacccggcgcgttaccgaacacgcgcatgtaacgccgggaacttgtgtcagaggaaagtgtgtttctttgcccacgcgccggagcagctaaggcagtctgaaggaaagcacaggtgcaggtacgcatataggccggtgagggctagaggtggtggaaacggcgatggagtgacgatgagaatggacgacgagggttacgacacgtcacggtctccggtgagaagcgggaaagatgatttagatagtaacgaggagaaggtgttgttgaagtgttggagtcggatgagcattgtggatgatcattatgagccgtccgatttggatttggatttgtcacactttgattggatctcagagttggtcgattaaatttgggaaatcaaagcagagaacaaaagaaacccgataaataaagtggattttgttaaaatccacaagatcaagattcaagatgagagatcttgtcatgtatatggtaaatttaattgtaatgatttattgcaatgtcgcaaaagaagttacttctctttgcatgtaaacagattcttgatcttctataagtctttgt

SEQ ID NO: 83188 - protein, 245 aa, Arabidopsis thaliana
  peptide (1)..(245): Ceres Seq. ID no. 12669127
  misc_feature (93)..(118): Pfam Name: Zinc finger C-x8-C-x5-C-x3-H type (and similar) Pfam Description: Zinc finger C-x8-C-x5-C-x3-H type (and similar)
  misc_feature (1)..(245): Homolog of NCBI NO: 15240799 NR Description: zinc finger transcription factor; protein id: supported by cDNA: gi_2961541 [Arabidopsis thaliana]
  misc_feature (34)..(154): Homolog of NCBI NO: 15237721 NR Description: putative protein; protein id: At5g58620.1, by cDNA: gi_15809817, supported by cDNA: gi_17064829 [Arabidopsis
  misc_feature (132)..(245): Homolog of NCBI NO: 15054380 NR Description: zinc finger transcription factor-like protein
  misc_feature (34)..(154): Homolog of NCBI NO: 18405834 NR Description: putative CCCH-type zinc finger protein; protein At2g41900.1, supported by cDNA: gi_14335105, supported by cDNA: [Arabidopsis thaliana] >gi|14335106|gb|AAK59832.1|
  misc_feature (34)..(154): Homolog of NCBI NO: 25408764 NR Description: probable CCCH-type zinc finger protein [imported]
  misc_feature (34)..(154): Homolog of NCBI NO: 28273376 NR Description: unknown protein [Oryza sativa (japonica
  misc_feature (28)..(154): Homolog of NCBI NO: 15224852 NR Description: putative CCCH-type zinc finger protein; protein
  misc_feature (28)..(154): Homolog of NCBI NO: 15233491 NR Description: putative protein; protein id: At4g29190.1, by cDNA: 16432., supported by cDNA: gi_15028334, supported by
  misc_feature (45)..(154): Homolog of NCBI NO: 34906436 NR Description: putative zinc finger transcription factor [Oryza
  misc_feature (34)..(154): Homolog of NCBI NO: 15239917 NR Description: zinc finger transcription factor -like protein; id: At5g12850.1, supported by cDNA: gi_20466589 [Arabidopsis
MLKSASPMAFYDIGEQQYSTFGYILSKPGNAGAYEIDPSIPNIDDAIYGSDEFRMYAYKIKRCPRTRSHDWTECPYAHRGEKATRRDPRRYTYCAVACPAFRNGACHRGDSCEFAHGVFEYWLHPARYRTRACNAGNLCQRKVCFFAHAPEQLRQSEGKHRCRYAYRPVRARGGGNGDGVTMRMDDEGYDTSRSPVRSGKDDLDSNEEKVLLKCWSRMSIVDDHYEPSDLDLDLSHFDWISELVD

SEQ ID NO: 83189 - protein, 238 aa, Arabidopsis thaliana
  peptide (1)..(238): Ceres Seq. ID no. 12669128
  misc_feature (86)..(111): Pfam Name: Zinc finger C-x8-C-x5-C-x3-H type (and similar) Pfam Description: Zinc finger C-x8-C-x5-C-x3-H type (and similar)
  misc_feature (1)..(238): Homolog of NCBI NO: 15240799 NR Description: zinc finger transcription factor; protein id: supported by cDNA: gi_2961541 [Arabidopsis thaliana]
  misc_feature (27)..(147): Homolog of NCBI NO: 15237721 NR Description: putative protein; protein id: At5g58620.1, by cDNA: gi_15809817, supported by cDNA: gi_17064829 [Arabidopsis
  misc_feature (125)..(238): Homolog of NCBI NO: 15054380 NR Description: zinc finger transcription factor-like protein
  misc_feature (27)..(147): Homolog of NCBI NO: 18405834 NR Description: putative CCCH-type zinc finger protein; protein At2g41900.1, supported by cDNA: gi_14335105, supported by cDNA: [Arabidopsis thaliana] >gi|14335106|gb|AAK59832.1|
  misc_feature (27)..(147): Homolog of NCBI NO: 25408764 NR Description: probable CCCH-type zinc finger protein [imported]
  misc_feature (27)..(147): Homolog of NCBI NO: 28273376 NR Description: unknown protein [Oryza sativa (japonica
  misc_feature (21)..(147): Homolog of NCBI NO: 15224852 NR Description: putative CCCH-type zinc finger protein; protein
  misc_feature (21)..(147): Homolog of NCBI NO: 15233491 NR Description: putative protein; protein id: At4g29190.1, by cDNA: 16432., supported by cDNA: gi_15028334, supported by
  misc_feature (38)..(147): Homolog of NCBI NO: 34906436 NR Description: putative zinc finger transcription factor [Oryza
  misc_feature (27)..(147): Homolog of NCBI NO: 15239917 NR Description: zinc finger transcription factor -like protein; id: At5g12850.1, supported by cDNA: gi_20466589 [Arabidopsis
MAFYDIGEQQYSTFGYILSKPGNAGAYEIDPSIPNIDDAIYGSDEFRMYAYKIKRCPRTRSHDWTECPYAHRGEKATRRDPRRYTYCAVACPAFRNGACHRGDSCEFAHGVFEYWLHPARYRTRACNAGNLCQRKVCFFAHAPEQLRQSEGKHRCRYAYRPVRARGGGNGDGVTMRMDDEGYDTSRSPVRSGKDDLDSNEEKVLLKCWSRMSIVDDHYEPSDLDLDLSHFDWISELVD

SEQ ID NO: 83190 - protein, 191 aa, Arabidopsis thaliana
  peptide (1)..(191): Ceres Seq. ID no. 12669129
  misc_feature (39)..(64): Pfam Name: Zinc finger C-x8-C-x5-C-x3-H type (and similar) Pfam Description: Zinc finger C-x8-C-x5-C-x3-H type (and similar)
  misc_feature (1)..(191): Homolog of NCBI NO: 15240799 NR Description: zinc finger transcription factor; protein id: supported by cDNA: gi_2961541 [Arabidopsis thaliana]
  misc_feature (1)..(100): Homolog of NCBI NO: 15237721 NR Description: putative protein; protein id: At5g58620.1, by cDNA: gi_15809817, supported by cDNA: gi_17064829 [Arabidopsis
  misc_feature (78)..(191): Homolog of NCBI NO: 15054380 NR Description: zinc finger transcription factor-like protein
  misc_feature (1)..(100): Homolog of NCBI NO: 18405834 NR Description: putative CCCH-type zinc finger protein; protein At2g41900.1, supported by cDNA: gi_14335105, supported by cDNA: [Arabidopsis thaliana] >gi|14335106|gb|AAK59832.1|
  misc_feature (1)..(100): Homolog of NCBI NO: 25408764 NR Description: probable CCCH-type zinc finger protein [imported]
  misc_feature (1)..(100): Homolog of NCBI NO: 28273376 NR Description: unknown protein [Oryza sativa (japonica
  misc_feature (1)..(100): Homolog of NCBI NO: 15224852 NR Description: putative CCCH-type zinc finger protein; protein
  misc_feature (1)..(100): Homolog of NCBI NO: 15233491 NR Description: putative protein; protein id: At4g29190.1, by cDNA: 16432., supported by cDNA: gi_15028334, supported by
  misc_feature (1)..(100): Homolog of NCBI NO: 34906436 NR Description: putative zinc finger transcription factor [Oryza
  misc_feature (1)..(100): Homolog of NCBI NO: 15239917 NR Description: zinc finger transcription factor -like protein; id: At5g12850.1, supported by cDNA: gi_20466589 [Arabidopsis
MYAYKIKRCPRTRSHDWTECPYAHRGEKATRRDPRRYTYCAVACPAFRNGACHRGDSCEFAHGVFEYWLHPARYRTRACNAGNLCQRKVCFFAHAPEQLRQSEGKHRCRYAYRPVRARGGGNGDGVTMRMDDEGYDTSRSPVRSGKDDLDSNEEKVLLKCWSRMSIVDDHYEPSDLDLDLSHFDWISELVD

SEQ ID NO: 83191 - DNA, 1595 bp, Arabidopsis thaliana
  misc_feature (1)..(1595): Ceres Seq. ID no. 12669174
  misc_feature: MA Experiment ID: 20000171 Result: Down-regulated in Transcription
  misc_feature: MA Experiment 20000171 PARAMETER Experiment Name: At_42deg_Heat_P Parameter: Age (day) Value: 14
  misc_feature: MA Experiment 20000171 PARAMETER Experiment Name: At_42deg_Heat_P Parameter: Organism Value: A. thaliana
  misc_feature: MA Experiment 20000171 PARAMETER Experiment Name: At_42deg_Heat_P Parameter: Plant Line Value: WS
  misc_feature: MA Experiment 20000171 PARAMETER Experiment Name: At_42deg_Heat_P Parameter: Temperature (deg C) Value: 42 vs. 22
  misc_feature: MA Experiment 20000171 PARAMETER Experiment Name: At_42deg_Heat_P Parameter: Timepoint (hr) Value: 1
  misc_feature: MA Experiment 20000171 PARAMETER Experiment Name: At_42deg_Heat_P Parameter: Tissue Value: Aerial
  misc_feature: MA Experiment ID: 20000173 Result: Down-regulated in Transcription
  misc_feature: MA Experiment 20000173 PARAMETER Experiment Name: At_42deg_Heat_P Parameter: Age (day) Value: 14
  misc_feature: MA Experiment 20000173 PARAMETER Experiment Name: At_42deg_Heat_P Parameter: Organism Value: A. thaliana
  misc_feature: MA Experiment 20000173 PARAMETER Experiment Name: At_42deg_Heat_P Parameter: Plant Line Value: WS
  misc_feature: MA Experiment 20000173 PARAMETER Experiment Name: At_42deg_Heat_P Parameter: Temperature (deg C) Value: 42 vs. 22
  misc_feature: MA Experiment 20000173 PARAMETER Experiment Name: At_42deg_Heat_P Parameter: Timepoint (hr) Value: 6
  misc_feature: MA Experiment 20000173 PARAMETER Experiment Name: At_42deg_Heat_P Parameter: Tissue Value: Aerial
  misc_feature: MA Experiment ID: 20000182 Result: Down-regulated in Transcription
  misc_feature: MA Experiment 20000182 PARAMETER Experiment Name: At_2mM_SA_P Parameter: Age (day) Value: 14
  misc_feature: MA Experiment 20000182 PARAMETER Experiment Name: At_2mM_SA_P Parameter: Organism Value: A. thaliana
  misc_feature: MA Experiment 20000182 PARAMETER Experiment Name: At_2mM_SA_P Parameter: Plant Line Value: WS
  misc_feature: MA Experiment 20000182 PARAMETER Experiment Name: At_2mM_SA_P Parameter: Timepoint (hr) Value: 6
  misc_feature: MA Experiment 20000182 PARAMETER Experiment Name: At_2mM_SA_P Parameter: Tissue Value: Aerial
  misc_feature: MA Experiment 20000182 PARAMETER Experiment Name: At_2mM_SA_P Parameter: Treatment Value: 2mM SA vs. No Treatment
  misc_feature: MA Experiment ID: 20000184 Result: Down-regulated in Transcription
  misc_feature: MA Experiment 20000184 PARAMETER Experiment Name: At_Shoots__P Parameter: Age (day) Value: 7
  misc_feature: MA Experiment 20000184 PARAMETER Experiment Name: At_Shoots__P Parameter: Tissue Value: Shoots vs. Whole Plant
  misc_feature: MA Experiment ID: 20000211 Result: Up-regulated in Transcription
  misc_feature: MA Experiment 20000211 PARAMETER Experiment Name: At_0.001percent_MeJA__P Parameter: Age (day) Value: 14
  misc_feature: MA Experiment 20000211 PARAMETER Experiment Name: At_0.001percent_MeJA__P Parameter: Organism Value: A. thaliana
  misc_feature: MA Experiment 20000211 PARAMETER Experiment Name: At_0.001percent_MeJA__P Parameter: Plant Line Value: WS
  misc_feature: MA Experiment 20000211 PARAMETER Experiment Name: At_0.001percent_MeJA__P Parameter: Timepoint (hr) Value: 1
  misc_feature: MA Experiment 20000211 PARAMETER Experiment Name: At_0.001percent_MeJA__P Parameter: Tissue Value: Aerial
  misc_feature: MA Experiment 20000211 PARAMETER Experiment Name: At_0.001percent_MeJA__P Parameter: Treatment Value: 0.001percent MeJA vs. No Treatment
  misc_feature: MA Experiment ID: 20000234 Result: Down-regulated in Transcription
  misc_feature: MA Experiment 20000234 PARAMETER Experiment Name: At_Siliques_P Parameter: Age (day) Value: 21
  misc_feature: MA Experiment 20000234 PARAMETER Experiment Name: At_Siliques_P Parameter: Organism Value: A. thaliana
  misc_feature: MA Experiment 20000234 PARAMETER Experiment Name: At_Siliques_P Parameter: Plant Line Value: WS
  misc_feature: MA Experiment 20000234 PARAMETER Experiment Name: At_Siliques_P Parameter: Tissue Value: Less Than 5mm Siliques vs. Whole Plant
  misc_feature: MA Experiment ID: 20000235 Result: Down-regulated in Transcription
  misc_feature: MA Experiment 20000235 PARAMETER Experiment Name: At_Siliques_P Parameter: Age (day) Value: 21
  misc_feature: MA Experiment 20000235 PARAMETER Experiment Name: At_Siliques_P Parameter: Organism Value: A. thaliana
  misc_feature: MA Experiment 20000235 PARAMETER Experiment Name: At_Siliques_P Parameter: Plant Line Value: WS
  misc_feature: MA Experiment 20000235 PARAMETER Experiment Name: At_Siliques_P Parameter: Tissue Value: 5-10mm Siliques vs. Whole Plant
  misc_feature: MA Experiment ID: 20000286 Result: Down-regulated in Transcription
  misc_feature: MA Experiment 20000286 PARAMETER Experiment Name: At_Open_Flower_P Parameter: Age (day) Value: 21
  misc_feature: MA Experiment 20000286 PARAMETER Experiment Name: At_Open_Flower_P Parameter: Plant Line Value: WS
  misc_feature: MA Experiment 20000286 PARAMETER Experiment Name: At_Open_Flower_P Parameter: Tissue Value: Half Open vs. Whole Plant
  misc_feature: MA Experiment ID: 20000308 Result: Up-regulated in Transcription
  misc_feature: MA Experiment 20000308 PARAMETER Experiment Name: At_100mM_NaCl__P Parameter: Age (day) Value: 17
  misc_feature: MA Experiment 20000308 PARAMETER Experiment Name: At_100mM_NaCl__P Parameter: Organism Value: A. thaliana
  misc_feature: MA Experiment 20000308 PARAMETER Experiment Name: At_100mM_NaCl__P Parameter: Plant Line Value: WS
  misc_feature: MA Experiment 20000308 PARAMETER Experiment Name: At_100mM_NaCl__P Parameter: Timepoint (hr) Value: 72
  misc_feature: MA Experiment 20000308 PARAMETER Experiment Name: At_100mM_NaCl__P Parameter: Tissue Value: Whole Plant
  misc_feature: MA Experiment 20000308 PARAMETER Experiment Name: At_100mM_NaCl__P Parameter: Treatment Value: 100mM NaCl vs. No Treatment
  misc_feature: MA Experiment ID: 20000436 Result: Down-regulated in Transcription
  misc_feature: MA Experiment 20000436 PARAMETER Experiment Name: At_Drought_P Parameter: Age (day) Value: 7
  misc_feature: MA Experiment 20000436 PARAMETER Experiment Name: At_Drought_P Parameter: Organism Value: A. thaliana
  misc_feature: MA Experiment 20000436 PARAMETER Experiment Name: At_Drought_P Parameter: Plant Line Value: WS
  misc_feature: MA Experiment 20000436 PARAMETER Experiment Name: At_Drought_P Parameter: Timepoint (hr) Value: 12
  misc_feature: MA Experiment 20000436 PARAMETER Experiment Name: At_Drought_P Parameter: Tissue Value: Whole Plant
  misc_feature: MA Experiment 20000436 PARAMETER Experiment Name: At_Drought_P Parameter: Treatment Value: Drought vs. No Drought
  misc_feature: MA Experiment ID: 20000437 Result: Down-regulated in Transcription
  misc_feature: MA Experiment 20000437 PARAMETER Experiment Name: At_Drought_P Parameter: Age (day) Value: 8
  misc_feature: MA Experiment 20000437 PARAMETER Experiment Name: At_Drought_P Parameter: Organism Value: A. thaliana
  misc_feature: MA Experiment 20000437 PARAMETER Experiment Name: At_Drought_P Parameter: Plant Line Value: WS
  misc_feature: MA Experiment 20000437 PARAMETER Experiment Name: At_Drought_P Parameter: Timepoint (hr) Value: 24
  misc_feature: MA Experiment 20000437 PARAMETER Experiment Name: At_Drought_P Parameter: Tissue Value: Whole Plant
  misc_feature: MA Experiment 20000437 PARAMETER Experiment Name: At_Drought_P Parameter: Treatment Value: Drought vs. No Drought
  misc_feature: MA Experiment ID: 20000438 Result: Up-regulated in Transcription
  misc_feature: MA Experiment 20000438 PARAMETER Experiment Name: At_Shoots__P Parameter: Age (day) Value: 14
  misc_feature: MA Experiment 20000438 PARAMETER Experiment Name: At_Shoots__P Parameter: Tissue Value: Shoots vs. Whole Plant
  misc_feature: MA Experiment ID: 20000445 Result: Down-regulated in Transcription
  misc_feature: MA Experiment 20000445 PARAMETER Experiment Name: At_100uM_NAA__P Parameter: Age (day) Value: 14
  misc_feature: MA Experiment 20000445 PARAMETER Experiment Name: At_100uM_NAA__P Parameter: Organism Value: A. thaliana
  misc_feature: MA Experiment 20000445 PARAMETER Experiment Name: At_100uM_NAA__P Parameter: Plant Line Value: WS
  misc_feature: MA Experiment 20000445 PARAMETER Experiment Name: At_100uM_NAA__P Parameter: Timepoint (hr) Value: 6
  misc_feature: MA Experiment 20000445 PARAMETER Experiment Name: At_100uM_NAA__P Parameter: Tissue Value: Aerial
  misc_feature: MA Experiment 20000445 PARAMETER Experiment Name: At_100uM_NAA__P Parameter: Treatment Value: 100uM NAA vs. No Treatment
  misc_feature: MA Experiment ID: 20000455 Result: Up-regulated in Transcription
  misc_feature: MA Experiment 20000455 PARAMETER Experiment Name: At_100uM_ABA_P Parameter: Age (day) Value: 16
  misc_feature: MA Experiment 20000455 PARAMETER Experiment Name: At_100uM_ABA_P Parameter: Organism Value: A. thaliana
  misc_feature: MA Experiment 20000455 PARAMETER Experiment Name: At_100uM_ABA_P Parameter: Plant Line Value: WS
  misc_feature: MA Experiment 20000455 PARAMETER Experiment Name: At_100uM_ABA_P Parameter: Timepoint (hr) Value: 48
  misc_feature: MA Experiment 20000455 PARAMETER Experiment Name: At_100uM_ABA_P Parameter: Tissue Value: Aerial
  misc_feature: MA Experiment 20000455 PARAMETER Experiment Name: At_100uM_ABA_P Parameter: Treatment Value: 100uM ABA vs. No Treatment
  misc_feature: MA Experiment ID: 20000495 Result: Up-regulated in Transcription
  misc_feature: MA Experiment 20000495 PARAMETER Experiment Name: At_Guard_Cells_P Parameter: Harvest Date Value: 8/2/2002
  misc_feature: MA Experiment 20000495 PARAMETER Experiment Name: At_Guard_Cells_P Parameter: Organism Value: A. thaliana
  misc_feature: MA Experiment 20000495 PARAMETER Experiment Name: At_Guard_Cells_P Parameter: Tissue Value: Guard Cells vs. Leaves
  misc_feature: MA Experiment ID: 20000527 Result: Up-regulated in Transcription
  misc_feature: MA Experiment 20000527 PARAMETER Experiment Name: At_10percent_PEG_P Parameter: Age (day) Value: 20
  misc_feature: MA Experiment 20000527 PARAMETER Experiment Name: At_10percent_PEG_P Parameter: Organism Value: A. thaliana
  misc_feature: MA Experiment 20000527 PARAMETER Experiment Name: At_10percent_PEG_P Parameter: Plant Line Value: WS
  misc_feature: MA Experiment 20000527 PARAMETER Experiment Name: At_10percent_PEG_P Parameter: Timepoint (day) Value: 20
  misc_feature: MA Experiment 20000527 PARAMETER Experiment Name: At_10percent_PEG_P Parameter: Tissue Value: Whole Plant
  misc_feature: MA Experiment 20000527 PARAMETER Experiment Name: At_10percent_PEG_P Parameter: Treatment Value: 10percent PEG vs. No Treatment
  misc_feature: MA Experiment ID: 20000573 Result: Down-regulated in Transcription
  misc_feature: MA Experiment 20000573 PARAMETER Experiment Name: At_100uM_ABA_Mutants__P Parameter: Organism Value: A. thaliana
  misc_feature: MA Experiment 20000573 PARAMETER Experiment Name: At_100uM_ABA_Mutants__P Parameter: Plant Line Value: CS22 vs. Ler wt
  misc_feature: MA Experiment 20000573 PARAMETER Experiment Name: At_100uM_ABA_Mutants__P Parameter: Timepoint (hr) Value: N/A
  misc_feature: MA Experiment 20000573 PARAMETER Experiment Name: At_100uM_ABA_Mutants__P Parameter: Tissue Value: Whole Plant
  misc_feature: MA Experiment 20000573 PARAMETER Experiment Name: At_100uM_ABA_Mutants__P Parameter: Treatment Value: None
  misc_feature: MA Experiment ID: 20000574 Result: Down-regulated in Transcription
  misc_feature: MA Experiment 20000574 PARAMETER Experiment Name: At_100uM_ABA_Mutants__P Parameter: Organism Value: A. thaliana
  misc_feature: MA Experiment 20000574 PARAMETER Experiment Name: At_100uM_ABA_Mutants__P Parameter: Plant Line Value: CS23 vs. Ler wt
  misc_feature: MA Experiment 20000574 PARAMETER Experiment Name: At_100uM_ABA_Mutants__P Parameter: Timepoint (hr) Value: N/A
  misc_feature: MA Experiment 20000574 PARAMETER Experiment Name: At_100uM_ABA_Mutants__P Parameter: Tissue Value: Whole Plant
  misc_feature: MA Experiment 20000574 PARAMETER Experiment Name: At_100uM_ABA_Mutants__P Parameter: Treatment Value: None
  misc_feature: MA Experiment ID: 20001247 Result: Down-regulated in Transcription
  misc_feature: MA Experiment 20001247 PARAMETER Experiment Name: At_Far-red-induction_P Parameter: Age (day) Value: 7
  misc_feature: MA Experiment 20001247 PARAMETER Experiment Name: At_Far-red-induction_P Parameter: Light Value: Far-red vs. White
  misc_feature: MA Experiment 20001247 PARAMETER Experiment Name: At_Far-red-induction_P Parameter: Organism Value: A. thaliana
  misc_feature: MA Experiment 20001247 PARAMETER Experiment Name: At_Far-red-induction_P Parameter: Plant Line Value: Columbia
  misc_feature: MA Experiment 20001247 PARAMETER Experiment Name: At_Far-red-induction_P Parameter: Timepoint (hr) Value: 1
  misc_feature: MA Experiment 20001247 PARAMETER Experiment Name: At_Far-red-induction_P Parameter: Tissue Value: Whole Plant
  misc_feature: MA Experiment ID: 20001248 Result: Down-regulated in Transcription
  misc_feature: MA Experiment 20001248 PARAMETER Experiment Name: At_Far-red-induction_P Parameter: Age (day) Value: 7
  misc_feature: MA Experiment 20001248 PARAMETER Experiment Name: At_Far-red-induction_P Parameter: Light Value: Far-red vs. White
  misc_feature: MA Experiment 20001248 PARAMETER Experiment Name: At_Far-red-induction_P Parameter: Organism Value: A. thaliana
  misc_feature: MA Experiment 20001248 PARAMETER Experiment Name: At_Far-red-induction_P Parameter: Plant Line Value: Columbia
  misc_feature: MA Experiment 20001248 PARAMETER Experiment Name: At_Far-red-induction_P Parameter: Timepoint (hr) Value: 4
  misc_feature: MA Experiment 20001248 PARAMETER Experiment Name: At_Far-red-induction_P Parameter: Tissue Value: Whole Plant
  misc_feature: MA Experiment ID: 20001450 Result: Down-regulated in Transcription
  misc_feature: MA Experiment 20001450 PARAMETER Experiment Name: At_Far-red-induction_P Parameter: Age (day) Value: 7
  misc_feature: MA Experiment 20001450 PARAMETER Experiment Name: At_Far-red-induction_P Parameter: Light Value: Far-red vs. White
  misc_feature: MA Experiment 20001450 PARAMETER Experiment Name: At_Far-red-induction_P Parameter: Organism Value: A. thaliana
  misc_feature: MA Experiment 20001450 PARAMETER Experiment Name: At_Far-red-induction_P Parameter: Plant Line Value: Columbia
  misc_feature: MA Experiment 20001450 PARAMETER Experiment Name: At_Far-red-induction_P Parameter: Timepoint (hr) Value: 8
  misc_feature: MA Experiment 20001450 PARAMETER Experiment Name: At_Far-red-induction_P Parameter: Tissue Value: Whole Plant
  misc_feature: MA Experiment ID: 20001451 Result: Down-regulated in Transcription
  misc_feature: MA Experiment 20001451 PARAMETER Experiment Name: At_Far-red-induction_P Parameter: Age (day) Value: 7
  misc_feature: MA Experiment 20001451 PARAMETER Experiment Name: At_Far-red-induction_P Parameter: Light Value: Far-red vs. White
  misc_feature: MA Experiment 20001451 PARAMETER Experiment Name: At_Far-red-induction_P Parameter: Organism Value: A. thaliana
  misc_feature: MA Experiment 20001451 PARAMETER Experiment Name: At_Far-red-induction_P Parameter: Plant Line Value: Columbia
  misc_feature: MA Experiment 20001451 PARAMETER Experiment Name: At_Far-red-induction_P Parameter: Timepoint (hr) Value: 24
  misc_feature: MA Experiment 20001451 PARAMETER Experiment Name: At_Far-red-induction_P Parameter: Tissue Value: Whole Plant
  misc_feature: MA Experiment ID: 20001458 Result: Up-regulated in Transcription
  misc_feature: MA Experiment 20001458 PARAMETER Experiment Name: At_50mM_NH4NO3_L-to-H_P Parameter: Age (day) Value: Undefined
  misc_feature: MA Experiment 20001458 PARAMETER Experiment Name: At_50mM_NH4NO3_L-to-H_P Parameter: Organism Value: Undefined
  misc_feature: MA Experiment 20001458 PARAMETER Experiment Name: At_50mM_NH4NO3_L-to-H_P Parameter: Plant Line Value: Undefined
  misc_feature: MA Experiment 20001458 PARAMETER Experiment Name: At_50mM_NH4NO3_L-to-H_P Parameter: Timepoint (hr) Value: 2
  misc_feature: MA Experiment 20001458 PARAMETER Experiment Name: At_50mM_NH4NO3_L-to-H_P Parameter: Tissue Value: Siliques
  misc_feature: MA Experiment 20001458 PARAMETER Experiment Name: At_50mM_NH4NO3_L-to-H_P Parameter: Treatment Value: 50mM NH4NO3 vs. 100mM Manitol
  misc_feature: MA Experiment ID: 20001554 Result: Up-regulated in Transcription
  misc_feature: MA Experiment 20001554 PARAMETER Experiment Name: At_Drought_Soil_Dry_P Parameter: Age (day) Value: 21
  misc_feature: MA Experiment 20001554 PARAMETER Experiment Name: At_Drought_Soil_Dry_P Parameter: Organism Value: A. thaliana
  misc_feature: MA Experiment 20001554 PARAMETER Experiment Name: At_Drought_Soil_Dry_P Parameter: Plant Line Value: WS
  misc_feature: MA Experiment 20001554 PARAMETER Experiment Name: At_Drought_Soil_Dry_P Parameter: Post Timepoint (hr) Value: None
  misc_feature: MA Experiment 20001554 PARAMETER Experiment Name: At_Drought_Soil_Dry_P Parameter: Post-Treatment Value: None
  misc_feature: MA Experiment 20001554 PARAMETER Experiment Name: At_Drought_Soil_Dry_P Parameter: Timepoint (day) Value: 7
  misc_feature: MA Experiment 20001554 PARAMETER Experiment Name: At_Drought_Soil_Dry_P Parameter: Treatment Value: Drought vs. No Drought
  misc_feature: MA Experiment ID: 20001555 Result: Up-regulated in Transcription
  misc_feature: MA Experiment 20001555 PARAMETER Experiment Name: At_Drought_Soil_Dry_P Parameter: Age (day) Value: 24
  misc_feature: MA Experiment 20001555 PARAMETER Experiment Name: At_Drought_Soil_Dry_P Parameter: Organism Value: A. thaliana
  misc_feature: MA Experiment 20001555 PARAMETER Experiment Name: At_Drought_Soil_Dry_P Parameter: Plant Line Value: WS
  misc_feature: MA Experiment 20001555 PARAMETER Experiment Name: At_Drought_Soil_Dry_P Parameter: Post Timepoint (hr) Value: None
  misc_feature: MA Experiment 20001555 PARAMETER Experiment Name: At_Drought_Soil_Dry_P Parameter: Post-Treatment Value: None
  misc_feature: MA Experiment 20001555 PARAMETER Experiment Name: At_Drought_Soil_Dry_P Parameter: Timepoint (day) Value: 10
  misc_feature: MA Experiment 20001555 PARAMETER Experiment Name: At_Drought_Soil_Dry_P Parameter: Treatment Value: Drought vs. No Drought
  misc_feature: MA Experiment ID: 20001560 Result: Up-regulated in Transcription
  misc_feature: MA Experiment 20001560 PARAMETER Experiment Name: At_Drought_Soil_Dry_P Parameter: Age (day) Value: 28
  misc_feature: MA Experiment 20001560 PARAMETER Experiment Name: At_Drought_Soil_Dry_P Parameter: Organism Value: A. thaliana
  misc_feature: MA Experiment 20001560 PARAMETER Experiment Name: At_Drought_Soil_Dry_P Parameter: Plant Line Value: WS
  misc_feature: MA Experiment 20001560 PARAMETER Experiment Name: At_Drought_Soil_Dry_P Parameter: Post Timepoint (hr) Value: None
  misc_feature: MA Experiment 20001560 PARAMETER Experiment Name: At_Drought_Soil_Dry_P Parameter: Post-Treatment Value: None
  misc_feature: MA Experiment 20001560 PARAMETER Experiment Name: At_Drought_Soil_Dry_P Parameter: Timepoint (day) Value: 14
  misc_feature: MA Experiment 20001560 PARAMETER Experiment Name: At_Drought_Soil_Dry_P Parameter: Treatment Value: Drought vs. No Drought
  misc_feature: MA Experiment ID: 20001755 Result: Up-regulated in Transcription
  misc_feature: MA Experiment 20001755 PARAMETER Experiment Name: At_50mM_NH4NO3_L-to-H_P Parameter: Timepoint (hr) Value: 2
  misc_feature: MA Experiment 20001755 PARAMETER Experiment Name: At_50mM_NH4NO3_L-to-H_P Parameter: Tissue Value: Leaf
  misc_feature: MA Experiment 20001755 PARAMETER Experiment Name: At_50mM_NH4NO3_L-to-H_P Parameter: Treatment Value: 50mM NH4NO3 vs 100mM Mannitol
  misc_feature: MA Experiment ID: 20001757 Result: Up-regulated in Transcription
  misc_feature: MA Experiment 20001757 PARAMETER Experiment Name: At_50mM_NH4NO3_L-to-H_P Parameter: Timepoint (hr) Value: 6
  misc_feature: MA Experiment 20001757 PARAMETER Experiment Name: At_50mM_NH4NO3_L-to-H_P Parameter: Tissue Value: Leaf
  misc_feature: MA Experiment 20001757 PARAMETER Experiment Name: At_50mM_NH4NO3_L-to-H_P Parameter: Treatment Value: 50mM NH4NO3 vs 100mM Mannitol
  misc_feature: MA Experiment ID: 20001905 Result: Down-regulated in Transcription
  misc_feature: MA Experiment 20001905 PARAMETER Experiment Name: At_Drought_Reproduction_P Parameter: Age (day) Value: 40
  misc_feature: MA Experiment 20001905 PARAMETER Experiment Name: At_Drought_Reproduction_P Parameter: Organism Value: A. thaliana
  misc_feature: MA Experiment 20001905 PARAMETER Experiment Name: At_Drought_Reproduction_P Parameter: Plant Line Value: WS
  misc_feature: MA Experiment 20001905 PARAMETER Experiment Name: At_Drought_Reproduction_P Parameter: Timepoint (day) Value: 10
  misc_feature: MA Experiment 20001905 PARAMETER Experiment Name: At_Drought_Reproduction_P Parameter: Tissue Value: Rosettes
  misc_feature: MA Experiment 20001905 PARAMETER Experiment Name: At_Drought_Reproduction_P Parameter: Treatment Value: Drought vs. No Drought
gccaggcttatatatatgcataaacatatataattatgcatggaggagtagtagcttgcaatgtcttgaaactttgatatatcttctcctagtctttcttttaaatgtttaatatgaaaacacaaaatcctacaacggtcgtctaccacagtttctcagtcagtttcatattcagatgcatcagagttctcatcaagagatctatcagtctattgccttaaactcgacgacattctgttttttttttcttttcttattttttctttttcttatttcttacctataggttgtatgtaaatctatatcaaaaaaagaagaaaaacaagatgtcaagaaagccatgttgtgtgggagaaggactgaagaaaggagcatggactgccgaagaagacaagaaactcatctcttacattcatgaacacggtgaaggaggctggcgtgacattccccaaaaagctggactaaaacgatgtggaaagagttgtagattgcgatgggctaactatttgaaacctgacatcaagagaggagagtttagctatgaggaggaacagattatcatcatgctacacgcttctcgcggcaacaagtggtcagtcatagcgagacatttgcccaaaagaacagataacgagattaagaactactggaacacgcatctcaaaaagctcctgatcgataagggaatcgatcccgtgacccacaagccacttgcctatgactcaaacccggatgagcaatcgcaatcgggttccatctctccaaagtctcttcctccttcaagctccaaaaatgtaccggagataaccagcagtgacgagacaccgaaatatgatgcttccttgagctccaagaaacgttgttttaagagatcgagttctacatcaaaactgttaaacaaagttgcagctagggcttcttccatgggaactatactaggcgcctccatcgaaggaaccttgatcagctctacaccgttgtcttcatgtctaaatgatgacttttctgaaacaagtcaatttcagatggaagaatttgatccattctatcagtcatctgaacacataattgatcatatgaaagaagatatcagcatcaacaattccgaatacgatttctcgcagtttctcgagcagtttagtaacaacgaaggggaagaagctgacaatactggaggaggatataaccaagatcttcttatgtctgatgtctcatcaacaagcgttgatgaagacgagatgatgcaaaacataactggttggtcaaattatctccttgaccattccgatttcaattatgacacgagccaagattacgacgacaagaacttcatatgatccgttgattgcttaccggactagagttgaccggttaatgtcatatggttctcttagatatttgtcaagttatagtaaaggtccactatagggtcactatatattaatattcagtaatggattctcttagttagagaaccttgtgatgccgtggatcaattagtatttgatttgcgggagacacgagttttttttccttctattgttgtttgtggatttacgtactataaataataaataaaacacccatttgattgc

SEQ ID NO: 83192 - protein, 336 aa, Arabidopsis thaliana
  peptide (1)..(336): Ceres Seq. ID no. 12669175
  misc_feature (14)..(61): Pfam Name: Myb-like DNA-binding domain Pfam Description: Myb-like DNA-binding domain
  misc_feature (1)..(336): Homolog of NCBI NO: 15240838 NR Description: myb family transcription factor; protein id: supported by cDNA: gi_14334943, supported by cDNA: gi_16323379, by cDNA: gi_3941435 [Arabidopsis thaliana]
  misc_feature (1)..(336): Homolog of NCBI NO: 11358683 NR Description: probable transcription factor MYB29 [imported] - thaliana >gi|3941436|gb|AAC83594.1| putative transcription factor
  misc_feature (1)..(336): Homolog of NCBI NO: 15240839 NR Description: myb DNA-binding protein (MYB76); protein id: supported by cDNA: gi_5823316 [Arabidopsis thaliana] putative transcription factor [Arabidopsis thaliana]
  misc_feature (1)..(265): Homolog of NCBI NO: 15240251 NR Description: myb-related transcription factor(mixta), protein id: At5g61420.1, supported by cDNA: gi_5823328 thaliana] >gi|5823329|gb|AAD53103.1|AF175998_1 putative
  misc_feature (1)..(306): Homolog of NCBI NO: 15221803 NR Description: myb family transcription factor; protein id:
  misc_feature (1)..(230): Homolog of NCBI NO: 15221129 NR Description: putative transcription factor; protein id: supported by cDNA: gi_15375306 [Arabidopsis thaliana]
  misc_feature (1)..(260): Homolog of NCBI NO: 15239466 NR Description: receptor-like protein kinase(ATR1), putative; id: At5g60890.1 [Arabidopsis thaliana] >gi|3150037|gb|AAC16897.1| [Arabidopsis thaliana] >gi|10177313|dbj|BAB10639.1| ATR1
  misc_feature (1)..(334): Homolog of NCBI NO: 27125807 NR Description: MYB27 protein [Oryza sativa (japonica
  misc_feature (1)..(128): Homolog of NCBI NO: 38344966 NR Description: OSJNBa0072F16.11 [Oryza sativa (japonica
  misc_feature (1)..(128): Homolog of NCBI NO: 15242272 NR Description: myb family transcription factor; protein id: supported by cDNA: gi_13877708 [Arabidopsis thaliana]
MSRKPCCVGEGLKKGAWTAEEDKKLISYIHEHGEGGWRDIPQKAGLKRCGKSCRLRWANYLKPDIKRGEFSYEEEQIIIMLHASRGNKWSVIARHLPKRTDNEIKNYWNTHLKKLLIDKGIDPVTHKPLAYDSNPDEQSQSGSISPKSLPPSSSKNVPEITSSDETPKYDASLSSKKRCFKRSSSTSKLLNKVAARASSMGTILGASIEGTLISSTPLSSCLNDDFSETSQFQMEEFDPFYQSSEHIIDHMKEDISINNSEYDFSQFLEQFSNNEGEEADNTGGGYNQDLLMSDVSSTSVDEDEMMQNITGWSNYLLDHSDFNYDTSQDYDDKNFI

SEQ ID NO: 83193 - protein, 257 aa, Arabidopsis thaliana
  peptide (1)..(257): Ceres Seq. ID no. 12669176
  misc_feature (1)..(257): Homolog of NCBI NO: 15240838 NR Description: myb family transcription factor; protein id: supported by cDNA: gi_14334943, supported by cDNA: gi_16323379, by cDNA: gi_3941435 [Arabidopsis thaliana]
  misc_feature (1)..(257): Homolog of NCBI NO: 11358683 NR Description: probable transcription factor MYB29 [imported] - thaliana >gi|3941436|gb|AAC83594.1| putative transcription factor
  misc_feature (1)..(257): Homolog of NCBI NO: 15240839 NR Description: myb DNA-binding protein (MYB76); protein id: supported by cDNA: gi_5823316 [Arabidopsis thaliana] putative transcription factor [Arabidopsis thaliana]
  misc_feature (1)..(186): Homolog of NCBI NO: 15240251 NR Description: myb-related transcription factor(mixta), protein id: At5g61420.1, supported by cDNA: gi_5823328 thaliana] >gi|5823329|gb|AAD53103.1|AF175998_1 putative
  misc_feature (1)..(227): Homolog of NCBI NO: 15221803 NR Description: myb family transcription factor; protein id:
  misc_feature (1)..(151): Homolog of NCBI NO: 15221129 NR Description: putative transcription factor; protein id: supported by cDNA: gi_15375306 [Arabidopsis thaliana]
  misc_feature (1)..(181): Homolog of NCBI NO: 15239466 NR Description: receptor-like protein kinase(ATR1), putative; id: At5g60890.1 [Arabidopsis thaliana] >gi|3150037|gb|AAC16897.1| [Arabidopsis thaliana] >gi|10177313|dbj|BAB10639.1| ATR1
  misc_feature (1)..(255): Homolog of NCBI NO: 27125807 NR Description: MYB27 protein [Oryza sativa (japonica
  misc_feature (1)..(49): Homolog of NCBI NO: 38344966 NR Description: OSJNBa0072F16.11 [Oryza sativa (japonica
  misc_feature (1)..(49): Homolog of NCBI NO: 15242272 NR Description: myb family transcription factor; protein id: supported by cDNA: gi_13877708 [Arabidopsis thaliana]
MLHASRGNKWSVIARHLPKRTDNEIKNYWNTHLKKLLIDKGIDPVTHKPLAYDSNPDEQSQSGSISPKSLPPSSSKNVPEITSSDETPKYDASLSSKKRCFKRSSSTSKLLNKVAARASSMGTILGASIEGTLISSTPLSSCLNDDFSETSQFQMEEFDPFYQSSEHIIDHMKEDISINNSEYDFSQFLEQFSNNEGEEADNTGGGYNQDLLMSDVSSTSVDEDEMMQNITGWSNYLLDHSDFNYDTSQDYDDKNFI

SEQ ID NO: 83194 - DNA, 1017 bp, Arabidopsis thaliana
  misc_feature (1)..(1017): Ceres Seq. ID no. 12669177
  misc_feature: MA Experiment ID: 20000328 Result: Down-regulated in Transcription
  misc_feature: MA Experiment 20000328 PARAMETER Experiment Name: At_42deg_Heat_Sub_P Parameter: Age (day) Value: 14
  misc_feature: MA Experiment 20000328 PARAMETER Experiment Name: At_42deg_Heat_Sub_P Parameter: Organism Value: A. thaliana
  misc_feature: MA Experiment 20000328 PARAMETER Experiment Name: At_42deg_Heat_Sub_P Parameter: Plant Line Value: WS
  misc_feature: MA Experiment 20000328 PARAMETER Experiment Name: At_42deg_Heat_Sub_P Parameter: Temperature (deg C) Value: 42 vs. 22
  misc_feature: MA Experiment 20000328 PARAMETER Experiment Name: At_42deg_Heat_Sub_P Parameter: Timepoint (hr) Value: 6
  misc_feature: MA Experiment 20000328 PARAMETER Experiment Name: At_42deg_Heat_Sub_P Parameter: Tissue Value: Aerial
  misc_feature: MA Experiment ID: 20000347 Result: Down-regulated in Transcription
  misc_feature: MA Experiment 20000347 PARAMETER Experiment Name: At_2mM_SA_Sub_P Parameter: Age (day) Value: 14
  misc_feature: MA Experiment 20000347 PARAMETER Experiment Name: At_2mM_SA_Sub_P Parameter: Organism Value: A. thaliana
  misc_feature: MA Experiment 20000347 PARAMETER Experiment Name: At_2mM_SA_Sub_P Parameter: Plant Line Value: WS
  misc_feature: MA Experiment 20000347 PARAMETER Experiment Name: At_2mM_SA_Sub_P Parameter: Timepoint (hr) Value: 6
  misc_feature: MA Experiment 20000347 PARAMETER Experiment Name: At_2mM_SA_Sub_P Parameter: Tissue Value: Aerial
  misc_feature: MA Experiment 20000347 PARAMETER Experiment Name: At_2mM_SA_Sub_P Parameter: Treatment Value: 2mM SA vs. No Treatment
  misc_feature: MA Experiment ID: 20000440 Result: Down-regulated in Transcription
  misc_feature: MA Experiment 20000440 PARAMETER Experiment Name: At_Closed-Flower__Sub_P Parameter: Tissue Value: Closed Flower vs. Whole Plant
atgtcaaagagaccatattgtatcggagaaggactgaagaaaggagcatggactacagaagaggataaaaaactcatctcttatatccacgaccacggtgaaggaggctggcgtgacattccagaaaaagctgggctgaaacggtgtggaaagagttgtagattacggtggactaactatttgaaaccagatatcaagagaggagagtttagctatgaggaagagcagattatcatcatgcttcatgcatctcgtggcaataagtggtctgtcatagctagacatttgccaaaaagaacggataacgaggtcaaaaactattggaacacacatctcaagaaacgtttaatcgatgatggcattgatcccgtgacacacaagccactagcttcttctaaccctaatccagttgagcccatgaagttcgatttccaaaagaaatccaatcaggatgagcactcttcacagtctagttctacaactccagcatctcttcccctttcctcgaatttgaacagtgttaaatccaaaattagcagtggtgagacgcagatagaaagtggtcacgtgagctgcaagaaacgttttggacgatcgagctctacatcaaggttgttaaacaaagttgcagctagagcttcttccatcggcaacatcttatcaacatccatagaaggaaccttgagatctcctgcatcatcttcaggactcccagactcgttctctcaatcatatgagtacatgatcgataacaaagaagatctcggtacgagcattgatctcaacatccccgagtatgatttcccacagtttcttgagcaactcattaacgatgacgacgaaaatgagaacattgttgggcccgaacaagatctccttatgtccgatttcccatcaacattcgttgatgaagacgatatacttggagacataaccagttggtcaacttatcttcttgaccatcccaattttatgtatgaatcggatcaagattccgacgagaagaacttcttatga

SEQ ID NO: 83195 - protein, 338 aa, Arabidopsis thaliana
  peptide (1)..(338): Ceres Seq. ID no. 12669178
  misc_feature (14)..(61): Pfam Name: Myb-like DNA-binding domain Pfam Description: Myb-like DNA-binding domain
  misc_feature (1)..(338): Homolog of NCBI NO: 15240839 NR Description: myb DNA-binding protein (MYB76); protein id: supported by cDNA: gi_5823316 [Arabidopsis thaliana] putative transcription factor [Arabidopsis thaliana]
  misc_feature (1)..(338): Homolog of NCBI NO: 15240838 NR Description: myb family transcription factor; protein id: supported by cDNA: gi_14334943, supported by cDNA: gi_16323379, by cDNA: gi_3941435 [Arabidopsis thaliana]
  misc_feature (1)..(338): Homolog of NCBI NO: 11358683 NR Description: probable transcription factor MYB29 [imported] - thaliana >gi|3941436|gb|AAC83594.1| putative transcription factor
  misc_feature (1)..(301): Homolog of NCBI NO: 15240251 NR Description: myb-related transcription factor(mixta), protein id: At5g61420.1, supported by cDNA: gi_5823328 thaliana] >gi|5823329|gb|AAD53103.1|AF175998_1 putative
  misc_feature (1)..(331): Homolog of NCBI NO: 15221803 NR Description: myb family transcription factor; protein id:
  misc_feature (1)..(260): Homolog of NCBI NO: 15239466 NR Description: receptor-like protein kinase(ATR1), putative; id: At5g60890.1 [Arabidopsis thaliana] >gi|3150037|gb|AAC16897.1| [Arabidopsis thaliana] >gi|10177313|dbj|BAB10639.1| ATR1
  misc_feature (1)..(177): Homolog of NCBI NO: 15221129 NR Description: putative transcription factor; protein id: supported by cDNA: gi_15375306 [Arabidopsis thaliana]
  misc_feature (1)..(159): Homolog of NCBI NO: 15242272 NR Description: myb family transcription factor; protein id: supported by cDNA: gi_13877708 [Arabidopsis thaliana]
  misc_feature (1)..(174): Homolog of NCBI NO: 13346188 NR Description: GHMYB25 [Gossypium hirsutum]
  misc_feature (1)..(128): Homolog of NCBI NO: 38344966 NR Description: OSJNBa0072F16.11 [Oryza sativa (japonica
MSKRPYCIGEGLKKGAWTTEEDKKLISYIHDHGEGGWRDIPEKAGLKRCGKSCRLRWTNYLKPDIKRGEFSYEEEQIIIMLHASRGNKWSVIARHLPKRTDNEVKNYWNTHLKKRLIDDGIDPVTHKPLASSNPNPVEPMKFDFQKKSNQDEHSSQSSSTTPASLPLSSNLNSVKSKISSGETQIESGHVSCKKRFGRSSSTSRLLNKVAARASSIGNILSTSIEGTLRSPASSSGLPDSFSQSYEYMIDNKEDLGTSIDLNIPEYDFPQFLEQLINDDDENENIVGPEQDLLMSDFPSTFVDEDDILGDITSWSTYLLDHPNFMYESDQDSDEKNFL

SEQ ID NO: 83196 - protein, 259 aa, Arabidopsis thaliana
  peptide (1)..(259): Ceres Seq. ID no. 12669179
  misc_feature (1)..(259): Homolog of NCBI NO: 15240839 NR Description: myb DNA-binding protein (MYB76); protein id: supported by cDNA: gi_5823316 [Arabidopsis thaliana] putative transcription factor [Arabidopsis thaliana]
  misc_feature (1)..(259): Homolog of NCBI NO: 15240838 NR Description: myb family transcription factor; protein id: supported by cDNA: gi_14334943, supported by cDNA: gi_16323379, by cDNA: gi_3941435 [Arabidopsis thaliana]
  misc_feature (1)..(259): Homolog of NCBI NO: 11358683 NR Description: probable transcription factor MYB29 [imported] - thaliana >gi|3941436|gb|AAC83594.1| putative transcription factor
  misc_feature (1)..(222): Homolog of NCBI NO: 15240251 NR Description: myb-related transcription factor(mixta), protein id: At5g61420.1, supported by cDNA: gi_5823328 thaliana] >gi|5823329|gb|AAD53103.1|AF175998_1 putative
  misc_feature (1)..(252): Homolog of NCBI NO: 15221803 NR Description: myb family transcription factor; protein id:
  misc_feature (1)..(181): Homolog of NCBI NO: 15239466 NR Description: receptor-like protein kinase(ATR1), putative; id: At5g60890.1 [Arabidopsis thaliana] >gi|3150037|gb|AAC16897.1| [Arabidopsis thaliana] >gi|10177313|dbj|BAB10639.1| ATR1
  misc_feature (1)..(98): Homolog of NCBI NO: 15221129 NR Description: putative transcription factor; protein id: supported by cDNA: gi_15375306 [Arabidopsis thaliana]
  misc_feature (1)..(80): Homolog of NCBI NO: 15242272 NR Description: myb family transcription factor; protein id: supported by cDNA: gi_13877708 [Arabidopsis thaliana]
  misc_feature (1)..(95): Homolog of NCBI NO: 13346188 NR Description: GHMYB25 [Gossypium hirsutum]
  misc_feature (1)..(49): Homolog of NCBI NO: 38344966 NR Description: OSJNBa0072F16.11 [Oryza sativa (japonica
MLHASRGNKWSVIARHLPKRTDNEVKNYWNTHLKKRLIDDGIDPVTHKPLASSNPNPVEPMKFDFQKKSNQDEHSSQSSSTTPASLPLSSNLNSVKSKISSGETQIESGHVSCKKRFGRSSSTSRLLNKVAARASSIGNILSTSIEGTLRSPASSSGLPDSFSQSYEYMIDNKEDLGTSIDLNIPEYDFPQFLEQLINDDDENENIVGPEQDLLMSDFPSTFVDEDDILGDITSWSTYLLDHPNFMYESDQDSDEKNFL

SEQ ID NO: 83197 - protein, 199 aa, Arabidopsis thaliana
  peptide (1)..(199): Ceres Seq. ID no. 12669180
  misc_feature (1)..(199): Homolog of NCBI NO: 15240839 NR Description: myb DNA-binding protein (MYB76); protein id: supported by cDNA: gi_5823316 [Arabidopsis thaliana] putative transcription factor [Arabidopsis thaliana]
  misc_feature (1)..(199): Homolog of NCBI NO: 15240838 NR Description: myb family transcription factor; protein id: supported by cDNA: gi_14334943, supported by cDNA: gi_16323379, by cDNA: gi_3941435 [Arabidopsis thaliana]
  misc_feature (1)..(199): Homolog of NCBI NO: 11358683 NR Description: probable transcription factor MYB29 [imported] - thaliana >gi|3941436|gb|AAC83594.1| putative transcription factor
  misc_feature (1)..(162): Homolog of NCBI NO: 15240251 NR Description: myb-related transcription factor(mixta), protein id: At5g61420.1, supported by cDNA: gi_5823328 thaliana] >gi|5823329|gb|AAD53103.1|AF175998_1 putative
  misc_feature (1)..(192): Homolog of NCBI NO: 15221803 NR Description: myb family transcription factor; protein id:
  misc_feature (1)..(121): Homolog of NCBI NO: 15239466 NR Description: receptor-like protein kinase(ATR1), putative; id: At5g60890.1 [Arabidopsis thaliana] >gi|3150037|gb|AAC16897.1| [Arabidopsis thaliana] >gi|10177313|dbj|BAB10639.1| ATR1
  misc_feature (1)..(38): Homolog of NCBI NO: 15221129 NR Description: putative transcription factor; protein id: supported by cDNA: gi_15375306 [Arabidopsis thaliana]
  misc_feature (1)..(20): Homolog of NCBI NO: 15242272 NR Description: myb family transcription factor; protein id: supported by cDNA: gi_13877708 [Arabidopsis thaliana]
  misc_feature (1)..(35): Homolog of NCBI NO: 13346188 NR Description: GHMYB25 [Gossypium hirsutum]
  misc_feature (1)..(46): Homolog of NCBI NO: 28628947 NR Description: MYB1 [Dendrobium sp. XMW-2002-1]
MKFDFQKKSNQDEHSSQSSSTTPASLPLSSNLNSVKSKISSGETQIESGHVSCKKRFGRSSSTSRLLNKVAARASSIGNILSTSIEGTLRSPASSSGLPDSFSQSYEYMIDNKEDLGTSIDLNIPEYDFPQFLEQLINDDDENENIVGPEQDLLMSDFPSTFVDEDDILGDITSWSTYLLDHPNFMYESDQDSDEKNFL

SEQ ID NO: 83198 - DNA, 1407 bp, Arabidopsis thaliana
  misc_feature (1)..(1407): Ceres Seq. ID no. 12669181
  misc_feature: MA Experiment ID: 20000315 Result: Down-regulated in Transcription
  misc_feature: MA Experiment 20000315 PARAMETER Experiment Name: At_14day_Shoots-Roots_Sub_P Parameter: Age (day) Value: 14
  misc_feature: MA Experiment 20000315 PARAMETER Experiment Name: At_14day_Shoots-Roots_Sub_P Parameter: Organism Value: A. thaliana
  misc_feature: MA Experiment 20000315 PARAMETER Experiment Name: At_14day_Shoots-Roots_Sub_P Parameter: Plant Line Value: WS
  misc_feature: MA Experiment 20000315 PARAMETER Experiment Name: At_14day_Shoots-Roots_Sub_P Parameter: Tissue Value: Shoots vs. Whole Plant
  misc_feature: MA Experiment ID: 20000347 Result: Up-regulated in Transcription
  misc_feature: MA Experiment 20000347 PARAMETER Experiment Name: At_2mM_SA_Sub_P Parameter: Age (day) Value: 14
  misc_feature: MA Experiment 20000347 PARAMETER Experiment Name: At_2mM_SA_Sub_P Parameter: Organism Value: A. thaliana
  misc_feature: MA Experiment 20000347 PARAMETER Experiment Name: At_2mM_SA_Sub_P Parameter: Plant Line Value: WS
  misc_feature: MA Experiment 20000347 PARAMETER Experiment Name: At_2mM_SA_Sub_P Parameter: Timepoint (hr) Value: 6
  misc_feature: MA Experiment 20000347 PARAMETER Experiment Name: At_2mM_SA_Sub_P Parameter: Tissue Value: Aerial
  misc_feature: MA Experiment 20000347 PARAMETER Experiment Name: At_2mM_SA_Sub_P Parameter: Treatment Value: 2mM SA vs. No Treatment
atggatccagaggataggtccgagattgccttcttcgacgttgagacgactgtaccaaaacgaggtcaacgtttcgcgattctagaattcgggtcaatcctcgtttgcccgaagaagctaacggagctccgaagctacacgactctcgtccaacctgcagatttgagtctcatatcttccttgtccgtgaggtgcaatggtatcaaacgtgacgacgtcgttttggcacctctgtttgccgacatcgctgatactgtctacgacattctccatgggaggatttgggcaggtcataacatattgaggtttgattgtgcaaggatcagagaagcatttgcagagattggtcgtcaaccacccgagccaaaaggcgccattgattcattgggtttgctaactcagaagtttggtagaagagctggtgatatgaagatggcaactttggctagatatttcggactcgggaatcagacgcataggagcctggatgatgttcgaatgaatcttgaggttctcaaatattgtgctactgtcttgttcttggagtcgagtctcccatatgcacatgtagataattcggtatctcctgaaactattagttcaaggagacgtattgatgcatctcgcgagggtaatactgtaacgacctctgttaggctaccatccattagcgagaacagtgcagctcagccagatccgttcaacatgagcgtcttgaggaatgaaatggcttctgacaaccatattcaatcagacattctcatggaagaagaacaaattgaaccctctgatgttgtcgcctctgagaataccagtgaccatgagggtttcttgacgcctgacgcgatgtctctttcaaacatcaaagcgatgctcttcccgttttatcctggaagccaaatgatgaaactaaagctactccacggcgattcccctctgcagctctactgttcttatctgaaaatacggtttggagtcaatgggaagtttctggataacaccgggagacggaggttaaactttgttgttgatctgaatccaagcctttacagtatactcgaagcatgtgacagtaatgcgcagaaactatctgttgattcaggttccacttctgagtggaacccggtcgtgaatccaatgaagggatttgttaactaccctaacgcaaggatacatattgcgacagagataaatggagatgaagctcggtatgcaacagagatacaccaaagagagtcctctggagctactcagaaactaatcttcagcaacccgaacaatgaggagctcgaatcgttgctgaccacgggaagtgttgttgatgcattcttgtctcttgaaccgtatgattatcagcagaaagctggaatccgccttgttgccaaaaagctagtcattcagtcgtaa

SEQ ID NO: 83199 - protein, 468 aa, Arabidopsis thaliana
  peptide (1)..(468): Ceres Seq. ID no. 12669182
  misc_feature (1)..(468): Homolog of NCBI NO: 15240840 NR Description: exonuclease-like protein; protein id: At5g07710.1
  misc_feature (4)..(466): Homolog of NCBI NO: 30697522 NR Description: exonuclease protein family [Arabidopsis thaliana]
  misc_feature (8)..(468): Homolog of NCBI NO: 37534222 NR Description: putative exonuclease [Oryza sativa (japonica group)] >gi|15451563|gb|AAK98687.1| Putative exonuclease [Oryza >gi|31432001|gb|AAP53700.1| putative exonuclease [Oryza sativa
  misc_feature (4)..(186): Homolog of NCBI NO: 37534220 NR Description: putative exonuclease [Oryza sativa (japonica group)] >gi|15451562|gb|AAK98686.1| Putative exonuclease [Oryza >gi|31432000|gb|AAP53699.1| putative exonuclease [Oryza sativa
  misc_feature (304)..(466): Homolog of NCBI NO: 37534220 NR Description: putative exonuclease [Oryza sativa (japonica group)] >gi|15451562|gb|AAK98686.1| Putative exonuclease [Oryza >gi|31432000|gb|AAP53699.1| putative exonuclease [Oryza sativa
  misc_feature (182)..(466): Homolog of NCBI NO: 9757860 NR Description: exonuclease-like protein [Arabidopsis thaliana]
  misc_feature (4)..(270): Homolog of NCBI NO: 9757860 NR Description: exonuclease-like protein [Arabidopsis thaliana]
  misc_feature (4)..(263): Homolog of NCBI NO: 15221225 NR Description: putative exonuclease; protein id: At1g74390.1, by cDNA: gi_20466501 [Arabidopsis thaliana]
  misc_feature (7)..(204): Homolog of NCBI NO: 15236050 NR Description: hypothetical protein; protein id: At4g39810.1
  misc_feature (6)..(203): Homolog of NCBI NO: 9945064 NR Description: similar to Arabidopsis chromosome BAC genomics
MDPEDRSEIAFFDVETTVPKRGQRFAILEFGSILVCPKKLTELRSYTTLVQPADLSLISSLSVRCNGIKRDDVVLAPLFADIADTVYDILHGRIWAGHNILRFDCARIREAFAEIGRQPPEPKGAIDSLGLLTQKFGRRAGDMKMATLARYFGLGNQTHRSLDDVRMNLEVLKYCATVLFLESSLPYAHVDNSVSPETISSRRRIDASREGNTVTTSVRLPSISENSAAQPDPFNMSVLRNEMASDNHIQSDILMEEEQIEPSDVVASENTSDHEGFLTPDAMSLSNIKAMLFPFYPGSQMMKLKLLHGDSPLQLYCSYLKIRFGVNGKFLDNTGRRRLNFVVDLNPSLYSILEACDSNAQKLSVDSGSTSEWNPVVNPMKGFVNYPNARIHIATEINGDEARYATEIHQRESSGATQKLIFSNPNNEELESLLTTGSVVDAFLSLEPYDYQQKAGIRLVAKKLVIQS

SEQ ID NO: 83200 - protein, 326 aa, Arabidopsis thaliana
  peptide (1)..(326): Ceres Seq. ID no. 12669183
  misc_feature (1)..(326): Homolog of NCBI NO: 15240840 NR Description: exonuclease-like protein; protein id: At5g07710.1
  misc_feature (1)..(324): Homolog of NCBI NO: 30697522 NR Description: exonuclease protein family [Arabidopsis thaliana]
  misc_feature (1)..(326): Homolog of NCBI NO: 37534222 NR Description: putative exonuclease [Oryza sativa (japonica group)] >gi|15451563|gb|AAK98687.1| Putative exonuclease [Oryza >gi|31432001|gb|AAP53700.1| putative exonuclease [Oryza sativa
  misc_feature (1)..(44): Homolog of NCBI NO: 37534220 NR Description: putative exonuclease [Oryza sativa (japonica group)] >gi|15451562|gb|AAK98686.1| Putative exonuclease [Oryza >gi|31432000|gb|AAP53699.1| putative exonuclease [Oryza sativa
  misc_feature (162)..(324): Homolog of NCBI NO: 37534220 NR Description: putative exonuclease [Oryza sativa (japonica group)] >gi|15451562|gb|AAK98686.1| Putative exonuclease [Oryza >gi|31432000|gb|AAP53699.1| putative exonuclease [Oryza sativa
  misc_feature (40)..(324): Homolog of NCBI NO: 9757860 NR Description: exonuclease-like protein [Arabidopsis thaliana]
  misc_feature (1)..(128): Homolog of NCBI NO: 9757860 NR Description: exonuclease-like protein [Arabidopsis thaliana]
  misc_feature (1)..(121): Homolog of NCBI NO: 15221225 NR Description: putative exonuclease; protein id: At1g74390.1, by cDNA: gi_20466501 [Arabidopsis thaliana]
  misc_feature (1)..(62): Homolog of NCBI NO: 15236050 NR Description: hypothetical protein; protein id: At4g39810.1
  misc_feature (1)..(61): Homolog of NCBI NO: 9945064 NR Description: similar to Arabidopsis chromosome BAC genomics
MKMATLARYFGLGNQTHRSLDDVRMNLEVLKYCATVLFLESSLPYAHVDNSVSPETISSRRRIDASREGNTVTTSVRLPSISENSAAQPDPFNMSVLRNEMASDNHIQSDILMEEEQIEPSDVVASENTSDHEGFLTPDAMSLSNIKAMLFPFYPGSQMMKLKLLHGDSPLQLYCSYLKIRFGVNGKFLDNTGRRRLNFVVDLNPSLYSILEACDSNAQKLSVDSGSTSEWNPVVNPMKGFVNYPNARIHIATEINGDEARYATEIHQRESSGATQKLIFSNPNNEELESLLTTGSVVDAFLSLEPYDYQQKAGIRLVAKKLVIQS

SEQ ID NO: 83201 - protein, 324 aa, Arabidopsis thaliana
  peptide (1)..(324): Ceres Seq. ID no. 12669184
  misc_feature (1)..(324): Homolog of NCBI NO: 15240840 NR Description: exonuclease-like protein; protein id: At5g07710.1
  misc_feature (1)..(322): Homolog of NCBI NO: 30697522 NR Description: exonuclease protein family [Arabidopsis thaliana]
  misc_feature (1)..(324): Homolog of NCBI NO: 37534222 NR Description: putative exonuclease [Oryza sativa (japonica group)] >gi|15451563|gb|AAK98687.1| Putative exonuclease [Oryza >gi|31432001|gb|AAP53700.1| putative exonuclease [Oryza sativa
  misc_feature (1)..(42): Homolog of NCBI NO: 37534220 NR Description: putative exonuclease [Oryza sativa (japonica group)] >gi|15451562|gb|AAK98686.1| Putative exonuclease [Oryza >gi|31432000|gb|AAP53699.1| putative exonuclease [Oryza sativa
  misc_feature (160)..(322): Homolog of NCBI NO: 37534220 NR Description: putative exonuclease [Oryza sativa (japonica group)] >gi|15451562|gb|AAK98686.1| Putative exonuclease [Oryza >gi|31432000|gb|AAP53699.1| putative exonuclease [Oryza sativa
  misc_feature (38)..(322): Homolog of NCBI NO: 9757860 NR Description: exonuclease-like protein [Arabidopsis thaliana]
  misc_feature (1)..(126): Homolog of NCBI NO: 9757860 NR Description: exonuclease-like protein [Arabidopsis thaliana]
  misc_feature (1)..(119): Homolog of NCBI NO: 15221225 NR Description: putative exonuclease; protein id: At1g74390.1, by cDNA: gi_20466501 [Arabidopsis thaliana]
  misc_feature (1)..(60): Homolog of NCBI NO: 15236050 NR Description: hypothetical protein; protein id: At4g39810.1
  misc_feature (1)..(59): Homolog of NCBI NO: 9945064 NR Description: similar to Arabidopsis chromosome BAC genomics
MATLARYFGLGNQTHRSLDDVRMNLEVLKYCATVLFLESSLPYAHVDNSVSPETISSRRRIDASREGNTVTTSVRLPSISENSAAQPDPFNMSVLRNEMASDNHIQSDILMEEEQIEPSDVVASENTSDHEGFLTPDAMSLSNIKAMLFPFYPGSQMMKLKLLHGDSPLQLYCSYLKIRFGVNGKFLDNTGRRRLNFVVDLNPSLYSILEACDSNAQKLSVDSGSTSEWNPVVNPMKGFVNYPNARIHIATEINGDEARYATEIHQRESSGATQKLIFSNPNNEELESLLTTGSVVDAFLSLEPYDYQQKAGIRLVAKKLVIQS

SEQ ID NO: 83202 - DNA, 1416 bp, Arabidopsis thaliana
  misc_feature (1)..(1416): Ceres Seq. ID no. 12669185
  misc_feature: MA Experiment ID: 20000173 Result: Down-regulated in Transcription
  misc_feature: MA Experiment 20000173 PARAMETER Experiment Name: At_42deg_Heat_P Parameter: Age (day) Value: 14
  misc_feature: MA Experiment 20000173 PARAMETER Experiment Name: At_42deg_Heat_P Parameter: Organism Value: A. thaliana
  misc_feature: MA Experiment 20000173 PARAMETER Experiment Name: At_42deg_Heat_P Parameter: Plant Line Value: WS
  misc_feature: MA Experiment 20000173 PARAMETER Experiment Name: At_42deg_Heat_P Parameter: Temperature (deg C) Value: 42 vs. 22
  misc_feature: MA Experiment 20000173 PARAMETER Experiment Name: At_42deg_Heat_P Parameter: Timepoint (hr) Value: 6
  misc_feature: MA Experiment 20000173 PARAMETER Experiment Name: At_42deg_Heat_P Parameter: Tissue Value: Aerial
  misc_feature: MA Experiment ID: 20000179 Result: Up-regulated in Transcription
  misc_feature: MA Experiment 20000179 PARAMETER Experiment Name: At_Germinating_Seeds_P Parameter: Age (hr) Value: 6 vs. 0
  misc_feature: MA Experiment 20000179 PARAMETER Experiment Name: At_Germinating_Seeds_P Parameter: Tissue Value: Germinating Seeds
  misc_feature: MA Experiment ID: 20000180 Result: Up-regulated in Transcription
  misc_feature: MA Experiment 20000180 PARAMETER Experiment Name: At_Germinating_Seeds_P Parameter: Age (hr) Value: 24 vs. 0
  misc_feature: MA Experiment 20000180 PARAMETER Experiment Name: At_Germinating_Seeds_P Parameter: Tissue Value: Germinating Seeds
  misc_feature: MA Experiment ID: 20000227 Result: Up-regulated in Transcription
  misc_feature: MA Experiment 20000227 PARAMETER Experiment Name: At_Root-Tips-vs-Tops_P Parameter: Tissue Value: Root Tips vs. Root Tops
  misc_feature: MA Experiment ID: 20000234 Result: Up-regulated in Transcription
  misc_feature: MA Experiment 20000234 PARAMETER Experiment Name: At_Siliques_P Parameter: Age (day) Value: 21
  misc_feature: MA Experiment 20000234 PARAMETER Experiment Name: At_Siliques_P Parameter: Organism Value: A. thaliana
  misc_feature: MA Experiment 20000234 PARAMETER Experiment Name: At_Siliques_P Parameter: Plant Line Value: WS
  misc_feature: MA Experiment 20000234 PARAMETER Experiment Name: At_Siliques_P Parameter: Tissue Value: Less Than 5mm Siliques vs. Whole Plant
  misc_feature: MA Experiment ID: 20000235 Result: Up-regulated in Transcription
  misc_feature: MA Experiment 20000235 PARAMETER Experiment Name: At_Siliques_P Parameter: Age (day) Value: 21
  misc_feature: MA Experiment 20000235 PARAMETER Experiment Name: At_Siliques_P Parameter: Organism Value: A. thaliana
  misc_feature: MA Experiment 20000235 PARAMETER Experiment Name: At_Siliques_P Parameter: Plant Line Value: WS
  misc_feature: MA Experiment 20000235 PARAMETER Experiment Name: At_Siliques_P Parameter: Tissue Value: 5-10mm Siliques vs. Whole Plant
  misc_feature: MA Experiment ID: 20000265 Result: Up-regulated in Transcription
  misc_feature: MA Experiment 20000265 PARAMETER Experiment Name: At_Open_Flower_P Parameter: Age (day) Value: 21
  misc_feature: MA Experiment 20000265 PARAMETER Experiment Name: At_Open_Flower_P Parameter: Plant Line Value: WS
  misc_feature: MA Experiment 20000265 PARAMETER Experiment Name: At_Open_Flower_P Parameter: Tissue Value: Closed Flower vs. Whole Plant
  misc_feature: MA Experiment ID: 20000286 Result: Up-regulated in Transcription
  misc_feature: MA Experiment 20000286 PARAMETER Experiment Name: At_Open_Flower_P Parameter: Age (day) Value: 21
  misc_feature: MA Experiment 20000286 PARAMETER Experiment Name: At_Open_Flower_P Parameter: Plant Line Value: WS
  misc_feature: MA Experiment 20000286 PARAMETER Experiment Name: At_Open_Flower_P Parameter: Tissue Value: Half Open vs. Whole Plant
  misc_feature: MA Experiment ID: 20001557 Result: Up-regulated in Transcription
  misc_feature: MA Experiment 20001557 PARAMETER Experiment Name: At_Drought_Soil_Dry_P Parameter: Age (day) Value: 27
  misc_feature: MA Experiment 20001557 PARAMETER Experiment Name: At_Drought_Soil_Dry_P Parameter: Organism Value: A. thaliana
  misc_feature: MA Experiment 20001557 PARAMETER Experiment Name: At_Drought_Soil_Dry_P Parameter: Plant Line Value: WS
  misc_feature: MA Experiment 20001557 PARAMETER Experiment Name: At_Drought_Soil_Dry_P Parameter: Post Timepoint (hr) Value: 3
  misc_feature: MA Experiment 20001557 PARAMETER Experiment Name: At_Drought_Soil_Dry_P Parameter: Post-Treatment Value: Re-Water vs. No Drought
  misc_feature: MA Experiment 20001557 PARAMETER Experiment Name: At_Drought_Soil_Dry_P Parameter: Timepoint (day) Value: 13
  misc_feature: MA Experiment 20001557 PARAMETER Experiment Name: At_Drought_Soil_Dry_P Parameter: Treatment Value: Drought vs. No Drought
  misc_feature: MA Experiment ID: 20001911 Result: Down-regulated in Transcription
  misc_feature: MA Experiment 20001911 PARAMETER Experiment Name: At_Drought_Reproduction_P Parameter: Age (day) Value: 40
  misc_feature: MA Experiment 20001911 PARAMETER Experiment Name: At_Drought_Reproduction_P Parameter: Organism Value: A. thaliana
  misc_feature: MA Experiment 20001911 PARAMETER Experiment Name: At_Drought_Reproduction_P Parameter: Plant Line Value: WS
  misc_feature: MA Experiment 20001911 PARAMETER Experiment Name: At_Drought_Reproduction_P Parameter: Timepoint (day) Value: 10
  misc_feature: MA Experiment 20001911 PARAMETER Experiment Name: At_Drought_Reproduction_P Parameter: Tissue Value: Flowers
  misc_feature: MA Experiment 20001911 PARAMETER Experiment Name: At_Drought_Reproduction_P Parameter: Treatment Value: Drought vs. No Drought
gatcaaactgttttatccaagttacaacaaaaatgggaaaggaggacggtttcaggactcagaagcgcgtatcaacagcttcctccgccgccgccggcgttcttccgacgacgatggcgagtggtggagtaaggagaccaccaccacgtggtagacagatccaaaagacgttcaacaacgtgaaaatgacaatcctttgtggcttcgtcaccatcctcgtcctacgtggcactatcggcattaacttcggaacttccgacgccgacgtcgtaaaccagaacattatcgaagagactaaccgacttctagctgagatccgatccgattcggatcctaccgactcaaacgagccacctgattcggatcttgacctcaacatgacgtacactctcggacccaagatcactaactgggatcaaaaacggaaactttggttaacgcaaaacccagatttccccagtttcatcaatggtaaagctaaggttttgcttttaacaggttcgcctccaaaaccttgtgacaaccctattggtgatcattacctgctgaaatcggtgaagaacaagattgattattgtaggattcatgggattgagattgtgtataacatggctcatttagacaaggagcttgctgggtattgggcaaagcttccaatgatcaggagattgatgttgtctcatcctgaaattgaatggatttggtggatggacagtgatgctttgttcactgacatggtgtttgagattcctttgtctagatatgagaaccataacttggttattcatggatatcctgatttgttgtttgatcagaagtcttggattgctttgaatactggtagcttcttgtttaggaactgtcaatggtctttggatttgttggatgcttgggctccaatgggacctaaaggacctattcgggaagaagctgggaagattctcaccgcgaatcttaaaggaagaccggctttcgaagcggatgatcagtctgcattgatctatctgctgctttcgcagaaggagacgtggatggagaaagtgtttgtggagaatcagtactatcttcatgggttttgggaaggtttagtggataagtatgaggagatgatggagaagtaccatcccggtttgggagatgaaagatggccttttattactcactttgttggatgcaaaccgtgtgggagttatgctgattacgcggttgaacgttgcttgaagagtatggagcgagcattcaactttgcggataatcaagtgctcaaactgtatgggtttggtcacaggggattgttaagtcctaagatcaagaggatcagaaacgagacaacatttccattgaaattcgtagacaggtttgatattcggagaacaacaccgctcaagattgaagcacgaagctagcagctgatga

SEQ ID NO: 83203 - protein, 467 aa, Arabidopsis thaliana
  peptide (1)..(467): Ceres Seq. ID no. 12669186
  misc_feature (157)..(401): Pfam Name: galactosyl transferase GMA12/MNN10 family Pfam Description: galactosyl transferase GMA12/MNN10 family
  misc_feature (11)..(467): Homolog of NCBI NO: 15240848 NR Description: alpha galactosyltransferase protein; protein id: [Arabidopsis thaliana] >gi|9716848|emb|CAC01676.1| putative golgi [Arabidopsis thaliana] >gi|9759594|dbj|BAB11451.1| alpha
  misc_feature (11)..(467): Homolog of NCBI NO: 15221224 NR Description: putative alpha galactosyltransferase; protein id:
  misc_feature (102)..(457): Homolog of NCBI NO: 15221850 NR Description: alpha galactosyltransferase, putative; protein
  misc_feature (102)..(457): Homolog of NCBI NO: 25349326 NR Description: hypothetical protein F6A14.20 - Arabidopsis >gi|6730715|gb|AAF27110.1|AC011809_19 Similar to
  misc_feature (24)..(134): Homolog of NCBI NO: 15221850 NR Description: alpha galactosyltransferase, putative; protein
  misc_feature (24)..(134): Homolog of NCBI NO: 25349326 NR Description: hypothetical protein F6A14.20 - Arabidopsis >gi|6730715|gb|AAF27110.1|AC011809_19 Similar to
  misc_feature (87)..(134): Homolog of NCBI NO: 15221850 NR Description: alpha galactosyltransferase, putative; protein
  misc_feature (87)..(134): Homolog of NCBI NO: 25349326 NR Description: hypothetical protein F6A14.20 - Arabidopsis >gi|6730715|gb|AAF27110.1|AC011809_19 Similar to
  misc_feature (115)..(455): Homolog of NCBI NO: 18411962 NR Description: putative glycosyltransferase; protein id: supported by cDNA: gi_16209668 [Arabidopsis thaliana]
  misc_feature (115)..(455): Homolog of NCBI NO: 25349323 NR Description: probable glycosyltransferase [imported] - thaliana >gi|3892054|gb|AAC78266.1|AAC78266 putative [Arabidopsis thaliana] >gi|7269010|emb|CAB80743.1| putative
SNCFIQVTTKMGKEDGFRTQKRVSTASSAAAGVLPTTMASGGVRRPPPRGRQIQKTFNNVKMTILCGFVTILVLRGTIGINFGTSDADVVNQNIIEETNRLLAEIRSDSDPTDSNEPPDSDLDLNMTYTLGPKITNWDQKRKLWLTQNPDFPSFINGKAKVLLLTGSPPKPCDNPIGDHYLLKSVKNKIDYCRIHGIEIVYNMAHLDKELAGYWAKLPMIRRLMLSHPEIEWIWWMDSDALFTDMVFEIPLSRYENHNLVIHGYPDLLFDQKSWIALNTGSFLFRNCQWSLDLLDAWAPMGPKGPIREEAGKILTANLKGRPAFEADDQSALIYLLLSQKETWMEKVFVENQYYLHGFWEGLVDKYEEMMEKYHPGLGDERWPFITHFVGCKPCGSYADYAVERCLKSMERAFNFADNQVLKLYGFGHRGLLSPKIKRIRNETTFPLKFVDRFDIRRTTPLKIEARS

SEQ ID NO: 83204 - protein, 457 aa, Arabidopsis thaliana
  peptide (1)..(457): Ceres Seq. ID no. 12669187
  misc_feature (147)..(391): Pfam Name: galactosyl transferase GMA12/MNN10 family Pfam Description: galactosyl transferase GMA12/MNN10 family
  misc_feature (1)..(457): Homolog of NCBI NO: 15240848 NR Description: alpha galactosyltransferase protein; protein id: [Arabidopsis thaliana] >gi|9716848|emb|CAC01676.1| putative golgi [Arabidopsis thaliana] >gi|9759594|dbj|BAB11451.1| alpha
  misc_feature (1)..(457): Homolog of NCBI NO: 15221224 NR Description: putative alpha galactosyltransferase; protein id:
  misc_feature (92)..(447): Homolog of NCBI NO: 15221850 NR Description: alpha galactosyltransferase, putative; protein
  misc_feature (92)..(447): Homolog of NCBI NO: 25349326 NR Description: hypothetical protein F6A14.20 - Arabidopsis >gi|6730715|gb|AAF27110.1|AC011809_19 Similar to
  misc_feature (14)..(124): Homolog of NCBI NO: 15221850 NR Description: alpha galactosyltransferase, putative; protein
  misc_feature (14)..(124): Homolog of NCBI NO: 25349326 NR Description: hypothetical protein F6A14.20 - Arabidopsis >gi|6730715|gb|AAF27110.1|AC011809_19 Similar to
  misc_feature (77)..(124): Homolog of NCBI NO: 15221850 NR Description: alpha galactosyltransferase, putative; protein
  misc_feature (77)..(124): Homolog of NCBI NO: 25349326 NR Description: hypothetical protein F6A14.20 - Arabidopsis >gi|6730715|gb|AAF27110.1|AC011809_19 Similar to
  misc_feature (105)..(445): Homolog of NCBI NO: 18411962 NR Description: putative glycosyltransferase; protein id: supported by cDNA: gi_16209668 [Arabidopsis thaliana]
  misc_feature (105)..(445): Homolog of NCBI NO: 25349323 NR Description: probable glycosyltransferase [imported] - thaliana >gi|3892054|gb|AAC78266.1|AAC78266 putative [Arabidopsis thaliana] >gi|7269010|emb|CAB80743.1| putative
MGKEDGFRTQKRVSTASSAAAGVLPTTMASGGVRRPPPRGRQIQKTFNNVKMTILCGFVTILVLRGTIGINFGTSDADVVNQNIIEETNRLLAEIRSDSDPTDSNEPPDSDLDLNMTYTLGPKITNWDQKRKLWLTQNPDFPSFINGKAKVLLLTGSPPKPCDNPIGDHYLLKSVKNKIDYCRIHGIEIVYNMAHLDKELAGYWAKLPMIRRLMLSHPEIEWIWWMDSDALFTDMVFEIPLSRYENHNLVIHGYPDLLFDQKSWIALNTGSFLFRNCQWSLDLLDAWAPMGPKGPIREEAGKILTANLKGRPAFEADDQSALIYLLLSQKETWMEKVFVENQYYLHGFWEGLVDKYEEMMEKYHPGLGDERWPFITHFVGCKPCGSYADYAVERCLKSMERAFNFADNQVLKLYGFGHRGLLSPKIKRIRNETTFPLKFVDRFDIRRTTPLKIEARS

SEQ ID NO: 83205 - protein, 430 aa, Arabidopsis thaliana
  peptide (1)..(430): Ceres Seq. ID no. 12669188
  misc_feature (120)..(364): Pfam Name: galactosyl transferase GMA12/MNN10 family Pfam Description: galactosyl transferase GMA12/MNN10 family
  misc_feature (1)..(430): Homolog of NCBI NO: 15240848 NR Description: alpha galactosyltransferase protein; protein id: [Arabidopsis thaliana] >gi|9716848|emb|CAC01676.1| putative golgi [Arabidopsis thaliana] >gi|9759594|dbj|BAB11451.1| alpha
  misc_feature (1)..(430): Homolog of NCBI NO: 15221224 NR Description: putative alpha galactosyltransferase; protein id:
  misc_feature (65)..(420): Homolog of NCBI NO: 15221850 NR Description: alpha galactosyltransferase, putative; protein
  misc_feature (65)..(420): Homolog of NCBI NO: 25349326 NR Description: hypothetical protein F6A14.20 - Arabidopsis >gi|6730715|gb|AAF27110.1|AC011809_19 Similar to
  misc_feature (1)..(97): Homolog of NCBI NO: 15221850 NR Description: alpha galactosyltransferase, putative; protein
  misc_feature (1)..(97): Homolog of NCBI NO: 25349326 NR Description: hypothetical protein F6A14.20 - Arabidopsis >gi|6730715|gb|AAF27110.1|AC011809_19 Similar to
  misc_feature (50)..(97): Homolog of NCBI NO: 15221850 NR Description: alpha galactosyltransferase, putative; protein
  misc_feature (50)..(97): Homolog of NCBI NO: 25349326 NR Description: hypothetical protein F6A14.20 - Arabidopsis >gi|6730715|gb|AAF27110.1|AC011809_19 Similar to
  misc_feature (78)..(418): Homolog of NCBI NO: 18411962 NR Description: putative glycosyltransferase; protein id: supported by cDNA: gi_16209668 [Arabidopsis thaliana]
  misc_feature (78)..(418): Homolog of NCBI NO: 25349323 NR Description: probable glycosyltransferase [imported] - thaliana >gi|3892054|gb|AAC78266.1|AAC78266 putative [Arabidopsis thaliana] >gi|7269010|emb|CAB80743.1| putative
MASGGVRRPPPRGRQIQKTFNNVKMTILCGFVTILVLRGTIGINFGTSDADVVNQNIIEETNRLLAEIRSDSDPTDSNEPPDSDLDLNMTYTLGPKITNWDQKRKLWLTQNPDFPSFINGKAKVLLLTGSPPKPCDNPIGDHYLLKSVKNKIDYCRIHGIEIVYNMAHLDKELAGYWAKLPMIRRLMLSHPEIEWIWWMDSDALFTDMVFEIPLSRYENHNLVIHGYPDLLFDQKSWIALNTGSFLFRNCQWSLDLLDAWAPMGPKGPIREEAGKILTANLKGRPAFEADDQSALIYLLLSQKETWMEKVFVENQYYLHGFWEGLVDKYEEMMEKYHPGLGDERWPFITHFVGCKPCGSYADYAVERCLKSMERAFNFADNQVLKLYGFGHRGLLSPKIKRIRNETTFPLKFVDRFDIRRTTPLKIEARS

SEQ ID NO: 83206 - DNA, 1371 bp, Arabidopsis thaliana
  misc_feature (1)..(1371): Ceres Seq. ID no. 12669207
  misc_feature: MA Experiment ID: 20000314 Result: Down-regulated in Transcription
  misc_feature: MA Experiment 20000314 PARAMETER Experiment Name: At_14day_Shoots-Roots_Sub_P Parameter: Age (day) Value: 14
  misc_feature: MA Experiment 20000314 PARAMETER Experiment Name: At_14day_Shoots-Roots_Sub_P Parameter: Organism Value: A. thaliana
  misc_feature: MA Experiment 20000314 PARAMETER Experiment Name: At_14day_Shoots-Roots_Sub_P Parameter: Plant Line Value: WS
  misc_feature: MA Experiment 20000314 PARAMETER Experiment Name: At_14day_Shoots-Roots_Sub_P Parameter: Tissue Value: Roots vs. Whole Plant
  misc_feature: MA Experiment ID: 20000315 Result: Down-regulated in Transcription
  misc_feature: MA Experiment 20000315 PARAMETER Experiment Name: At_14day_Shoots-Roots_Sub_P Parameter: Age (day) Value: 14
  misc_feature: MA Experiment 20000315 PARAMETER Experiment Name: At_14day_Shoots-Roots_Sub_P Parameter: Organism Value: A. thaliana
  misc_feature: MA Experiment 20000315 PARAMETER Experiment Name: At_14day_Shoots-Roots_Sub_P Parameter: Plant Line Value: WS
  misc_feature: MA Experiment 20000315 PARAMETER Experiment Name: At_14day_Shoots-Roots_Sub_P Parameter: Tissue Value: Shoots vs. Whole Plant
  misc_feature: MA Experiment ID: 20000328 Result: Down-regulated in Transcription
  misc_feature: MA Experiment 20000328 PARAMETER Experiment Name: At_42deg_Heat_Sub_P Parameter: Age (day) Value: 14
  misc_feature: MA Experiment 20000328 PARAMETER Experiment Name: At_42deg_Heat_Sub_P Parameter: Organism Value: A. thaliana
  misc_feature: MA Experiment 20000328 PARAMETER Experiment Name: At_42deg_Heat_Sub_P Parameter: Plant Line Value: WS
  misc_feature: MA Experiment 20000328 PARAMETER Experiment Name: At_42deg_Heat_Sub_P Parameter: Temperature (deg C) Value: 42 vs. 22
  misc_feature: MA Experiment 20000328 PARAMETER Experiment Name: At_42deg_Heat_Sub_P Parameter: Timepoint (hr) Value: 6
  misc_feature: MA Experiment 20000328 PARAMETER Experiment Name: At_42deg_Heat_Sub_P Parameter: Tissue Value: Aerial
  misc_feature: MA Experiment ID: 20000347 Result: Up-regulated in Transcription
  misc_feature: MA Experiment 20000347 PARAMETER Experiment Name: At_2mM_SA_Sub_P Parameter: Age (day) Value: 14
  misc_feature: MA Experiment 20000347 PARAMETER Experiment Name: At_2mM_SA_Sub_P Parameter: Organism Value: A. thaliana
  misc_feature: MA Experiment 20000347 PARAMETER Experiment Name: At_2mM_SA_Sub_P Parameter: Plant Line Value: WS
  misc_feature: MA Experiment 20000347 PARAMETER Experiment Name: At_2mM_SA_Sub_P Parameter: Timepoint (hr) Value: 6
  misc_feature: MA Experiment 20000347 PARAMETER Experiment Name: At_2mM_SA_Sub_P Parameter: Tissue Value: Aerial
  misc_feature: MA Experiment 20000347 PARAMETER Experiment Name: At_2mM_SA_Sub_P Parameter: Treatment Value: 2mM SA vs. No Treatment
  misc_feature: MA Experiment ID: 20000352 Result: Up-regulated in Transcription
  misc_feature: MA Experiment 20000352 PARAMETER Experiment Name: At_Drought_Sub_P Parameter: Age (day) Value: 7
  misc_feature: MA Experiment 20000352 PARAMETER Experiment Name: At_Drought_Sub_P Parameter: Organism Value: A. thaliana
  misc_feature: MA Experiment 20000352 PARAMETER Experiment Name: At_Drought_Sub_P Parameter: Plant Line Value: WS
  misc_feature: MA Experiment 20000352 PARAMETER Experiment Name: At_Drought_Sub_P Parameter: Timepoint (hr) Value: 6
  misc_feature: MA Experiment 20000352 PARAMETER Experiment Name: At_Drought_Sub_P Parameter: Tissue Value: Whole Plant
  misc_feature: MA Experiment 20000352 PARAMETER Experiment Name: At_Drought_Sub_P Parameter: Treatment Value: Drought vs. No Drought
  misc_feature: MA Experiment ID: 20000355 Result: Down-regulated in Transcription
  misc_feature: MA Experiment 20000355 PARAMETER Experiment Name: At_Siliques_Sub_P Parameter: Age (day) Value: 21
  misc_feature: MA Experiment 20000355 PARAMETER Experiment Name: At_Siliques_Sub_P Parameter: Organism Value: A. thaliana
  misc_feature: MA Experiment 20000355 PARAMETER Experiment Name: At_Siliques_Sub_P Parameter: Plant Line Value: WS
  misc_feature: MA Experiment 20000355 PARAMETER Experiment Name: At_Siliques_Sub_P Parameter: Tissue Value: Less Than 5mm Siliques vs. Whole Plant
  misc_feature: MA Experiment ID: 20000440 Result: Down-regulated in Transcription
  misc_feature: MA Experiment 20000440 PARAMETER Experiment Name: At_Closed-Flower__Sub_P Parameter: Tissue Value: Closed Flower vs. Whole Plant
atggattctacttcatcggaagtaaaaatcgtttctcaatgctttgttaaacccaaaaccatccctgaaaaatggaaagagccataccatttatcaccgttggatcttgtgatgctctctatgcattacctccaaaatggtcttctctttctcaaatctgatgatgcaaccaaaacaaaagatttcatggagacttggctacaaaagcttagagattctctagctgaaacccttgtccatttttatccgctcgcgggtcgtctctcgactttaaaaaccgataatccgagatcctactctgtgtttgtggattgtaatgacagtcccggagctggatttatccatgccaaatcggatctaagtgtaagagatattgttggatccaactatgttcctttggttgttcaatctttctttgaccaccataaagccgtgagccatgatggtcacaccatgagtctcttctcagtcaaggtaacagaattggtagatggagtgttcattggattttcattgaatcacgctgtgggagatggaggttccttgtggcattttttcaactctttgtcggagattttcaatgcacaagaaaccgataacttgcttctcaagaatcctccagtcctttcacgttggtttcctaaagggtacggtcctgtgtacaaccttcctttcactcactctgatgaattcattagccgattcgaatcaccggtcttgaaggagagaatattccatttctcgtctgaaacaataacatcattgaaatcaaaggctaatgaagaaagcagaacaacaacaatttcttcttttcaagcgttagccgcatttatgtggagatgcattacaagagcaagaaacttaccttatgatcatgaaattcgttgtagccttgccgctaacaatggaacaaaattggatccaccattgtctttgagctatcttggtaattgtctttctgctgtaaagtccaagaccgttacatccggtgagctactagaaaatgatttgggatgggctgctttgaaaatgcatgaagctgtgattggaaacactagtgaagtggtctcggagacaatcaaaaactggttgaaatcatcttatgttttccatttagaaaaacttttgggagcgatggtggttcacattggaagctctccgaggtttaagatgtatgaatgcgagtttgggatgggaaaagcggttgcggttagaagcggttatggcggtaagtttgatgggaagatatcagcatatgcaggaagagaaggaggaggaaccatagatttggaagtatgtcttcttccagagtttatggaagctttggaatcagatcaagaattcatgtccgttgtctcttcttcttcttga

SEQ ID NO: 83207 - protein, 456 aa, Arabidopsis thaliana
  peptide (1)..(456): Ceres Seq. ID no. 12669208
  misc_feature (6)..(449): Pfam Name: Transferase family Pfam Description: Transferase family
  misc_feature (1)..(456): Homolog of NCBI NO: 15240871 NR Description: proanthranilate N-benzoyltransferase -like protein id: At5g07850.1 [Arabidopsis thaliana]
  misc_feature (1)..(456): Homolog of NCBI NO: 15241431 NR Description: N-hydroxycinnamoyl benzoyltransferase - like protein id: At5g07860.1, supported by cDNA: gi_17065195
  misc_feature (1)..(453): Homolog of NCBI NO: 15239072 NR Description: N-hydroxycinnamoyl benzoyltransferase-like
  misc_feature (1)..(456): Homolog of NCBI NO: 15241433 NR Description: N-hydroxycinnamoyl benzoyltransferase - like
  misc_feature (1)..(453): Homolog of NCBI NO: 24413968 NR Description: N-hydroxycinnamoyl/benzoyltransferase-like
  misc_feature (5)..(262): Homolog of NCBI NO: 21666314 NR Description: AER [Nicotiana tabacum]
  misc_feature (254)..(453): Homolog of NCBI NO: 21666314 NR Description: AER [Nicotiana tabacum]
  misc_feature (1)..(266): Homolog of NCBI NO: 15225603 NR Description: putative anthocyanin 5-aromatic acyltransferase; id: At2g39980.1, supported by cDNA: gi_13937225 [Arabidopsis
  misc_feature (249)..(454): Homolog of NCBI NO: 15225603 NR Description: putative anthocyanin 5-aromatic acyltransferase; id: At2g39980.1, supported by cDNA: gi_13937225 [Arabidopsis
  misc_feature (5)..(453): Homolog of NCBI NO: 34899602 NR Description: N-hydroxycinnamoyl benzoyltransferase-like
MDSTSSEVKIVSQCFVKPKTIPEKWKEPYHLSPLDLVMLSMHYLQNGLLFLKSDDATKTKDFMETWLQKLRDSLAETLVHFYPLAGRLSTLKTDNPRSYSVFVDCNDSPGAGFIHAKSDLSVRDIVGSNYVPLVVQSFFDHHKAVSHDGHTMSLFSVKVTELVDGVFIGFSLNHAVGDGGSLWHFFNSLSEIFNAQETDNLLLKNPPVLSRWFPKGYGPVYNLPFTHSDEFISRFESPVLKERIFHFSSETITSLKSKANEESRTTTISSFQALAAFMWRCITRARNLPYDHEIRCSLAANNGTKLDPPLSLSYLGNCLSAVKSKTVTSGELLENDLGWAALKMHEAVIGNTSEVVSETIKNWLKSSYVFHLEKLLGAMVVHIGSSPRFKMYECEFGMGKAVAVRSGYGGKFDGKISAYAGREGGGTIDLEVCLLPEFMEALESDQEFMSVVSSSS

SEQ ID NO: 83208 - protein, 419 aa, Arabidopsis thaliana
  peptide (1)..(419): Ceres Seq. ID no. 12669209
  misc_feature (1)..(412): Pfam Name: Transferase family Pfam Description: Transferase family
  misc_feature (1)..(419): Homolog of NCBI NO: 15240871 NR Description: proanthranilate N-benzoyltransferase -like protein id: At5g07850.1 [Arabidopsis thaliana]
  misc_feature (1)..(419): Homolog of NCBI NO: 15241431 NR Description: N-hydroxycinnamoyl benzoyltransferase - like protein id: At5g07860.1, supported by cDNA: gi_17065195
  misc_feature (1)..(416): Homolog of NCBI NO: 15239072 NR Description: N-hydroxycinnamoyl benzoyltransferase-like
  misc_feature (1)..(419): Homolog of NCBI NO: 15241433 NR Description: N-hydroxycinnamoyl benzoyltransferase - like
  misc_feature (1)..(416): Homolog of NCBI NO: 24413968 NR Description: N-hydroxycinnamoyl/benzoyltransferase-like
  misc_feature (1)..(225): Homolog of NCBI NO: 21666314 NR Description: AER [Nicotiana tabacum]
  misc_feature (217)..(416): Homolog of NCBI NO: 21666314 NR Description: AER [Nicotiana tabacum]
  misc_feature (1)..(229): Homolog of NCBI NO: 15225603 NR Description: putative anthocyanin 5-aromatic acyltransferase; id: At2g39980.1, supported by cDNA: gi_13937225 [Arabidopsis
  misc_feature (212)..(417): Homolog of NCBI NO: 15225603 NR Description: putative anthocyanin 5-aromatic acyltransferase; id: At2g39980.1, supported by cDNA: gi_13937225 [Arabidopsis
  misc_feature (1)..(416): Homolog of NCBI NO: 34899602 NR Description: N-hydroxycinnamoyl benzoyltransferase-like
MLSMHYLQNGLLFLKSDDATKTKDFMETWLQKLRDSLAETLVHFYPLAGRLSTLKTDNPRSYSVFVDCNDSPGAGFIHAKSDLSVRDIVGSNYVPLVVQSFFDHHKAVSHDGHTMSLFSVKVTELVDGVFIGFSLNHAVGDGGSLWHFFNSLSEIFNAQETDNLLLKNPPVLSRWFPKGYGPVYNLPFTHSDEFISRFESPVLKERIFHFSSETITSLKSKANEESRTTTISSFQALAAFMWRCITRARNLPYDHEIRCSLAANNGTKLDPPLSLSYLGNCLSAVKSKTVTSGELLENDLGWAALKMHEAVIGNTSEVVSETIKNWLKSSYVFHLEKLLGAMVVHIGSSPRFKMYECEFGMGKAVAVRSGYGGKFDGKISAYAGREGGGTIDLEVCLLPEFMEALESDQEFMSVVSSSS

SEQ ID NO: 83209 - protein, 416 aa, Arabidopsis thaliana
  peptide (1)..(416): Ceres Seq. ID no. 12669210
  misc_feature (1)..(409): Pfam Name: Transferase family Pfam Description: Transferase family
  misc_feature (1)..(416): Homolog of NCBI NO: 15240871 NR Description: proanthranilate N-benzoyltransferase -like protein id: At5g07850.1 [Arabidopsis thaliana]
  misc_feature (1)..(416): Homolog of NCBI NO: 15241431 NR Description: N-hydroxycinnamoyl benzoyltransferase - like protein id: At5g07860.1, supported by cDNA: gi_17065195
  misc_feature (1)..(413): Homolog of NCBI NO: 15239072 NR Description: N-hydroxycinnamoyl benzoyltransferase-like
  misc_feature (1)..(416): Homolog of NCBI NO: 15241433 NR Description: N-hydroxycinnamoyl benzoyltransferase - like
  misc_feature (1)..(413): Homolog of NCBI NO: 24413968 NR Description: N-hydroxycinnamoyl/benzoyltransferase-like
  misc_feature (1)..(222): Homolog of NCBI NO: 21666314 NR Description: AER [Nicotiana tabacum]
  misc_feature (214)..(413): Homolog of NCBI NO: 21666314 NR Description: AER [Nicotiana tabacum]
  misc_feature (1)..(226): Homolog of NCBI NO: 15225603 NR Description: putative anthocyanin 5-aromatic acyltransferase; id: At2g39980.1, supported by cDNA: gi_13937225 [Arabidopsis
  misc_feature (209)..(414): Homolog of NCBI NO: 15225603 NR Description: putative anthocyanin 5-aromatic acyltransferase; id: At2g39980.1, supported by cDNA: gi_13937225 [Arabidopsis
  misc_feature (1)..(413): Homolog of NCBI NO: 34899602 NR Description: N-hydroxycinnamoyl benzoyltransferase-like
MHYLQNGLLFLKSDDATKTKDFMETWLQKLRDSLAETLVHFYPLAGRLSTLKTDNPRSYSVFVDCNDSPGAGFIHAKSDLSVRDIVGSNYVPLVVQSFFDHHKAVSHDGHTMSLFSVKVTELVDGVFIGFSLNHAVGDGGSLWHFFNSLSEIFNAQETDNLLLKNPPVLSRWFPKGYGPVYNLPFTHSDEFISRFESPVLKERIFHFSSETITSLKSKANEESRTTTISSFQALAAFMWRCITRARNLPYDHEIRCSLAANNGTKLDPPLSLSYLGNCLSAVKSKTVTSGELLENDLGWAALKMHEAVIGNTSEVVSETIKNWLKSSYVFHLEKLLGAMVVHIGSSPRFKMYECEFGMGKAVAVRSGYGGKFDGKISAYAGREGGGTIDLEVCLLPEFMEALESDQEFMSVVSSSS

SEQ ID NO: 83210 - DNA, 1541 bp, Arabidopsis thaliana
  misc_feature (1)..(1541): Ceres Seq. ID no. 12669211
  misc_feature: MA Experiment ID: 20000173 Result: Down-regulated in Transcription
  misc_feature: MA Experiment 20000173 PARAMETER Experiment Name: At_42deg_Heat_P Parameter: Age (day) Value: 14
  misc_feature: MA Experiment 20000173 PARAMETER Experiment Name: At_42deg_Heat_P Parameter: Organism Value: A. thaliana
  misc_feature: MA Experiment 20000173 PARAMETER Experiment Name: At_42deg_Heat_P Parameter: Plant Line Value: WS
  misc_feature: MA Experiment 20000173 PARAMETER Experiment Name: At_42deg_Heat_P Parameter: Temperature (deg C) Value: 42 vs. 22
  misc_feature: MA Experiment 20000173 PARAMETER Experiment Name: At_42deg_Heat_P Parameter: Timepoint (hr) Value: 6
  misc_feature: MA Experiment 20000173 PARAMETER Experiment Name: At_42deg_Heat_P Parameter: Tissue Value: Aerial
  misc_feature: MA Experiment ID: 20000179 Result: Up-regulated in Transcription
  misc_feature: MA Experiment 20000179 PARAMETER Experiment Name: At_Germinating_Seeds_P Parameter: Age (hr) Value: 6 vs. 0
  misc_feature: MA Experiment 20000179 PARAMETER Experiment Name: At_Germinating_Seeds_P Parameter: Tissue Value: Germinating Seeds
  misc_feature: MA Experiment ID: 20000180 Result: Up-regulated in Transcription
  misc_feature: MA Experiment 20000180 PARAMETER Experiment Name: At_Germinating_Seeds_P Parameter: Age (hr) Value: 24 vs. 0
  misc_feature: MA Experiment 20000180 PARAMETER Experiment Name: At_Germinating_Seeds_P Parameter: Tissue Value: Germinating Seeds
  misc_feature: MA Experiment ID: 20000185 Result: Up-regulated in Transcription
  misc_feature: MA Experiment 20000185 PARAMETER Experiment Name: At_Roots__P Parameter: Age (day) Value: 7 vs. 21
  misc_feature: MA Experiment 20000185 PARAMETER Experiment Name: At_Roots__P Parameter: Organism Value: A. thaliana
  misc_feature: MA Experiment 20000185 PARAMETER Experiment Name: At_Roots__P Parameter: Tissue Value: Roots vs. Whole Plant
  misc_feature: MA Experiment ID: 20000438 Result: Up-regulated in Transcription
  misc_feature: MA Experiment 20000438 PARAMETER Experiment Name: At_Shoots__P Parameter: Age (day) Value: 14
  misc_feature: MA Experiment 20000438 PARAMETER Experiment Name: At_Shoots__P Parameter: Tissue Value: Shoots vs. Whole Plant
  misc_feature: MA Experiment ID: 20000439 Result: Up-regulated in Transcription
  misc_feature: MA Experiment 20000439 PARAMETER Experiment Name: At_Roots__P Parameter: Age (day) Value: 14 vs. 21
  misc_feature: MA Experiment 20000439 PARAMETER Experiment Name: At_Roots__P Parameter: Organism Value: A. thaliana
  misc_feature: MA Experiment 20000439 PARAMETER Experiment Name: At_Roots__P Parameter: Tissue Value: Roots vs. Whole Plant
  misc_feature: MA Experiment ID: 20000495 Result: Down-regulated in Transcription
  misc_feature: MA Experiment 20000495 PARAMETER Experiment Name: At_Guard_Cells_P Parameter: Harvest Date Value: 8/2/2002
  misc_feature: MA Experiment 20000495 PARAMETER Experiment Name: At_Guard_Cells_P Parameter: Organism Value: A. thaliana
  misc_feature: MA Experiment 20000495 PARAMETER Experiment Name: At_Guard_Cells_P Parameter: Tissue Value: Guard Cells vs. Leaves
  misc_feature: MA Experiment ID: 20001451 Result: Down-regulated in Transcription
  misc_feature: MA Experiment 20001451 PARAMETER Experiment Name: At_Far-red-induction_P Parameter: Age (day) Value: 7
  misc_feature: MA Experiment 20001451 PARAMETER Experiment Name: At_Far-red-induction_P Parameter: Light Value: Far-red vs. White
  misc_feature: MA Experiment 20001451 PARAMETER Experiment Name: At_Far-red-induction_P Parameter: Organism Value: A. thaliana
  misc_feature: MA Experiment 20001451 PARAMETER Experiment Name: At_Far-red-induction_P Parameter: Plant Line Value: Columbia
  misc_feature: MA Experiment 20001451 PARAMETER Experiment Name: At_Far-red-induction_P Parameter: Timepoint (hr) Value: 24
  misc_feature: MA Experiment 20001451 PARAMETER Experiment Name: At_Far-red-induction_P Parameter: Tissue Value: Whole Plant
atggattcttcttcatctgaagtaaggataatctcaaaatgcttcgtcaaacccaaaaccatccctcaaaaatggaaagaaccttaccatttttcaccaacggatcatataatgctctcaatccattacatccaaaagggtcttctttttctcaaaccatcattttctgaatctgtcaaaccaaaagagttcatggagactttgctgcagaagcttaaagactcactagccatagcacttgtccatttctatcctcttgcaggtcgtctctctactttgaaaaccgacaattcaagatctcactctgtgtttgtggattgtaataatagtcctggtgctagatttatccatgctgaatcagatctaagtgtgtcagacattcttggatccacatatgttcctttggttgttcaatctctctttgatcatcacaaagcattgaatcgtgatggttacaccatgagtctcttatcaatcaaggtaacagaactggtagatggagtgttcataggattgtctatgaatcattcccttggagatggaagttccttctggcagttcttcaactctttgtctgagatcttcaattcacaagaagaaaccattgggaataacaacaacaacaacaacaacgcattgctctgtctcaagaatcctccaatcattcgtgaagcgaccggtcctatgtacagccttccctttagtgaacctaatgagtcccttagtcaatccgaacctccggttttgaaggagaggatgttccatttctcatcagaaacagtgagatcgctgaaatcaaaggcgaatcaagaatgcggaacaacaatgatctcttcttttcaggctctgaccgcattgatatggagaagcattacaagagcaagaaaactaccaaatgatcaagaaactacttgcaggtttgctgctggaaacagatcaagaatgaatccaccattgccgacgaatcaatttggagtttacatctctcttgtgaaaacgactactaaaatcggtaatctactggagaatgagtttggatggattgctttgaaactgcatcaagctgttaccgaacacactggcgaaaagatctcttacgaaatagatcaaatgttgaagtctcctttaccgttgcaagcatatcgactttccaatttgaacatagttcacatgggaagttctccaaggtttaacaagtacggaagcgagtttgggatggggaaagcggtggcggttagaagcggttatggcggtaagtatgacgggaaggtatcagcttatccaggaagacaaggaggagcaagtatagatttggaagtatgtctacttccagagtttatggaagctttggaatcagatcaagagttcatgtctcttgtctcttcttccacctgatcctattcatattttccagacacaaaactcaagttattctttatttcaaacacaaatctttggaaccaaatgtttgcttgttactctaactgtattctgcagttgttaaatgtttccncttcattaagaaaagaactaatatattg

SEQ ID NO: 83211 - protein, 464 aa, Arabidopsis thaliana
  peptide (1)..(464): Ceres Seq. ID no. 12669212
  misc_feature (6)..(457): Pfam Name: Transferase family Pfam Description: Transferase family
  misc_feature (1)..(464): Homolog of NCBI NO: 15241433 NR Description: N-hydroxycinnamoyl benzoyltransferase - like
  misc_feature (1)..(464): Homolog of NCBI NO: 15241431 NR Description: N-hydroxycinnamoyl benzoyltransferase - like protein id: At5g07860.1, supported by cDNA: gi_17065195
  misc_feature (1)..(464): Homolog of NCBI NO: 15240871 NR Description: proanthranilate N-benzoyltransferase -like protein id: At5g07850.1 [Arabidopsis thaliana]
  misc_feature (1)..(461): Homolog of NCBI NO: 15239072 NR Description: N-hydroxycinnamoyl benzoyltransferase-like
  misc_feature (1)..(271): Homolog of NCBI NO: 15225603 NR Description: putative anthocyanin 5-aromatic acyltransferase; id: At2g39980.1, supported by cDNA: gi_13937225 [Arabidopsis
  misc_feature (277)..(462): Homolog of NCBI NO: 15225603 NR Description: putative anthocyanin 5-aromatic acyltransferase; id: At2g39980.1, supported by cDNA: gi_13937225 [Arabidopsis
  misc_feature (1)..(461): Homolog of NCBI NO: 24413968 NR Description: N-hydroxycinnamoyl/benzoyltransferase-like
  misc_feature (5)..(461): Homolog of NCBI NO: 34899602 NR Description: N-hydroxycinnamoyl benzoyltransferase-like
  misc_feature (5)..(460): Homolog of NCBI NO: 15240227 NR Description: anthranilate protein; protein id: At5g67150.1, supported by cDNA: 114226., by cDNA: gi_17381221 [Arabidopsis thaliana]
  misc_feature (5)..(269): Homolog of NCBI NO: 15240918 NR Description: anthranilate N-benzoyltransferase - like protein; id: At5g01210.1, supported by cDNA: gi_15912268, supported by gi_19699231 [Arabidopsis thaliana] >gi|11357170|pir||T45961
MDSSSSEVRIISKCFVKPKTIPQKWKEPYHFSPTDHIMLSIHYIQKGLLFLKPSFSESVKPKEFMETLLQKLKDSLAIALVHFYPLAGRLSTLKTDNSRSHSVFVDCNNSPGARFIHAESDLSVSDILGSTYVPLVVQSLFDHHKALNRDGYTMSLLSIKVTELVDGVFIGLSMNHSLGDGSSFWQFFNSLSEIFNSQEETIGNNNNNNNNALLCLKNPPIIREATGPMYSLPFSEPNESLSQSEPPVLKERMFHFSSETVRSLKSKANQECGTTMISSFQALTALIWRSITRARKLPNDQETTCRFAAGNRSRMNPPLPTNQFGVYISLVKTTTKIGNLLENEFGWIALKLHQAVTEHTGEKISYEIDQMLKSPLPLQAYRLSNLNIVHMGSSPRFNKYGSEFGMGKAVAVRSGYGGKYDGKVSAYPGRQGGASIDLEVCLLPEFMEALESDQEFMSLVSSST

SEQ ID NO: 83212 - protein, 427 aa, Arabidopsis thaliana
  peptide (1)..(427): Ceres Seq. ID no. 12669213
  misc_feature (1)..(420): Pfam Name: Transferase family Pfam Description: Transferase family
  misc_feature (1)..(427): Homolog of NCBI NO: 15241433 NR Description: N-hydroxycinnamoyl benzoyltransferase - like
  misc_feature (1)..(427): Homolog of NCBI NO: 15241431 NR Description: N-hydroxycinnamoyl benzoyltransferase - like protein id: At5g07860.1, supported by cDNA: gi_17065195
  misc_feature (1)..(427): Homolog of NCBI NO: 15240871 NR Description: proanthranilate N-benzoyltransferase -like protein id: At5g07850.1 [Arabidopsis thaliana]
  misc_feature (1)..(424): Homolog of NCBI NO: 15239072 NR Description: N-hydroxycinnamoyl benzoyltransferase-like
  misc_feature (1)..(234): Homolog of NCBI NO: 15225603 NR Description: putative anthocyanin 5-aromatic acyltransferase; id: At2g39980.1, supported by cDNA: gi_13937225 [Arabidopsis
  misc_feature (240)..(425): Homolog of NCBI NO: 15225603 NR Description: putative anthocyanin 5-aromatic acyltransferase; id: At2g39980.1, supported by cDNA: gi_13937225 [Arabidopsis
  misc_feature (1)..(424): Homolog of NCBI NO: 24413968 NR Description: N-hydroxycinnamoyl/benzoyltransferase-like
  misc_feature (1)..(424): Homolog of NCBI NO: 34899602 NR Description: N-hydroxycinnamoyl benzoyltransferase-like
  misc_feature (1)..(423): Homolog of NCBI NO: 15240227 NR Description: anthranilate protein; protein id: At5g67150.1, supported by cDNA: 114226., by cDNA: gi_17381221 [Arabidopsis thaliana]
  misc_feature (1)..(232): Homolog of NCBI NO: 15240918 NR Description: anthranilate N-benzoyltransferase - like protein; id: At5g01210.1, supported by cDNA: gi_15912268, supported by gi_19699231 [Arabidopsis thaliana] >gi|11357170|pir||T45961
MLSIHYIQKGLLFLKPSFSESVKPKEFMETLLQKLKDSLAIALVHFYPLAGRLSTLKTDNSRSHSVFVDCNNSPGARFIHAESDLSVSDILGSTYVPLVVQSLFDHHKALNRDGYTMSLLSIKVTELVDGVFIGLSMNHSLGDGSSFWQFFNSLSEIFNSQEETIGNNNNNNNNALLCLKNPPIIREATGPMYSLPFSEPNESLSQSEPPVLKERMFHFSSETVRSLKSKANQECGTTMISSFQALTALIWRSITRARKLPNDQETTCRFAAGNRSRMNPPLPTNQFGVYISLVKTTTKIGNLLENEFGWIALKLHQAVTEHTGEKISYEIDQMLKSPLPLQAYRLSNLNIVHMGSSPRFNKYGSEFGMGKAVAVRSGYGGKYDGKVSAYPGRQGGASIDLEVCLLPEFMEALESDQEFMSLVSSST

SEQ ID NO: 83213 - protein, 400 aa, Arabidopsis thaliana
  peptide (1)..(400): Ceres Seq. ID no. 12669214
  misc_feature (1)..(393): Pfam Name: Transferase family Pfam Description: Transferase family
  misc_feature (1)..(400): Homolog of NCBI NO: 15241433 NR Description: N-hydroxycinnamoyl benzoyltransferase - like
  misc_feature (1)..(400): Homolog of NCBI NO: 15241431 NR Description: N-hydroxycinnamoyl benzoyltransferase - like protein id: At5g07860.1, supported by cDNA: gi_17065195
  misc_feature (1)..(400): Homolog of NCBI NO: 15240871 NR Description: proanthranilate N-benzoyltransferase -like protein id: At5g07850.1 [Arabidopsis thaliana]
  misc_feature (1)..(397): Homolog of NCBI NO: 15239072 NR Description: N-hydroxycinnamoyl benzoyltransferase-like
  misc_feature (1)..(207): Homolog of NCBI NO: 15225603 NR Description: putative anthocyanin 5-aromatic acyltransferase; id: At2g39980.1, supported by cDNA: gi_13937225 [Arabidopsis
  misc_feature (213)..(398): Homolog of NCBI NO: 15225603 NR Description: putative anthocyanin 5-aromatic acyltransferase; id: At2g39980.1, supported by cDNA: gi_13937225 [Arabidopsis
  misc_feature (1)..(397): Homolog of NCBI NO: 24413968 NR Description: N-hydroxycinnamoyl/benzoyltransferase-like
  misc_feature (1)..(397): Homolog of NCBI NO: 34899602 NR Description: N-hydroxycinnamoyl benzoyltransferase-like
  misc_feature (1)..(396): Homolog of NCBI NO: 15240227 NR Description: anthranilate protein; protein id: At5g67150.1, supported by cDNA: 114226., by cDNA: gi_17381221 [Arabidopsis thaliana]
  misc_feature (1)..(205): Homolog of NCBI NO: 15240918 NR Description: anthranilate N-benzoyltransferase - like protein; id: At5g01210.1, supported by cDNA: gi_15912268, supported by gi_19699231 [Arabidopsis thaliana] >gi|11357170|pir||T45961
METLLQKLKDSLAIALVHFYPLAGRLSTLKTDNSRSHSVFVDCNNSPGARFIHAESDLSVSDILGSTYVPLVVQSLFDHHKALNRDGYTMSLLSIKVTELVDGVFIGLSMNHSLGDGSSFWQFFNSLSEIFNSQEETIGNNNNNNNNALLCLKNPPIIREATGPMYSLPFSEPNESLSQSEPPVLKERMFHFSSETVRSLKSKANQECGTTMISSFQALTALIWRSITRARKLPNDQETTCRFAAGNRSRMNPPLPTNQFGVYISLVKTTTKIGNLLENEFGWIALKLHQAVTEHTGEKISYEIDQMLKSPLPLQAYRLSNLNIVHMGSSPRFNKYGSEFGMGKAVAVRSGYGGKYDGKVSAYPGRQGGASIDLEVCLLPEFMEALESDQEFMSLVSSST

SEQ ID NO: 83214 - DNA, 756 bp, Arabidopsis thaliana
  misc_feature (1)..(756): Ceres Seq. ID no. 12669215
atggctcctaagaattccagctggaacccttttgatgatgagaaggaggctgctaagagtttcagtttgaacccttttgatgatgatgatgatgacaaggaggttgagaaaagattcacttcatccttgaagccctcgggaggtaaagagaaccagacggttcaagaacttgagagctacgctgtgtataactctgaggaaacaacgaaaaccgtacaagggtgtttgaaagttgctgaagagattagatgtgatgcttctaaaactttggttatgttgaatgaacaaggagatcaaattactagaacacaccagaagacggttgatctcgatcatcatctttctcggggtgagaagattcttggacgcctcggaggtgttttttcaaggacttggaagccaaagaagtctcgttctataactggccctgtcataaccaaaggtgattcacctaagagaaaagttatcgacttaaagactagggaaaagctgggactgaacccttcactcaaaccaaaatcaaaaacacttcctgaagccgttgatgcttatcagaaaacacagattgcaaagcaagatgaagcccttaccgacttaagcgctcttcttggcgagttgaaaaatatggcagtggacatgggaacagcaatcgaaaggcaaaccaatgaactggatcatcttcaagataatgctgatgagctcaactacagagttaagcaatcgaaccaacgggctcgctatttactccggaagtaa

SEQ ID NO: 83215 - protein, 251 aa, Arabidopsis thaliana
  peptide (1)..(251): Ceres Seq. ID no. 12669216
  misc_feature (191)..(251): Pfam Name: SNARE domain Pfam Description: SNARE domain
  misc_feature (1)..(251): Homolog of NCBI NO: 15241436 NR Description: SNAP25 - like protein; protein id: At5g07880.1 thaliana] >gi|27805728|sp|Q9SD96|SN29_ARATH SNAP25 homologous
  misc_feature (38)..(251): Homolog of NCBI NO: 15240163 NR Description: syntaxin SNAP33; protein id: At5g61210.1, by cDNA: 14562., supported by cDNA: gi_16323046 [Arabidopsis >gi|27805727|sp|Q9S7P9|SN33_ARATH SNAP25 homologous protein
  misc_feature (38)..(251): Homolog of NCBI NO: 21553460 NR Description: snap25a [Arabidopsis thaliana]
  misc_feature (15)..(251): Homolog of NCBI NO: 15222976 NR Description: synaptosomal associated protein (SNAP25A), protein id: At1g13890.1 [Arabidopsis thaliana]
  misc_feature (10)..(249): Homolog of NCBI NO: 32308074 NR Description: SNAP-34 [Hordeum vulgare subsp. vulgare]
  misc_feature (45)..(251): Homolog of NCBI NO: 29378329 NR Description: synaptosomal-associated 25 protein isoform A
  misc_feature (50)..(249): Homolog of NCBI NO: 22035899 NR Description: SNAP-23 [Xenopus laevis]
  misc_feature (44)..(251): Homolog of NCBI NO: 1923252 NR Description: SNAP-25 homolog [Hirudo medicinalis]
  misc_feature (54)..(249): Homolog of NCBI NO: 18765733 NR Description: synaptosomal-associated protein 25 isoform
  misc_feature (56)..(251): Homolog of NCBI NO: 39593308 NR Description: Hypothetical protein CBG09569 [Caenorhabditis
MAPKNSSWNPFDDEKEAAKSFSLNPFDDDDDDKEVEKRFTSSLKPSGGKENQTVQELESYAVYNSEETTKTVQGCLKVAEEIRCDASKTLVMLNEQGDQITRTHQKTVDLDHHLSRGEKILGRLGGVFSRTWKPKKSRSITGPVITKGDSPKRKVIDLKTREKLGLNPSLKPKSKTLPEAVDAYQKTQIAKQDEALTDLSALLGELKNMAVDMGTAIERQTNELDHLQDNADELNYRVKQSNQRARYLLRK

SEQ ID NO: 83216 - protein, 160 aa, Arabidopsis thaliana
  peptide (1)..(160): Ceres Seq. ID no. 12669217
  misc_feature (100)..(160): Pfam Name: SNARE domain Pfam Description: SNARE domain
  misc_feature (1)..(160): Homolog of NCBI NO: 15241436 NR Description: SNAP25 - like protein; protein id: At5g07880.1 thaliana] >gi|27805728|sp|Q9SD96|SN29_ARATH SNAP25 homologous
  misc_feature (1)..(160): Homolog of NCBI NO: 15240163 NR Description: syntaxin SNAP33; protein id: At5g61210.1, by cDNA: 14562., supported by cDNA: gi_16323046 [Arabidopsis >gi|27805727|sp|Q9S7P9|SN33_ARATH SNAP25 homologous protein
  misc_feature (1)..(160): Homolog of NCBI NO: 21553460 NR Description: snap25a [Arabidopsis thaliana]
  misc_feature (1)..(160): Homolog of NCBI NO: 15222976 NR Description: synaptosomal associated protein (SNAP25A), protein id: At1g13890.1 [Arabidopsis thaliana]
  misc_feature (1)..(158): Homolog of NCBI NO: 32308074 NR Description: SNAP-34 [Hordeum vulgare subsp. vulgare]
  misc_feature (1)..(160): Homolog of NCBI NO: 29378329 NR Description: synaptosomal-associated 25 protein isoform A
  misc_feature (1)..(158): Homolog of NCBI NO: 22035899 NR Description: SNAP-23 [Xenopus laevis]
  misc_feature (1)..(160): Homolog of NCBI NO: 1923252 NR Description: SNAP-25 homolog [Hirudo medicinalis]
  misc_feature (1)..(158): Homolog of NCBI NO: 18765733 NR Description: synaptosomal-associated protein 25 isoform
  misc_feature (1)..(160): Homolog of NCBI NO: 39593308 NR Description: Hypothetical protein CBG09569 [Caenorhabditis
MLNEQGDQITRTHQKTVDLDHHLSRGEKILGRLGGVFSRTWKPKKSRSITGPVITKGDSPKRKVIDLKTREKLGLNPSLKPKSKTLPEAVDAYQKTQIAKQDEALTDLSALLGELKNMAVDMGTAIERQTNELDHLQDNADELNYRVKQSNQRARYLLRK

SEQ ID NO: 83217 - DNA, 1815 bp, Arabidopsis thaliana
  misc_feature (1)..(1815): Ceres Seq. ID no. 12669238
  misc_feature: MA Experiment ID: 20000306 Result: Up-regulated in Transcription
  misc_feature: MA Experiment 20000306 PARAMETER Experiment Name: At_Germinating_Seeds_Sub_P Parameter: Age (hr) Value: 6 vs. 0
  misc_feature: MA Experiment 20000306 PARAMETER Experiment Name: At_Germinating_Seeds_Sub_P Parameter: Organism Value: A. thaliana
  misc_feature: MA Experiment 20000306 PARAMETER Experiment Name: At_Germinating_Seeds_Sub_P Parameter: Plant Line Value: WS
  misc_feature: MA Experiment 20000306 PARAMETER Experiment Name: At_Germinating_Seeds_Sub_P Parameter: Tissue Value: Germinating Seeds
  misc_feature: MA Experiment ID: 20000307 Result: Up-regulated in Transcription
  misc_feature: MA Experiment 20000307 PARAMETER Experiment Name: At_Germinating_Seeds_Sub_P Parameter: Age (hr) Value: 24 vs. 0
  misc_feature: MA Experiment 20000307 PARAMETER Experiment Name: At_Germinating_Seeds_Sub_P Parameter: Organism Value: A. thaliana
  misc_feature: MA Experiment 20000307 PARAMETER Experiment Name: At_Germinating_Seeds_Sub_P Parameter: Plant Line Value: WS
  misc_feature: MA Experiment 20000307 PARAMETER Experiment Name: At_Germinating_Seeds_Sub_P Parameter: Tissue Value: Germinating Seeds
  misc_feature: MA Experiment ID: 20000328 Result: Down-regulated in Transcription
  misc_feature: MA Experiment 20000328 PARAMETER Experiment Name: At_42deg_Heat_Sub_P Parameter: Age (day) Value: 14
  misc_feature: MA Experiment 20000328 PARAMETER Experiment Name: At_42deg_Heat_Sub_P Parameter: Organism Value: A. thaliana
  misc_feature: MA Experiment 20000328 PARAMETER Experiment Name: At_42deg_Heat_Sub_P Parameter: Plant Line Value: WS
  misc_feature: MA Experiment 20000328 PARAMETER Experiment Name: At_42deg_Heat_Sub_P Parameter: Temperature (deg C) Value: 42 vs. 22
  misc_feature: MA Experiment 20000328 PARAMETER Experiment Name: At_42deg_Heat_Sub_P Parameter: Timepoint (hr) Value: 6
  misc_feature: MA Experiment 20000328 PARAMETER Experiment Name: At_42deg_Heat_Sub_P Parameter: Tissue Value: Aerial
  misc_feature: MA Experiment ID: 20000355 Result: Up-regulated in Transcription
  misc_feature: MA Experiment 20000355 PARAMETER Experiment Name: At_Siliques_Sub_P Parameter: Age (day) Value: 21
  misc_feature: MA Experiment 20000355 PARAMETER Experiment Name: At_Siliques_Sub_P Parameter: Organism Value: A. thaliana
  misc_feature: MA Experiment 20000355 PARAMETER Experiment Name: At_Siliques_Sub_P Parameter: Plant Line Value: WS
  misc_feature: MA Experiment 20000355 PARAMETER Experiment Name: At_Siliques_Sub_P Parameter: Tissue Value: Less Than 5mm Siliques vs. Whole Plant
  misc_feature: MA Experiment ID: 20000440 Result: Up-regulated in Transcription
  misc_feature: MA Experiment 20000440 PARAMETER Experiment Name: At_Closed-Flower__Sub_P Parameter: Tissue Value: Closed Flower vs. Whole Plant
atggagaactcagtgacccaagatggtatcgcgacagtattagccaatcaatcccttgattcctcctctgttagacccgaaattgttgttcaagtcgtggatcttaagcctgctggaaatcgatatacgtttagtgccaatgatggaaagatgaagattaaagcaatgttaccagcgactttgacttctgatatcatctctggaaagattcagaatctgggtcttattcgtctccttgagtataccgtcaatgatattccaggcaaatcagaagaaaaatatatgcttataacaaaatgtgaggctgttgcttctgcacttgactcagagattaaggcggagattaaagcttccacaggcataatgttgaaacccaagcatgagtttgttgccaaatcagcttcacagattatcaatgagcaaaggggaaatgctgcacctgctgcaagaatggctatgaccagaagggttcatcctcttgtgtccttgaacccttatcaaggaagttggactattaaagttcgtgtcactaacaaaggagtcatgagaacttacaaaaatgccagaggagaaggatgtgtgtttaatgtggaactaactgatgaggaaggaacacagattcaggcaacaatgtttaacgcagctgcaaggaagttttatgacagattcgagatgggaaaggtgtactatatatccaggggatcacttaagcttgctaataagcagttcaagacggttcagaacgattatgagatgaccctaaatgagaattctgaggttgaagaagctagtaatgaagaaatgtttacccctgaaactaaattcaactttgtacccattgatgagttgggtacatacgtgaatcagaaagaccttattgatgttatcggtgttgttcaaagtgtttctcctaccatgagcattagaaggaagaacgacaatgagatgatcccaaagagagatataactttggctgatgagacaaagaaaactgttgtggtgtccctttggaatgatctagcaactggcattggccaagaactgctggacatggctgataatcaccctgttatcgcgattaaatctcttaaagttggagcttttcaaggtgtttcattgtctactatcagcagaagcaatgtggtgataaaccctaattctccagaagctacaaagttgaaatcttggtatgatgctgaagggaaagagacatctatgtctgctattggttctgggatgagttcttctgccaacaacggatcaagatccatgtattctgacagagtttttctttctcacatcacaagcaatccctctttaggcgaggagaagcctgtattcttcagcactagagcttacataagcttcatcaagccagaccaaacaatgtggtaccgtgcttgcaagacctgtaacaagaaagttactgaagcaatggactctggttattggtgtgaaagttgtcagaaaaaggaccaagaatgcagtttaaggtatataatggcggtgaaagtctccgactcaactggtgaaacttggttatctgcattcaatgatgaagcagagaagattatcggctgcacagctgatgatctcaatgatctaaaatcagaggaaggtgaagtgaatgagtttcagacaaaactgaaagaagctacttggtcatctcatctcttccggattagtgtttctcagcaagagtataacagtgagaagagacagaggataactgtaagaggtgtttctccaattgactttgctgctgaaacaagattattgctccaagacatttccaagaacaagacatctcagtaa

SEQ ID NO: 83218 - protein, 604 aa, Arabidopsis thaliana
  peptide (1)..(604): Ceres Seq. ID no. 12669239
  misc_feature (4)..(105): Pfam Name: Replication factor-A protein 1, N-terminal domain Pfam Description: Replication factor-A protein 1, N-terminal
  misc_feature (17)..(604): Homolog of NCBI NO: 15239494 NR Description: RNA helicase; protein id: At5g61000.1 thaliana] >gi|28393124|gb|AAO41995.1| putative RNA helicase
  misc_feature (89)..(599): Homolog of NCBI NO: 7440032 NR Description: probable replication protein A1 - rice
  misc_feature (4)..(133): Homolog of NCBI NO: 7440032 NR Description: probable replication protein A1 - rice
  misc_feature (144)..(594): Homolog of NCBI NO: 15225129 NR Description: putative replication protein A1; protein id: [Arabidopsis thaliana] >gi|25294331|pir||B84478 probable
  misc_feature (18)..(103): Homolog of NCBI NO: 15225129 NR Description: putative replication protein A1; protein id: [Arabidopsis thaliana] >gi|25294331|pir||B84478 probable
  misc_feature (1)..(602): Homolog of NCBI NO: 7488291 NR Description: replication protein A1 homolog T18B16.100 -
  misc_feature (144)..(601): Homolog of NCBI NO: 15242405 NR Description: replication protein A1-like; protein id:
  misc_feature (156)..(600): Homolog of NCBI NO: 13536993 NR Description: replication protein A 70kDa [Oryza sativa
  misc_feature (130)..(600): Homolog of NCBI NO: 34872759 NR Description: similar to replication protein A1 [Rattus
  misc_feature (131)..(600): Homolog of NCBI NO: 4506583 NR Description: replication protein A1, 70kDa; replication A1 (70kD) [Homo sapiens] >gi|1350579|sp|P27694|RFA1_HUMAN
MENSVTQDGIATVLANQSLDSSSVRPEIVVQVVDLKPAGNRYTFSANDGKMKIKAMLPATLTSDIISGKIQNLGLIRLLEYTVNDIPGKSEEKYMLITKCEAVASALDSEIKAEIKASTGIMLKPKHEFVAKSASQIINEQRGNAAPAARMAMTRRVHPLVSLNPYQGSWTIKVRVTNKGVMRTYKNARGEGCVFNVELTDEEGTQIQATMFNAAARKFYDRFEMGKVYYISRGSLKLANKQFKTVQNDYEMTLNENSEVEEASNEEMFTPETKFNFVPIDELGTYVNQKDLIDVIGVVQSVSPTMSIRRKNDNEMIPKRDITLADETKKTVVVSLWNDLATGIGQELLDMADNHPVIAIKSLKVGAFQGVSLSTISRSNVVINPNSPEATKLKSWYDAEGKETSMSAIGSGMSSSANNGSRSMYSDRVFLSHITSNPSLGEEKPVFFSTRAYISFIKPDQTMWYRACKTCNKKVTEAMDSGYWCESCQKKDQECSLRYIMAVKVSDSTGETWLSAFNDEAEKIIGCTADDLNDLKSEEGEVNEFQTKLKEATWSSHLFRISVSQQEYNSEKRQRITVRGVSPIDFAAETRLLLQDISKNKTSQ

SEQ ID NO: 83219 - protein, 554 aa, Arabidopsis thaliana
  peptide (1)..(554): Ceres Seq. ID no. 12669240
  misc_feature (1)..(55): Pfam Name: Replication factor-A protein 1, N-terminal domain Pfam Description: Replication factor-A protein 1, N-terminal
  misc_feature (1)..(554): Homolog of NCBI NO: 15239494 NR Description: RNA helicase; protein id: At5g61000.1 thaliana] >gi|28393124|gb|AAO41995.1| putative RNA helicase
  misc_feature (39)..(549): Homolog of NCBI NO: 7440032 NR Description: probable replication protein A1 - rice
  misc_feature (1)..(83): Homolog of NCBI NO: 7440032 NR Description: probable replication protein A1 - rice
  misc_feature (94)..(544): Homolog of NCBI NO: 15225129 NR Description: putative replication protein A1; protein id: [Arabidopsis thaliana] >gi|25294331|pir||B84478 probable
  misc_feature (1)..(53): Homolog of NCBI NO: 15225129 NR Description: putative replication protein A1; protein id: [Arabidopsis thaliana] >gi|25294331|pir||B84478 probable
  misc_feature (1)..(552): Homolog of NCBI NO: 7488291 NR Description: replication protein A1 homolog T18B16.100 -
  misc_feature (94)..(551): Homolog of NCBI NO: 15242405 NR Description: replication protein A1-like; protein id:
  misc_feature (106)..(550): Homolog of NCBI NO: 13536993 NR Description: replication protein A 70kDa [Oryza sativa
  misc_feature (80)..(550): Homolog of NCBI NO: 34872759 NR Description: similar to replication protein A1 [Rattus
  misc_feature (81)..(550): Homolog of NCBI NO: 4506583 NR Description: replication protein A1, 70kDa; replication A1 (70kD) [Homo sapiens] >gi|1350579|sp|P27694|RFA1_HUMAN
MKIKAMLPATLTSDIISGKIQNLGLIRLLEYTVNDIPGKSEEKYMLITKCEAVASALDSEIKAEIKASTGIMLKPKHEFVAKSASQIINEQRGNAAPAARMAMTRRVHPLVSLNPYQGSWTIKVRVTNKGVMRTYKNARGEGCVFNVELTDEEGTQIQATMFNAAARKFYDRFEMGKVYYISRGSLKLANKQFKTVQNDYEMTLNENSEVEEASNEEMFTPETKFNFVPIDELGTYVNQKDLIDVIGVVQSVSPTMSIRRKNDNEMIPKRDITLADETKKTVVVSLWNDLATGIGQELLDMADNHPVIAIKSLKVGAFQGVSLSTISRSNVVINPNSPEATKLKSWYDAEGKETSMSAIGSGMSSSANNGSRSMYSDRVFLSHITSNPSLGEEKPVFFSTRAYISFIKPDQTMWYRACKTCNKKVTEAMDSGYWCESCQKKDQECSLRYIMAVKVSDSTGETWLSAFNDEAEKIIGCTADDLNDLKSEEGEVNEFQTKLKEATWSSHLFRISVSQQEYNSEKRQRITVRGVSPIDFAAETRLLLQDISKNKTSQ

SEQ ID NO: 83220 - protein, 549 aa, Arabidopsis thaliana
  peptide (1)..(549): Ceres Seq. ID no. 12669241
  misc_feature (115)..(199): Pfam Name: OB-fold nucleic acid binding domain Pfam Description: OB-fold nucleic acid binding domain
  misc_feature (1)..(549): Homolog of NCBI NO: 15239494 NR Description: RNA helicase; protein id: At5g61000.1 thaliana] >gi|28393124|gb|AAO41995.1| putative RNA helicase
  misc_feature (34)..(544): Homolog of NCBI NO: 7440032 NR Description: probable replication protein A1 - rice
  misc_feature (1)..(78): Homolog of NCBI NO: 7440032 NR Description: probable replication protein A1 - rice
  misc_feature (89)..(539): Homolog of NCBI NO: 15225129 NR Description: putative replication protein A1; protein id: [Arabidopsis thaliana] >gi|25294331|pir||B84478 probable
  misc_feature (1)..(48): Homolog of NCBI NO: 15225129 NR Description: putative replication protein A1; protein id: [Arabidopsis thaliana] >gi|25294331|pir||B84478 probable
  misc_feature (1)..(547): Homolog of NCBI NO: 7488291 NR Description: replication protein A1 homolog T18B16.100 -
  misc_feature (89)..(546): Homolog of NCBI NO: 15242405 NR Description: replication protein A1-like; protein id:
  misc_feature (101)..(545): Homolog of NCBI NO: 13536993 NR Description: replication protein A 70kDa [Oryza sativa
  misc_feature (75)..(545): Homolog of NCBI NO: 34872759 NR Description: similar to replication protein A1 [Rattus
  misc_feature (76)..(545): Homolog of NCBI NO: 4506583 NR Description: replication protein A1, 70kDa; replication A1 (70kD) [Homo sapiens] >gi|1350579|sp|P27694|RFA1_HUMAN
MLPATLTSDIISGKIQNLGLIRLLEYTVNDIPGKSEEKYMLITKCEAVASALDSEIKAEIKASTGIMLKPKHEFVAKSASQIINEQRGNAAPAARMAMTRRVHPLVSLNPYQGSWTIKVRVTNKGVMRTYKNARGEGCVFNVELTDEEGTQIQATMFNAAARKFYDRFEMGKVYYISRGSLKLANKQFKTVQNDYEMTLNENSEVEEASNEEMFTPETKFNFVPIDELGTYVNQKDLIDVIGVVQSVSPTMSIRRKNDNEMIPKRDITLADETKKTVVVSLWNDLATGIGQELLDMADNHPVIAIKSLKVGAFQGVSLSTISRSNVVINPNSPEATKLKSWYDAEGKETSMSAIGSGMSSSANNGSRSMYSDRVFLSHITSNPSLGEEKPVFFSTRAYISFIKPDQTMWYRACKTCNKKVTEAMDSGYWCESCQKKDQECSLRYIMAVKVSDSTGETWLSAFNDEAEKIIGCTADDLNDLKSEEGEVNEFQTKLKEATWSSHLFRISVSQQEYNSEKRQRITVRGVSPIDFAAETRLLLQDISKNKTSQ

SEQ ID NO: 83221 - DNA, 1119 bp, Arabidopsis thaliana
  misc_feature (1)..(1119): Ceres Seq. ID no. 12669242
  misc_feature: MA Experiment ID: 20000184 Result: Up-regulated in Transcription
  misc_feature: MA Experiment 20000184 PARAMETER Experiment Name: At_Shoots__P Parameter: Age (day) Value: 7
  misc_feature: MA Experiment 20000184 PARAMETER Experiment Name: At_Shoots__P Parameter: Tissue Value: Shoots vs. Whole Plant
  misc_feature: MA Experiment ID: 20000265 Result: Up-regulated in Transcription
  misc_feature: MA Experiment 20000265 PARAMETER Experiment Name: At_Open_Flower_P Parameter: Age (day) Value: 21
  misc_feature: MA Experiment 20000265 PARAMETER Experiment Name: At_Open_Flower_P Parameter: Plant Line Value: WS
  misc_feature: MA Experiment 20000265 PARAMETER Experiment Name: At_Open_Flower_P Parameter: Tissue Value: Closed Flower vs. Whole Plant
  misc_feature: MA Experiment ID: 20000286 Result: Up-regulated in Transcription
  misc_feature: MA Experiment 20000286 PARAMETER Experiment Name: At_Open_Flower_P Parameter: Age (day) Value: 21
  misc_feature: MA Experiment 20000286 PARAMETER Experiment Name: At_Open_Flower_P Parameter: Plant Line Value: WS
  misc_feature: MA Experiment 20000286 PARAMETER Experiment Name: At_Open_Flower_P Parameter: Tissue Value: Half Open vs. Whole Plant
  misc_feature: MA Experiment ID: 20000438 Result: Up-regulated in Transcription
  misc_feature: MA Experiment 20000438 PARAMETER Experiment Name: At_Shoots__P Parameter: Age (day) Value: 14
  misc_feature: MA Experiment 20000438 PARAMETER Experiment Name: At_Shoots__P Parameter: Tissue Value: Shoots vs. Whole Plant
  misc_feature: MA Experiment ID: 20000527 Result: Down-regulated in Transcription
  misc_feature: MA Experiment 20000527 PARAMETER Experiment Name: At_10percent_PEG_P Parameter: Age (day) Value: 20
  misc_feature: MA Experiment 20000527 PARAMETER Experiment Name: At_10percent_PEG_P Parameter: Organism Value: A. thaliana
  misc_feature: MA Experiment 20000527 PARAMETER Experiment Name: At_10percent_PEG_P Parameter: Plant Line Value: WS
  misc_feature: MA Experiment 20000527 PARAMETER Experiment Name: At_10percent_PEG_P Parameter: Timepoint (day) Value: 20
  misc_feature: MA Experiment 20000527 PARAMETER Experiment Name: At_10percent_PEG_P Parameter: Tissue Value: Whole Plant
  misc_feature: MA Experiment 20000527 PARAMETER Experiment Name: At_10percent_PEG_P Parameter: Treatment Value: 10percent PEG vs. No Treatment
  misc_feature: MA Experiment ID: 20001504 Result: Down-regulated in Transcription
  misc_feature: MA Experiment 20001504 PARAMETER Experiment Name: At_Far-red-enriched_P Parameter: Age (day) Value: 10
  misc_feature: MA Experiment 20001504 PARAMETER Experiment Name: At_Far-red-enriched_P Parameter: Light Value: Far-red enriched vs. White
  misc_feature: MA Experiment 20001504 PARAMETER Experiment Name: At_Far-red-enriched_P Parameter: Organism Value: A. thaliana
  misc_feature: MA Experiment 20001504 PARAMETER Experiment Name: At_Far-red-enriched_P Parameter: Plant Line Value: Columbia
  misc_feature: MA Experiment 20001504 PARAMETER Experiment Name: At_Far-red-enriched_P Parameter: Timepoint (day) Value: 6
  misc_feature: MA Experiment 20001504 PARAMETER Experiment Name: At_Far-red-enriched_P Parameter: Tissue Value: Whole Plant
  misc_feature: MA Experiment ID: 20001556 Result: Up-regulated in Transcription
  misc_feature: MA Experiment 20001556 PARAMETER Experiment Name: At_Drought_Soil_Dry_P Parameter: Age (day) Value: 26
  misc_feature: MA Experiment 20001556 PARAMETER Experiment Name: At_Drought_Soil_Dry_P Parameter: Organism Value: A. thaliana
  misc_feature: MA Experiment 20001556 PARAMETER Experiment Name: At_Drought_Soil_Dry_P Parameter: Plant Line Value: WS
  misc_feature: MA Experiment 20001556 PARAMETER Experiment Name: At_Drought_Soil_Dry_P Parameter: Post Timepoint (hr) Value: None
  misc_feature: MA Experiment 20001556 PARAMETER Experiment Name: At_Drought_Soil_Dry_P Parameter: Post-Treatment Value: None
  misc_feature: MA Experiment 20001556 PARAMETER Experiment Name: At_Drought_Soil_Dry_P Parameter: Timepoint (day) Value: 12
  misc_feature: MA Experiment 20001556 PARAMETER Experiment Name: At_Drought_Soil_Dry_P Parameter: Treatment Value: Drought vs. No Drought
atggccttcaagtatcttctaccattgcttttactgtcattgttggttgctaattgtgcctcaaggcctttgtatcgtctcccaagcgaagcaaaacatgcaaccaagaaaccacttcagacttcccgtccttacaaccttgcacacagaggatcaaacggagagctccctgaagaaactgctcctgcatatatgagggccatagaggagggtgcagattttatagaaaccgatattttgtcttccaaagacggtgttcttatatgtcaccacgatgttaatctcgatgatacaaccgatgttgcagaccataaggagtttgcagaccgtaagaggacttatgaagtccaaggaatgaacatgaccggcttcttcactgttgattttactctcaaagagctgaaaacacttggtgcaaagcagaggtatcctttcagggatcaacaatacaatggtaaattcccgattattaccttcgacgagtatatttcgatagcactggatgcacctagagtggttgggatatatccagagatcaagaatccggttttcatgaatcagcaagtgaagtgggcggatggtaaaaaatttgaagataaatttgtggaaactttgaagaaatatggatacaaaggctcatatctgtctgaagattggttaaaacagccaatatttattcagtcttttgcagcaacttcgctagtttacatttcaaacatgacagactcaccaaaattgtttttgatcgacgatgtcactattcttaccgaagacactaataagacttacgcagagatcacatcagacgcatatttggattacattaaaccatatgtaattgggattggtccatggaaagacacaattgttcctgtgaacaataaccgtctcatgacaccaacagatttagttgcgagagcacattcgcgtaatcttcaggtccatccatacacataccgtaatgagaaccagtttctgcatttagagtttaatcaggacccttacctagagtatgattattggctcaataagatcggtgttgatggtttgttcactgatttcactggaagtctacacaattaccaggaattgaagtctcctttgcctcagcaacagtga

SEQ ID NO: 83222 - protein, 372 aa, Arabidopsis thaliana
  peptide (1)..(372): Ceres Seq. ID no. 12669243
  misc_feature (1)..(372): Homolog of NCBI NO: 15241502 NR Description: glycerophosphodiester phosphodiesterase - like protein id: At5g08030.1 [Arabidopsis thaliana]
  misc_feature (7)..(369): Homolog of NCBI NO: 15221164 NR Description: putative glycerophosphodiester phosphodiesterase; id: At1g74210.1, supported by cDNA: 24182., supported by cDNA: [Arabidopsis thaliana] >gi|25406323|pir||D96770
  misc_feature (11)..(367): Homolog of NCBI NO: 34909788 NR Description: putative glycerophosphoryl diester
  misc_feature (20)..(363): Homolog of NCBI NO: 34394918 NR Description: putative glycerophosphoryl diester
  misc_feature (39)..(354): Homolog of NCBI NO: 23126501 NR Description: hypothetical protein [Nostoc punctiforme]
  misc_feature (29)..(353): Homolog of NCBI NO: 15595544 NR Description: glycerophosphoryl diester phosphodiesterase, [Pseudomonas aeruginosa PA01] >gi|11348632|pir||A83603
  misc_feature (40)..(354): Homolog of NCBI NO: 16127502 NR Description: glycerophosphoryl diester phosphodiesterase crescentus CB15] >gi|25399885|pir||F87654 glycerophosphoryl
  misc_feature (44)..(353): Homolog of NCBI NO: 32997080 NR Description: glycerophosphoryl diester phosphodiesterase
  misc_feature (15)..(353): Homolog of NCBI NO: 22976139 NR Description: hypothetical protein [Ralstonia metallidurans]
  misc_feature (48)..(326): Homolog of NCBI NO: 21233651 NR Description: glycerophosphoryl diester phosphodiesterase campestris pv. campestris str. ATCC 33913] glycerophosphoryl diester phosphodiesterase [Xanthomonas
MAFKYLLPLLLLSLLVANCASRPLYRLPSEAKHATKKPLQTSRPYNLAHRGSNGELPEETAPAYMRAIEEGADFIETDILSSKDGVLICHHDVNLDDTTDVADHKEFADRKRTYEVQGMNMTGFFTVDFTLKELKTLGAKQRYPFRDQQYNGKFPIITFDEYISIALDAPRVVGIYPEIKNPVFMNQQVKWADGKKFEDKFVETLKKYGYKGSYLSEDWLKQPIFIQSFAATSLVYISNMTDSPKLFLIDDVTILTEDTNKTYAEITSDAYLDYIKPYVIGIGPWKDTIVPVNNNRLMTPTDLVARAHSRNLQVHPYTYRNENQFLHLEFNQDPYLEYDYWLNKIGVDGLFTDFTGSLHNYQELKSPLPQQQ

SEQ ID NO: 83223 - protein, 308 aa, Arabidopsis thaliana
  peptide (1)..(308): Ceres Seq. ID no. 12669244
  misc_feature (1)..(308): Homolog of NCBI NO: 15241502 NR Description: glycerophosphodiester phosphodiesterase - like protein id: At5g08030.1 [Arabidopsis thaliana]
  misc_feature (1)..(305): Homolog of NCBI NO: 15221164 NR Description: putative glycerophosphodiester phosphodiesterase; id: At1g74210.1, supported by cDNA: 24182., supported by cDNA: [Arabidopsis thaliana] >gi|25406323|pir||D96770
  misc_feature (1)..(303): Homolog of NCBI NO: 34909788 NR Description: putative glycerophosphoryl diester
  misc_feature (1)..(299): Homolog of NCBI NO: 34394918 NR Description: putative glycerophosphoryl diester
  misc_feature (1)..(290): Homolog of NCBI NO: 23126501 NR Description: hypothetical protein [Nostoc punctiforme]
  misc_feature (1)..(289): Homolog of NCBI NO: 15595544 NR Description: glycerophosphoryl diester phosphodiesterase, [Pseudomonas aeruginosa PA01] >gi|11348632|pir||A83603
  misc_feature (1)..(290): Homolog of NCBI NO: 16127502 NR Description: glycerophosphoryl diester phosphodiesterase crescentus CB15] >gi|25399885|pir||F87654 glycerophosphoryl
  misc_feature (1)..(289): Homolog of NCBI NO: 32997080 NR Description: glycerophosphoryl diester phosphodiesterase
  misc_feature (1)..(289): Homolog of NCBI NO: 22976139 NR Description: hypothetical protein [Ralstonia metallidurans]
  misc_feature (1)..(262): Homolog of NCBI NO: 21233651 NR Description: glycerophosphoryl diester phosphodiesterase campestris pv. campestris str. ATCC 33913] glycerophosphoryl diester phosphodiesterase [Xanthomonas
MRAIEEGADFIETDILSSKDGVLICHHDVNLDDTTDVADHKEFADRKRTYEVQGMNMTGFFTVDFTLKELKTLGAKQRYPFRDQQYNGKFPIITFDEYISIALDAPRVVGIYPEIKNPVFMNQQVKWADGKKFEDKFVETLKKYGYKGSYLSEDWLKQPIFIQSFAATSLVYISNMTDSPKLFLIDDVTILTEDTNKTYAEITSDAYLDYIKPYVIGIGPWKDTIVPVNNNRLMTPTDLVARAHSRNLQVHPYTYRNENQFLHLEFNQDPYLEYDYWLNKIGVDGLFTDFTGSLHNYQELKSPLPQQQ

SEQ ID NO: 83224 - protein, 254 aa, Arabidopsis thaliana
  peptide (1)..(254): Ceres Seq. ID no. 12669245
  misc_feature (1)..(254): Homolog of NCBI NO: 15241502 NR Description: glycerophosphodiester phosphodiesterase - like protein id: At5g08030.1 [Arabidopsis thaliana]
  misc_feature (1)..(251): Homolog of NCBI NO: 15221164 NR Description: putative glycerophosphodiester phosphodiesterase; id: At1g74210.1, supported by cDNA: 24182., supported by cDNA: [Arabidopsis thaliana] >gi|25406323|pir||D96770
  misc_feature (1)..(249): Homolog of NCBI NO: 34909788 NR Description: putative glycerophosphoryl diester
  misc_feature (1)..(245): Homolog of NCBI NO: 34394918 NR Description: putative glycerophosphoryl diester
  misc_feature (1)..(236): Homolog of NCBI NO: 23126501 NR Description: hypothetical protein [Nostoc punctiforme]
  misc_feature (1)..(235): Homolog of NCBI NO: 15595544 NR Description: glycerophosphoryl diester phosphodiesterase, [Pseudomonas aeruginosa PA01] >gi|11348632|pir||A83603
  misc_feature (1)..(236): Homolog of NCBI NO: 16127502 NR Description: glycerophosphoryl diester phosphodiesterase crescentus CB15] >gi|25399885|pir||F87654 glycerophosphoryl
  misc_feature (1)..(235): Homolog of NCBI NO: 32997080 NR Description: glycerophosphoryl diester phosphodiesterase
  misc_feature (1)..(235): Homolog of NCBI NO: 22976139 NR Description: hypothetical protein [Ralstonia metallidurans]
  misc_feature (1)..(208): Homolog of NCBI NO: 21233651 NR Description: glycerophosphoryl diester phosphodiesterase campestris pv. campestris str. ATCC 33913] glycerophosphoryl diester phosphodiesterase [Xanthomonas
MNMTGFFTVDFTLKELKTLGAKQRYPFRDQQYNGKFPIITFDEYISIALDAPRVVGIYPEIKNPVFMNQQVKWADGKKFEDKFVETLKKYGYKGSYLSEDWLKQPIFIQSFAATSLVYISNMTDSPKLFLIDDVTILTEDTNKTYAEITSDAYLDYIKPYVIGIGPWKDTIVPVNNNRLMTPTDLVARAHSRNLQVHPYTYRNENQFLHLEFNQDPYLEYDYWLNKIGVDGLFTDFTGSLHNYQELKSPLPQQQ

SEQ ID NO: 83225 - DNA, 1126 bp, Arabidopsis thaliana
  misc_feature (1)..(1126): Ceres Seq. ID no. 12669246
  misc_feature: MA Experiment ID: 20000180 Result: Up-regulated in Transcription
  misc_feature: MA Experiment 20000180 PARAMETER Experiment Name: At_Germinating_Seeds_P Parameter: Age (hr) Value: 24 vs. 0
  misc_feature: MA Experiment 20000180 PARAMETER Experiment Name: At_Germinating_Seeds_P Parameter: Tissue Value: Germinating Seeds
  misc_feature: MA Experiment ID: 20000185 Result: Down-regulated in Transcription
  misc_feature: MA Experiment 20000185 PARAMETER Experiment Name: At_Roots__P Parameter: Age (day) Value: 7 vs. 21
  misc_feature: MA Experiment 20000185 PARAMETER Experiment Name: At_Roots__P Parameter: Organism Value: A. thaliana
  misc_feature: MA Experiment 20000185 PARAMETER Experiment Name: At_Roots__P Parameter: Tissue Value: Roots vs. Whole Plant
  misc_feature: MA Experiment ID: 20000438 Result: Down-regulated in Transcription
  misc_feature: MA Experiment 20000438 PARAMETER Experiment Name: At_Shoots__P Parameter: Age (day) Value: 14
  misc_feature: MA Experiment 20000438 PARAMETER Experiment Name: At_Shoots__P Parameter: Tissue Value: Shoots vs. Whole Plant
  misc_feature: MA Experiment ID: 20000439 Result: Down-regulated in Transcription
  misc_feature: MA Experiment 20000439 PARAMETER Experiment Name: At_Roots__P Parameter: Age (day) Value: 14 vs. 21
  misc_feature: MA Experiment 20000439 PARAMETER Experiment Name: At_Roots__P Parameter: Organism Value: A. thaliana
  misc_feature: MA Experiment 20000439 PARAMETER Experiment Name: At_Roots__P Parameter: Tissue Value: Roots vs. Whole Plant
  misc_feature: MA Experiment ID: 20001558 Result: Down-regulated in Transcription
  misc_feature: MA Experiment 20001558 PARAMETER Experiment Name: At_Drought_Soil_Dry_P Parameter: Age (day) Value: 27
  misc_feature: MA Experiment 20001558 PARAMETER Experiment Name: At_Drought_Soil_Dry_P Parameter: Organism Value: A. thaliana
  misc_feature: MA Experiment 20001558 PARAMETER Experiment Name: At_Drought_Soil_Dry_P Parameter: Plant Line Value: WS
  misc_feature: MA Experiment 20001558 PARAMETER Experiment Name: At_Drought_Soil_Dry_P Parameter: Post Timepoint (hr) Value: 6
  misc_feature: MA Experiment 20001558 PARAMETER Experiment Name: At_Drought_Soil_Dry_P Parameter: Post-Treatment Value: Re-Water vs. No Drought
  misc_feature: MA Experiment 20001558 PARAMETER Experiment Name: At_Drought_Soil_Dry_P Parameter: Timepoint (day) Value: 13
  misc_feature: MA Experiment 20001558 PARAMETER Experiment Name: At_Drought_Soil_Dry_P Parameter: Treatment Value: Drought vs. No Drought
  misc_feature: MA Experiment ID: 20001905 Result: Down-regulated in Transcription
  misc_feature: MA Experiment 20001905 PARAMETER Experiment Name: At_Drought_Reproduction_P Parameter: Age (day) Value: 40
  misc_feature: MA Experiment 20001905 PARAMETER Experiment Name: At_Drought_Reproduction_P Parameter: Organism Value: A. thaliana
  misc_feature: MA Experiment 20001905 PARAMETER Experiment Name: At_Drought_Reproduction_P Parameter: Plant Line Value: WS
  misc_feature: MA Experiment 20001905 PARAMETER Experiment Name: At_Drought_Reproduction_P Parameter: Timepoint (day) Value: 10
  misc_feature: MA Experiment 20001905 PARAMETER Experiment Name: At_Drought_Reproduction_P Parameter: Tissue Value: Rosettes
  misc_feature: MA Experiment 20001905 PARAMETER Experiment Name: At_Drought_Reproduction_P Parameter: Treatment Value: Drought vs. No Drought
aaaggctttaaaatagtctgggaaaagtgagccaacgtgtctttaagttatacggcggaagatggtggggtgggcgattgcgctacacggcggtgccggagacattccgatcgatctccccgacgagcgacgtatccctcgtgagagcgccctccgtcactgcctcgatcttggcatctccgccctcaaatccggcaagcctcccttggacgtcgccgaacttgtcgttcgtgaacttgagaaccacccggacttcaatgcgggtaaaggatctgtcttaactgcacaaggcactgttgaaatggaagcttccattatggacggtaaaaccaaaagatgtggagctgtctccggcttgaccactgttgttaatcccatttctttagctcgcctcgtcatggagaaaactcctcatatatatcttgcattcgatgctgctgaagcttttgcaagagcacatggtgttgagacggtagattctagccatttcataactcctgaaaacattgcaaggctaaagcaggccaaagaattcaatcgagtccagttggattacacagtccctagtccgaaagtaccggacaattgcggtgacagccaaataggaacggtcggatgtgtagctgtggacagtgctggaaatctagcttcggctacatcaacgggcggttatgtcaacaaaatggttggcagaattggggatacgccagtcattggcgcaggaacttacgctaaccacctttgtgccatctcagccacaggtaaaggagaggatatcatccgtggaaccgtggctagagacgtggctgcactcatggaatataaaggcttgtctttgactgaggcagcggcttatgttgttgaccaatctgttcccagaggaagctgtggactcgttgctgtctctgccaatggtgaagtcacaatgccgtttaacactaccggaatgttcagggcttgtgctagcgaagatggttactctgagatcgcaatctggccaaacaattgaaatcactagacgaaggaatggctttgtctattattaagcaactctgtttaatcttcttctttagtttcagtttgtaagttgtaaccttatatgactcagtcttgcagtattttagtt

SEQ ID NO: 83226 - protein, 315 aa, Arabidopsis thaliana
  peptide (1)..(315): Ceres Seq. ID no. 12669247
  misc_feature (1)..(315): Homolog of NCBI NO: 15241528 NR Description: asparaginase; protein id: At5g08100.1, supported cDNA: gi_14517439, supported by cDNA: gi_20147330 [Arabidopsis
  misc_feature (1)..(315): Homolog of NCBI NO: 1076292 NR Description: asparaginase (EC 3.5.1.1) - Arabidopsis thaliana
  misc_feature (1)..(313): Homolog of NCBI NO: 6685231 NR Description: L-asparaginase (L-asparagine amidohydrolase)
  misc_feature (1)..(313): Homolog of NCBI NO: 231573 NR Description: L-ASPARAGINASE (L-ASPARAGINE AMIDOHYDROLASE)
  misc_feature (1)..(313): Homolog of NCBI NO: 1703447 NR Description: L-ASPARAGINASE (L-ASPARAGINE AMIDOHYDROLASE)
  misc_feature (20)..(313): Homolog of NCBI NO: 231574 NR Description: L-ASPARAGINASE (L-ASPARAGINE AMIDOHYDROLASE)
  misc_feature (2)..(315): Homolog of NCBI NO: 34896688 NR Description: putative L-asparaginase [Oryza sativa (japonica
  misc_feature (1)..(183): Homolog of NCBI NO: 10241428 NR Description: putative l-asparaginase [Oryza sativa (indica
  misc_feature (183)..(312): Homolog of NCBI NO: 10241428 NR Description: putative l-asparaginase [Oryza sativa (indica
  misc_feature (1)..(312): Homolog of NCBI NO: 18401029 NR Description: putative L-asparaginase; protein id: At3g16150.1,
MVGWAIALHGGAGDIPIDLPDERRIPRESALRHCLDLGISALKSGKPPLDVAELVVRELENHPDFNAGKGSVLTAQGTVEMEASIMDGKTKRCGAVSGLTTVVNPISLARLVMEKTPHIYLAFDAAEAFARAHGVETVDSSHFITPENIARLKQAKEFNRVQLDYTVPSPKVPDNCGDSQIGTVGCVAVDSAGNLASATSTGGYVNKMVGRIGDTPVIGAGTYANHLCAISATGKGEDIIRGTVARDVAALMEYKGLSLTEAAAYVVDQSVPRGSCGLVAVSANGEVTMPFNTTGMFRACASEDGYSEIAIWPNN

SEQ ID NO: 83227 - protein, 235 aa, Arabidopsis thaliana
  peptide (1)..(235): Ceres Seq. ID no. 12669248
  misc_feature (1)..(235): Homolog of NCBI NO: 15241528 NR Description: asparaginase; protein id: At5g08100.1, supported cDNA: gi_14517439, supported by cDNA: gi_20147330 [Arabidopsis
  misc_feature (1)..(235): Homolog of NCBI NO: 1076292 NR Description: asparaginase (EC 3.5.1.1) - Arabidopsis thaliana
  misc_feature (1)..(233): Homolog of NCBI NO: 6685231 NR Description: L-asparaginase (L-asparagine amidohydrolase)
  misc_feature (1)..(233): Homolog of NCBI NO: 231573 NR Description: L-ASPARAGINASE (L-ASPARAGINE AMIDOHYDROLASE)
  misc_feature (1)..(233): Homolog of NCBI NO: 1703447 NR Description: L-ASPARAGINASE (L-ASPARAGINE AMIDOHYDROLASE)
  misc_feature (1)..(233): Homolog of NCBI NO: 231574 NR Description: L-ASPARAGINASE (L-ASPARAGINE AMIDOHYDROLASE)
  misc_feature (1)..(235): Homolog of NCBI NO: 34896688 NR Description: putative L-asparaginase [Oryza sativa (japonica
  misc_feature (1)..(103): Homolog of NCBI NO: 10241428 NR Description: putative l-asparaginase [Oryza sativa (indica
  misc_feature (103)..(232): Homolog of NCBI NO: 10241428 NR Description: putative l-asparaginase [Oryza sativa (indica
  misc_feature (1)..(232): Homolog of NCBI NO: 18401029 NR Description: putative L-asparaginase; protein id: At3g16150.1,
MEASIMDGKTKRCGAVSGLTTVVNPISLARLVMEKTPHIYLAFDAAEAFARAHGVETVDSSHFITPENIARLKQAKEFNRVQLDYTVPSPKVPDNCGDSQIGTVGCVAVDSAGNLASATSTGGYVNKMVGRIGDTPVIGAGTYANHLCAISATGKGEDIIRGTVARDVAALMEYKGLSLTEAAAYVVDQSVPRGSCGLVAVSANGEVTMPFNTTGMFRACASEDGYSEIAIWPNN

SEQ ID NO: 83228 - protein, 230 aa, Arabidopsis thaliana
  peptide (1)..(230): Ceres Seq. ID no. 12669249
  misc_feature (1)..(230): Homolog of NCBI NO: 15241528 NR Description: asparaginase; protein id: At5g08100.1, supported cDNA: gi_14517439, supported by cDNA: gi_20147330 [Arabidopsis
  misc_feature (1)..(230): Homolog of NCBI NO: 1076292 NR Description: asparaginase (EC 3.5.1.1) - Arabidopsis thaliana
  misc_feature (1)..(228): Homolog of NCBI NO: 6685231 NR Description: L-asparaginase (L-asparagine amidohydrolase)
  misc_feature (1)..(228): Homolog of NCBI NO: 231573 NR Description: L-ASPARAGINASE (L-ASPARAGINE AMIDOHYDROLASE)
  misc_feature (1)..(228): Homolog of NCBI NO: 1703447 NR Description: L-ASPARAGINASE (L-ASPARAGINE AMIDOHYDROLASE)
  misc_feature (1)..(228): Homolog of NCBI NO: 231574 NR Description: L-ASPARAGINASE (L-ASPARAGINE AMIDOHYDROLASE)
  misc_feature (1)..(230): Homolog of NCBI NO: 34896688 NR Description: putative L-asparaginase [Oryza sativa (japonica
  misc_feature (1)..(98): Homolog of NCBI NO: 10241428 NR Description: putative l-asparaginase [Oryza sativa (indica
  misc_feature (98)..(227): Homolog of NCBI NO: 10241428 NR Description: putative l-asparaginase [Oryza sativa (indica
  misc_feature (1)..(227): Homolog of NCBI NO: 18401029 NR Description: putative L-asparaginase; protein id: At3g16150.1,
MDGKTKRCGAVSGLTTVVNPISLARLVMEKTPHIYLAFDAAEAFARAHGVETVDSSHFITPENIARLKQAKEFNRVQLDYTVPSPKVPDNCGDSQIGTVGCVAVDSAGNLASATSTGGYVNKMVGRIGDTPVIGAGTYANHLCAISATGKGEDIIRGTVARDVAALMEYKGLSLTEAAAYVVDQSVPRGSCGLVAVSANGEVTMPFNTTGMFRACASEDGYSEIAIWPNN

SEQ ID NO: 83229 - DNA, 1353 bp, Arabidopsis thaliana
  misc_feature (1)..(1353): Ceres Seq. ID no. 12669262
  misc_feature: MA Experiment ID: 108488 Result: Down-regulated in Transcription
  misc_feature: MA Experiment ID: 108573 Result: Up-regulated in Transcription
  misc_feature: MA Experiment 108573 PARAMETER Experiment Name: At_Drought_cDNA_P Parameter: Timepoint (hr) Value: 6
  misc_feature: MA Experiment 108573 PARAMETER Experiment Name: At_Drought_cDNA_P Parameter: Tissue Value: Aerial
  misc_feature: MA Experiment 108573 PARAMETER Experiment Name: At_Drought_cDNA_P Parameter: Treatment Value: Drought vs. No Drought
  misc_feature: MA Experiment ID: 108577 Result: Down-regulated in Transcription
  misc_feature: MA Experiment 108577 PARAMETER Experiment Name: At_42deg_Heat_cDNA_P Parameter: Temperature (deg C) Value: 42 vs. 22
  misc_feature: MA Experiment 108577 PARAMETER Experiment Name: At_42deg_Heat_cDNA_P Parameter: Timepoint (hr) Value: 6
  misc_feature: MA Experiment 108577 PARAMETER Experiment Name: At_42deg_Heat_cDNA_P Parameter: Tissue Value: Aerial
  misc_feature: MA Experiment ID: 20000069 Result: Up-regulated in Transcription
  misc_feature: MA Experiment 20000069 PARAMETER Experiment Name: At_100uM_ABA_Mutants_cDNA_P Parameter: Plant Line Value: CS23
  misc_feature: MA Experiment 20000069 PARAMETER Experiment Name: At_100uM_ABA_Mutants_cDNA_P Parameter: Timepoint (hr) Value: 6
  misc_feature: MA Experiment 20000069 PARAMETER Experiment Name: At_100uM_ABA_Mutants_cDNA_P Parameter: Tissue Value: Aerial
  misc_feature: MA Experiment 20000069 PARAMETER Experiment Name: At_100uM_ABA_Mutants_cDNA_P Parameter: Treatment Value: 100uM ABA vs. No Treatment
  misc_feature: MA Experiment ID: 20000070 Result: Up-regulated in Transcription
  misc_feature: MA Experiment 20000070 PARAMETER Experiment Name: At_100uM_ABA_Mutants_cDNA_P Parameter: Plant Line Value: CS24
  misc_feature: MA Experiment 20000070 PARAMETER Experiment Name: At_100uM_ABA_Mutants_cDNA_P Parameter: Timepoint (hr) Value: 6
  misc_feature: MA Experiment 20000070 PARAMETER Experiment Name: At_100uM_ABA_Mutants_cDNA_P Parameter: Tissue Value: Aerial
  misc_feature: MA Experiment 20000070 PARAMETER Experiment Name: At_100uM_ABA_Mutants_cDNA_P Parameter: Treatment Value: 100uM ABA vs. No Treatment
  misc_feature: MA Experiment ID: 20000071 Result: Up-regulated in Transcription
  misc_feature: MA Experiment 20000071 PARAMETER Experiment Name: At_100uM_ABA_Mutants_cDNA_P Parameter: Plant Line Value: CS8104
  misc_feature: MA Experiment 20000071 PARAMETER Experiment Name: At_100uM_ABA_Mutants_cDNA_P Parameter: Timepoint (hr) Value: 6
  misc_feature: MA Experiment 20000071 PARAMETER Experiment Name: At_100uM_ABA_Mutants_cDNA_P Parameter: Tissue Value: Aerial
  misc_feature: MA Experiment 20000071 PARAMETER Experiment Name: At_100uM_ABA_Mutants_cDNA_P Parameter: Treatment Value: 100uM ABA vs. No Treatment
  misc_feature: MA Experiment ID: 20000072 Result: Up-regulated in Transcription
  misc_feature: MA Experiment 20000072 PARAMETER Experiment Name: At_100uM_ABA_Mutants_cDNA_P Parameter: Plant Line Value: CS8105
  misc_feature: MA Experiment 20000072 PARAMETER Experiment Name: At_100uM_ABA_Mutants_cDNA_P Parameter: Timepoint (hr) Value: 6
  misc_feature: MA Experiment 20000072 PARAMETER Experiment Name: At_100uM_ABA_Mutants_cDNA_P Parameter: Tissue Value: Aerial
  misc_feature: MA Experiment 20000072 PARAMETER Experiment Name: At_100uM_ABA_Mutants_cDNA_P Parameter: Treatment Value: 100uM ABA vs. No Treatment
  misc_feature: MA Experiment ID: 20000086 Result: Up-regulated in Transcription
  misc_feature: MA Experiment 20000086 PARAMETER Experiment Name: At_100uM_ABA_Mutants_cDNA_P Parameter: Plant Line Value: CS22
  misc_feature: MA Experiment 20000086 PARAMETER Experiment Name: At_100uM_ABA_Mutants_cDNA_P Parameter: Timepoint (hr) Value: 6
  misc_feature: MA Experiment 20000086 PARAMETER Experiment Name: At_100uM_ABA_Mutants_cDNA_P Parameter: Tissue Value: Aerial
  misc_feature: MA Experiment 20000086 PARAMETER Experiment Name: At_100uM_ABA_Mutants_cDNA_P Parameter: Treatment Value: 100uM ABA vs. No Treatment
  misc_feature: MA Experiment ID: 20000087 Result: Up-regulated in Transcription
  misc_feature: MA Experiment 20000087 PARAMETER Experiment Name: At_100uM_ABA_Mutants_cDNA_P Parameter: Plant Line Value: WS
  misc_feature: MA Experiment 20000087 PARAMETER Experiment Name: At_100uM_ABA_Mutants_cDNA_P Parameter: Timepoint (hr) Value: 6
  misc_feature: MA Experiment 20000087 PARAMETER Experiment Name: At_100uM_ABA_Mutants_cDNA_P Parameter: Tissue Value: Aerial
  misc_feature: MA Experiment 20000087 PARAMETER Experiment Name: At_100uM_ABA_Mutants_cDNA_P Parameter: Treatment Value: 100uM ABA vs. No Treatment
  misc_feature: MA Experiment ID: 20000088 Result: Up-regulated in Transcription
  misc_feature: MA Experiment 20000088 PARAMETER Experiment Name: At_100uM_ABA_Mutants_cDNA_P Parameter: Plant Line Value: Landsberg
  misc_feature: MA Experiment 20000088 PARAMETER Experiment Name: At_100uM_ABA_Mutants_cDNA_P Parameter: Timepoint (hr) Value: 6
  misc_feature: MA Experiment 20000088 PARAMETER Experiment Name: At_100uM_ABA_Mutants_cDNA_P Parameter: Tissue Value: Aerial
  misc_feature: MA Experiment 20000088 PARAMETER Experiment Name: At_100uM_ABA_Mutants_cDNA_P Parameter: Treatment Value: 100uM ABA vs. No Treatment
  misc_feature: MA Experiment ID: 20000111 Result: Down-regulated in Transcription
  misc_feature: MA Experiment 20000111 PARAMETER Experiment Name: At_42deg_Heat_cDNA_P Parameter: Temperature (deg C) Value: 42 vs. 22
  misc_feature: MA Experiment 20000111 PARAMETER Experiment Name: At_42deg_Heat_cDNA_P Parameter: Timepoint (hr) Value: 6
  misc_feature: MA Experiment 20000111 PARAMETER Experiment Name: At_42deg_Heat_cDNA_P Parameter: Tissue Value: Aerial
  misc_feature: MA Experiment ID: 20000113 Result: Down-regulated in Transcription
  misc_feature: MA Experiment 20000113 PARAMETER Experiment Name: At_42deg_Heat_cDNA_P Parameter: Temperature (deg C) Value: 42 vs. 22
  misc_feature: MA Experiment 20000113 PARAMETER Experiment Name: At_42deg_Heat_cDNA_P Parameter: Timepoint (hr) Value: 8
  misc_feature: MA Experiment 20000113 PARAMETER Experiment Name: At_42deg_Heat_cDNA_P Parameter: Tissue Value: Aerial
  misc_feature: MA Experiment ID: 20000173 Result: Down-regulated in Transcription
  misc_feature: MA Experiment 20000173 PARAMETER Experiment Name: At_42deg_Heat_P Parameter: Age (day) Value: 14
  misc_feature: MA Experiment 20000173 PARAMETER Experiment Name: At_42deg_Heat_P Parameter: Organism Value: A. thaliana
  misc_feature: MA Experiment 20000173 PARAMETER Experiment Name: At_42deg_Heat_P Parameter: Plant Line Value: WS
  misc_feature: MA Experiment 20000173 PARAMETER Experiment Name: At_42deg_Heat_P Parameter: Temperature (deg C) Value: 42 vs. 22
  misc_feature: MA Experiment 20000173 PARAMETER Experiment Name: At_42deg_Heat_P Parameter: Timepoint (hr) Value: 6
  misc_feature: MA Experiment 20000173 PARAMETER Experiment Name: At_42deg_Heat_P Parameter: Tissue Value: Aerial
  misc_feature: MA Experiment ID: 20000224 Result: Down-regulated in Transcription
  misc_feature: MA Experiment ID: 20000264 Result: Up-regulated in Transcription
  misc_feature: MA Experiment 20000264 PARAMETER Experiment Name: At_Open_Flower_P Parameter: Age (day) Value: 21
  misc_feature: MA Experiment 20000264 PARAMETER Experiment Name: At_Open_Flower_P Parameter: Plant Line Value: WS
  misc_feature: MA Experiment 20000264 PARAMETER Experiment Name: At_Open_Flower_P Parameter: Tissue Value: Open Flower vs. Whole Plant
  misc_feature: MA Experiment ID: 20000265 Result: Up-regulated in Transcription
  misc_feature: MA Experiment 20000265 PARAMETER Experiment Name: At_Open_Flower_P Parameter: Age (day) Value: 21
  misc_feature: MA Experiment 20000265 PARAMETER Experiment Name: At_Open_Flower_P Parameter: Plant Line Value: WS
  misc_feature: MA Experiment 20000265 PARAMETER Experiment Name: At_Open_Flower_P Parameter: Tissue Value: Closed Flower vs. Whole Plant
  misc_feature: MA Experiment ID: 20000286 Result: Up-regulated in Transcription
  misc_feature: MA Experiment 20000286 PARAMETER Experiment Name: At_Open_Flower_P Parameter: Age (day) Value: 21
  misc_feature: MA Experiment 20000286 PARAMETER Experiment Name: At_Open_Flower_P Parameter: Plant Line Value: WS
  misc_feature: MA Experiment 20000286 PARAMETER Experiment Name: At_Open_Flower_P Parameter: Tissue Value: Half Open vs. Whole Plant
  misc_feature: MA Experiment ID: 20000794 Result: Up-regulated in Transcription
  misc_feature: MA Experiment 20000794 PARAMETER Experiment Name: At_Petals_P Parameter: Age (day) Value: 23-25 days
  misc_feature: MA Experiment 20000794 PARAMETER Experiment Name: At_Petals_P Parameter: Plant Line Value: WS
  misc_feature: MA Experiment 20000794 PARAMETER Experiment Name: At_Petals_P Parameter: Tissue Value: Petals vs. Whole plant
  misc_feature: MA Experiment ID: 20001248 Result: Down-regulated in Transcription
  misc_feature: MA Experiment 20001248 PARAMETER Experiment Name: At_Far-red-induction_P Parameter: Age (day) Value: 7
  misc_feature: MA Experiment 20001248 PARAMETER Experiment Name: At_Far-red-induction_P Parameter: Light Value: Far-red vs. White
  misc_feature: MA Experiment 20001248 PARAMETER Experiment Name: At_Far-red-induction_P Parameter: Organism Value: A. thaliana
  misc_feature: MA Experiment 20001248 PARAMETER Experiment Name: At_Far-red-induction_P Parameter: Plant Line Value: Columbia
  misc_feature: MA Experiment 20001248 PARAMETER Experiment Name: At_Far-red-induction_P Parameter: Timepoint (hr) Value: 4
  misc_feature: MA Experiment 20001248 PARAMETER Experiment Name: At_Far-red-induction_P Parameter: Tissue Value: Whole Plant
  misc_feature: MA Experiment ID: 20001557 Result: Up-regulated in Transcription
  misc_feature: MA Experiment 20001557 PARAMETER Experiment Name: At_Drought_Soil_Dry_P Parameter: Age (day) Value: 27
  misc_feature: MA Experiment 20001557 PARAMETER Experiment Name: At_Drought_Soil_Dry_P Parameter: Organism Value: A. thaliana
  misc_feature: MA Experiment 20001557 PARAMETER Experiment Name: At_Drought_Soil_Dry_P Parameter: Plant Line Value: WS
  misc_feature: MA Experiment 20001557 PARAMETER Experiment Name: At_Drought_Soil_Dry_P Parameter: Post Timepoint (hr) Value: 3
  misc_feature: MA Experiment 20001557 PARAMETER Experiment Name: At_Drought_Soil_Dry_P Parameter: Post-Treatment Value: Re-Water vs. No Drought
  misc_feature: MA Experiment 20001557 PARAMETER Experiment Name: At_Drought_Soil_Dry_P Parameter: Timepoint (day) Value: 13
  misc_feature: MA Experiment 20001557 PARAMETER Experiment Name: At_Drought_Soil_Dry_P Parameter: Treatment Value: Drought vs. No Drought
  misc_feature: MA Experiment ID: 20001757 Result: Down-regulated in Transcription
  misc_feature: MA Experiment 20001757 PARAMETER Experiment Name: At_50mM_NH4NO3_L-to-H_P Parameter: Timepoint (hr) Value: 6
  misc_feature: MA Experiment 20001757 PARAMETER Experiment Name: At_50mM_NH4NO3_L-to-H_P Parameter: Tissue Value: Leaf
  misc_feature: MA Experiment 20001757 PARAMETER Experiment Name: At_50mM_NH4NO3_L-to-H_P Parameter: Treatment Value: 50mM NH4NO3 vs 100mM Mannitol
  misc_feature: Pfam Name: zf-C3HC4 Pfam Description: Zinc finger, C3HC4 type (RING finger)
atcctctatctctcttttgttttttctctctctcacagagaaaaagaacacaatgccagtttctgcagagccttcttcatcttcttcaacaacaatcggtcaacacatgagactccaacgacctaggaatcatcgaaatctcccacccatttccaccgccgacgaacctctaatccccaaacctagccgcgtctctaaatccgccatgtcttccttcttcctcttgccagaaactactaagaagaaacccaacggaacggcgtcgtttcgtggtctaggctgcacaacctccgcatctcagcaagtttcagtcccggcagtgattcgctcctccgcggattgggatgctagtaatttcaaaattaagaagacgaagaagaagaacaagaacaagggtagtagtagctacaatggtggttcgattaagatcttgagcgaagctagtactagtagtagcgtcgcttgcgcagcgattcctgatgtttggtgtggtcctggagttgggttttcaacggatgctgtcgtcggaggctccattgacacagttgtttcagatcctccgagaaggaatattccggtgagacgcaaaatcgatggagataaaaccaatagtaacagtaataatcatagagaggtggttcttcttctcttcttcctagacgatctctcaatcaagagtctaatccttattttgattctgattcgagttttttgacatcgcgggctgagcagactgatagatatcatcgtcatctaagactgccttaccctgatggactcgctgagatgatgatgatgcagaatggttttgtgatgggaggagtattaagctcattcgatcaattccgtgacatgaggctcaatgtcgataacatgacatacgagcaacttttggagcttggtgaaagaattgggcatgtgaacactggacttactgaaaaacagatcaaaagttgtcttcggaaagtcaaaccatgccggcaagatacaacagttgctgatagaaagtgcatcatctgtcaagacgagtatgaggcgaaggacgaggtaggggaattacgatgtgggcacaggttccatatcgactgtgtgaatcaatggcttgtgaggaagaactcttgtccggtctgtaaaacgatggcgtacaataagtcttagttagatattatctcttcctgtgatgtgattcttgatttcgggattgaaaccaaatcactattttatgttaagattcttttttggctttttattcatgattgctatttttctgaggaaaaactgttgagacctttgtattacctatggaaaagtctcggagacattgtgaaccccacattgcgtgtgggtttgttc

SEQ ID NO: 83230 - protein, 237 aa, Arabidopsis thaliana
  peptide (1)..(237): Ceres Seq. ID no. 12669263
  misc_feature: Pfam Name: zf-C3HC4 Pfam Description: Zinc finger, C3HC4 type (RING finger)
  misc_feature (18)..(211): Homolog of NCBI NO: 15219544 NR Description: putative RING zinc finger protein; protein id: [Arabidopsis thaliana] >gi|25406292|pir||H96764 protein RING zinc
  misc_feature (28)..(217): Homolog of NCBI NO: 15220912 NR Description: zinc-finger protein (C-terminal), putative; id: At1g17970.1, supported by cDNA: 261272., supported by cDNA: [Arabidopsis thaliana] >gi|16226279|gb|AAL16122.1|AF428290_1
  misc_feature (28)..(217): Homolog of NCBI NO: 21554695 NR Description: zinc-finger protein (C-terminal), putative
  misc_feature (28)..(217): Homolog of NCBI NO: 25511721 NR Description: F2H15.19 protein - Arabidopsis thaliana
SSISLLFFLSLTEKKNTMPVSAEPSSSSSTTIGQHMRLQRPRNHRNLPPISTADEPLIPKPSRVSKSAMSSFFLLPETTKKKPNGTASFRGLGCTTSASQQVSVPAVIRSSADWDASNFKIKKTKKKNKNKGSSSYNGGSIKILSEASTSSSVACAAIPDVWCGPGVGFSTDAVVGGSIDTVVSDPPRRNIPVRRKIDGDKTNSNSNNHREVVLLLFFLDDLSIKSLILILILIRVF

SEQ ID NO: 83231 - protein, 220 aa, Arabidopsis thaliana
  peptide (1)..(220): Ceres Seq. ID no. 12669264
  misc_feature: Pfam Name: zf-C3HC4 Pfam Description: Zinc finger, C3HC4 type (RING finger)
  misc_feature (1)..(194): Homolog of NCBI NO: 15219544 NR Description: putative RING zinc finger protein; protein id: [Arabidopsis thaliana] >gi|25406292|pir||H96764 protein RING zinc
  misc_feature (11)..(200): Homolog of NCBI NO: 15220912 NR Description: zinc-finger protein (C-terminal), putative; id: At1g17970.1, supported by cDNA: 261272., supported by cDNA: [Arabidopsis thaliana] >gi|16226279|gb|AAL16122.1|AF428290_1
  misc_feature (11)..(200): Homolog of NCBI NO: 21554695 NR Description: zinc-finger protein (C-terminal), putative
  misc_feature (11)..(200): Homolog of NCBI NO: 25511721 NR Description: F2H15.19 protein - Arabidopsis thaliana
MPVSAEPSSSSSTTIGQHMRLQRPRNHRNLPPISTADEPLIPKPSRVSKSAMSSFFLLPETTKKKPNGTASFRGLGCTTSASQQVSVPAVIRSSADWDASNFKIKKTKKKNKNKGSSSYNGGSIKILSEASTSSSVACAAIPDVWCGPGVGFSTDAVVGGSIDTVVSDPPRRNIPVRRKIDGDKTNSNSNNHREVVLLLFFLDDLSIKSLILILILIRVF

SEQ ID NO: 83232 - protein, 202 aa, Arabidopsis thaliana
  peptide (1)..(202): Ceres Seq. ID no. 12669265
  misc_feature: Pfam Name: zf-C3HC4 Pfam Description: Zinc finger, C3HC4 type (RING finger)
  misc_feature (1)..(176): Homolog of NCBI NO: 15219544 NR Description: putative RING zinc finger protein; protein id: [Arabidopsis thaliana] >gi|25406292|pir||H96764 protein RING zinc
  misc_feature (1)..(182): Homolog of NCBI NO: 15220912 NR Description: zinc-finger protein (C-terminal), putative; id: At1g17970.1, supported by cDNA: 261272., supported by cDNA: [Arabidopsis thaliana] >gi|16226279|gb|AAL16122.1|AF428290_1
  misc_feature (1)..(182): Homolog of NCBI NO: 21554695 NR Description: zinc-finger protein (C-terminal), putative
  misc_feature (1)..(182): Homolog of NCBI NO: 25511721 NR Description: F2H15.19 protein - Arabidopsis thaliana
MRLQRPRNHRNLPPISTADEPLIPKPSRVSKSAMSSFFLLPETTKKKPNGTASFRGLGCTTSASQQVSVPAVIRSSADWDASNFKIKKTKKKNKNKGSSSYNGGSIKILSEASTSSSVACAAIPDVWCGPGVGFSTDAVVGGSIDTVVSDPPRRNIPVRRKIDGDKTNSNSNNHREVVLLLFFLDDLSIKSLILILILIRVF

SEQ ID NO: 83233 - DNA, 1171 bp, Arabidopsis thaliana
  misc_feature (1)..(1171): Ceres Seq. ID no. 12669273
  misc_feature: MA Experiment ID: 108461 Result: Up-regulated in Transcription
  misc_feature: MA Experiment 108461 PARAMETER Experiment Name: At_Germinating_Seeds_cDNA_P Parameter: Age (day) Value: 1 vs. 0
  misc_feature: MA Experiment 108461 PARAMETER Experiment Name: At_Germinating_Seeds_cDNA_P Parameter: Tissue Value: Germinating Seeds
  misc_feature: MA Experiment ID: 108462 Result: Up-regulated in Transcription
  misc_feature: MA Experiment 108462 PARAMETER Experiment Name: At_Germinating_Seeds_cDNA_P Parameter: Age (day) Value: 2 vs. 0
  misc_feature: MA Experiment 108462 PARAMETER Experiment Name: At_Germinating_Seeds_cDNA_P Parameter: Tissue Value: Germinating Seeds
  misc_feature: MA Experiment ID: 108463 Result: Up-regulated in Transcription
  misc_feature: MA Experiment 108463 PARAMETER Experiment Name: At_Germinating_Seeds_cDNA_P Parameter: Age (day) Value: 3 vs. 0
  misc_feature: MA Experiment 108463 PARAMETER Experiment Name: At_Germinating_Seeds_cDNA_P Parameter: Tissue Value: Germinating Seeds
  misc_feature: MA Experiment ID: 108464 Result: Up-regulated in Transcription
  misc_feature: MA Experiment 108464 PARAMETER Experiment Name: At_Germinating_Seeds_cDNA_P Parameter: Age (day) Value: 4 vs. 0
  misc_feature: MA Experiment 108464 PARAMETER Experiment Name: At_Germinating_Seeds_cDNA_P Parameter: Tissue Value: Germinating Seeds
  misc_feature: MA Experiment ID: 108594 Result: Down-regulated in Transcription
  misc_feature: MA Experiment 108594 PARAMETER Experiment Name: At_Ler-rhl_Root_cDNA_P Parameter: Plant Line Value: null
  misc_feature: MA Experiment ID: 108595 Result: Down-regulated in Transcription
  misc_feature: MA Experiment 108595 PARAMETER Experiment Name: At_Ler-pi_Ovule_cDNA_P Parameter: Plant Line Value: null
  misc_feature: MA Experiment ID: 108668 Result: Up-regulated in Transcription
  misc_feature: MA Experiment 108668 PARAMETER Experiment Name: At_2mM_SA_cDNA_P Parameter: Plant Line Value: WS
  misc_feature: MA Experiment 108668 PARAMETER Experiment Name: At_2mM_SA_cDNA_P Parameter: Timepoint (hr) Value: 6
  misc_feature: MA Experiment 108668 PARAMETER Experiment Name: At_2mM_SA_cDNA_P Parameter: Treatment Value: 2mM SA vs. No Treatment
  misc_feature: MA Experiment ID: 20000069 Result: Down-regulated in Transcription
  misc_feature: MA Experiment 20000069 PARAMETER Experiment Name: At_100uM_ABA_Mutants_cDNA_P Parameter: Plant Line Value: CS23
  misc_feature: MA Experiment 20000069 PARAMETER Experiment Name: At_100uM_ABA_Mutants_cDNA_P Parameter: Timepoint (hr) Value: 6
  misc_feature: MA Experiment 20000069 PARAMETER Experiment Name: At_100uM_ABA_Mutants_cDNA_P Parameter: Tissue Value: Aerial
  misc_feature: MA Experiment 20000069 PARAMETER Experiment Name: At_100uM_ABA_Mutants_cDNA_P Parameter: Treatment Value: 100uM ABA vs. No Treatment
  misc_feature: MA Experiment ID: 20000070 Result: Down-regulated in Transcription
  misc_feature: MA Experiment 20000070 PARAMETER Experiment Name: At_100uM_ABA_Mutants_cDNA_P Parameter: Plant Line Value: CS24
  misc_feature: MA Experiment 20000070 PARAMETER Experiment Name: At_100uM_ABA_Mutants_cDNA_P Parameter: Timepoint (hr) Value: 6
  misc_feature: MA Experiment 20000070 PARAMETER Experiment Name: At_100uM_ABA_Mutants_cDNA_P Parameter: Tissue Value: Aerial
  misc_feature: MA Experiment 20000070 PARAMETER Experiment Name: At_100uM_ABA_Mutants_cDNA_P Parameter: Treatment Value: 100uM ABA vs. No Treatment
  misc_feature: MA Experiment ID: 20000071 Result: Down-regulated in Transcription
  misc_feature: MA Experiment 20000071 PARAMETER Experiment Name: At_100uM_ABA_Mutants_cDNA_P Parameter: Plant Line Value: CS8104
  misc_feature: MA Experiment 20000071 PARAMETER Experiment Name: At_100uM_ABA_Mutants_cDNA_P Parameter: Timepoint (hr) Value: 6
  misc_feature: MA Experiment 20000071 PARAMETER Experiment Name: At_100uM_ABA_Mutants_cDNA_P Parameter: Tissue Value: Aerial
  misc_feature: MA Experiment 20000071 PARAMETER Experiment Name: At_100uM_ABA_Mutants_cDNA_P Parameter: Treatment Value: 100uM ABA vs. No Treatment
  misc_feature: MA Experiment ID: 20000087 Result: Down-regulated in Transcription
  misc_feature: MA Experiment 20000087 PARAMETER Experiment Name: At_100uM_ABA_Mutants_cDNA_P Parameter: Plant Line Value: WS
  misc_feature: MA Experiment 20000087 PARAMETER Experiment Name: At_100uM_ABA_Mutants_cDNA_P Parameter: Timepoint (hr) Value: 6
  misc_feature: MA Experiment 20000087 PARAMETER Experiment Name: At_100uM_ABA_Mutants_cDNA_P Parameter: Tissue Value: Aerial
  misc_feature: MA Experiment 20000087 PARAMETER Experiment Name: At_100uM_ABA_Mutants_cDNA_P Parameter: Treatment Value: 100uM ABA vs. No Treatment
  misc_feature: MA Experiment ID: 20000089 Result: Down-regulated in Transcription
  misc_feature: MA Experiment ID: 20000117 Result: Down-regulated in Transcription
  misc_feature: MA Experiment 20000117 PARAMETER Experiment Name: At_100uM_ABA_Mutants_cDNA_P Parameter: Plant Line Value: Columbia
  misc_feature: MA Experiment 20000117 PARAMETER Experiment Name: At_100uM_ABA_Mutants_cDNA_P Parameter: Timepoint (hr) Value: 6
  misc_feature: MA Experiment 20000117 PARAMETER Experiment Name: At_100uM_ABA_Mutants_cDNA_P Parameter: Tissue Value: Aerial
  misc_feature: MA Experiment 20000117 PARAMETER Experiment Name: At_100uM_ABA_Mutants_cDNA_P Parameter: Treatment Value: 100uM ABA vs. No Treatment
atatgatatattctcaattttgttactcggaaacaatagaaaggataacgaatcgtttctcttcgatcgaaagaatatatatttggaagttttctctgcttttttgttttcgtttgatagaatgggaacagttctcgattcgcattttctggctctcactgctattgtcactgtgatttaccagttcatattcttcgtaatcacggctcttttcaaatttgatcaagtcactgactttgctggtagcacaaacttcgttatacttgctgtgttaacacttgttctcaaagcctcttggcattttcgacagatagtattgactttgctagttgtggtatggggtcttcgcttggggattttccttctaatgaggatcttgcaatggggggaagatcgtcgctttgatgaacagcgtggaaatatagtgagactaatcattttctggactcttcaggctgtgtgggtttggacggttagcttacctttaacacttgttaatgcaagtgatggtggtggatctcttaaacccgcagatgttatcggttggactatgtgggttttcggtttcttgattgaagctgcagctgatcaacagaagctatcattcaaaaactctcctgaaaacagaggaaaatggtgtgatgttggagtctggaagtattcaagacatccaaactacttcggtgagatgttactgtggtggggaatctttgtggctgcatcgcctgtgcttgaaggtgcagagtatcttgtcatattcggaccactctttctcactttgctacttctattcgtcagcggcataccattactcgaggcatcggctgacaaaaaacatggaaactcaggagcttacagatcctacaagaagacaacaagtcctctgattctgttcccaagaggagtgtatgggaacttaccaggatggttcaagacggtctttctcttcgagtttccattttacagccgaaatctccctcaagagttagggtagactccaaaacagcaaagagaaagaagtaaaagatgactgatttgtgatactcatatttgagttattgttcttcacaacactctttgataaaatttgtgtaaaaaattgcccgtaagaaactgaatttgtttgaaatattggacagtcttgacagattatctcagttgtatttggttc

SEQ ID NO: 83234 - protein, 330 aa, Arabidopsis thaliana
  peptide (1)..(330): Ceres Seq. ID no. 12669274
  misc_feature (41)..(330): Homolog of NCBI NO: 30698953 NR Description: expressed protein [Arabidopsis thaliana] At1g73650/F25P22_7 [Arabidopsis thaliana]
  misc_feature (41)..(329): Homolog of NCBI NO: 18410409 NR Description: expressed protein; protein id: At1g73650.1,
  misc_feature (41)..(329): Homolog of NCBI NO: 21537359 NR Description: unknown [Arabidopsis thaliana]
  misc_feature (41)..(328): Homolog of NCBI NO: 15221003 NR Description: hypothetical protein; protein id: At1g18180.1
  misc_feature (41)..(292): Homolog of NCBI NO: 25402844 NR Description: protein T10O22.15 [imported] - Arabidopsis >gi|8671769|gb|AAF78375.1|AC069551_8 T10O22.15 [Arabidopsis
  misc_feature (293)..(328): Homolog of NCBI NO: 25402844 NR Description: protein T10O22.15 [imported] - Arabidopsis >gi|8671769|gb|AAF78375.1|AC069551_8 T10O22.15 [Arabidopsis
  misc_feature (41)..(327): Homolog of NCBI NO: 13937298 NR Description: unknown protein [Oryza sativa]
  misc_feature (122)..(292): Homolog of NCBI NO: 9719732 NR Description: T10F20.18 [Arabidopsis thaliana]
  misc_feature (41)..(104): Homolog of NCBI NO: 9719732 NR Description: T10F20.18 [Arabidopsis thaliana]
  misc_feature (293)..(328): Homolog of NCBI NO: 9719732 NR Description: T10F20.18 [Arabidopsis thaliana]
YDIFSILLLGNNRKDNESFLFDRKNIYLEVFSAFLFSFDRMGTVLDSHFLALTAIVTVIYQFIFFVITALFKFDQVTDFAGSTNFVILAVLTLVLKASWHFRQIVLTLLVVVWGLRLGIFLLMRILQWGEDRRFDEQRGNIVRLIIFWTLQAVWVWTVSLPLTLVNASDGGGSLKPADVIGWTMWVFGFLIEAAADQQKLSFKNSPENRGKWCDVGVWKYSRHPNYFGEMLLWWGIFVAASPVLEGAEYLVIFGPLFLTLLLLFVSGIPLLEASADKKHGNSGAYRSYKKTTSPLILFPRGVYGNLPGWFKTVFLFEFPFYSRNLPQELG

SEQ ID NO: 83235 - protein, 290 aa, Arabidopsis thaliana
  peptide (1)..(290): Ceres Seq. ID no. 12669275
  misc_feature (1)..(290): Homolog of NCBI NO: 30698953 NR Description: expressed protein [Arabidopsis thaliana] At1g73650/F25P22_7 [Arabidopsis thaliana]
  misc_feature (1)..(289): Homolog of NCBI NO: 18410409 NR Description: expressed protein; protein id: At1g73650.1,
  misc_feature (1)..(289): Homolog of NCBI NO: 21537359 NR Description: unknown [Arabidopsis thaliana]
  misc_feature (1)..(288): Homolog of NCBI NO: 15221003 NR Description: hypothetical protein; protein id: At1g18180.1
  misc_feature (1)..(252): Homolog of NCBI NO: 25402844 NR Description: protein T10O22.15 [imported] - Arabidopsis >gi|8671769|gb|AAF78375.1|AC069551_8 T10O22.15 [Arabidopsis
  misc_feature (253)..(288): Homolog of NCBI NO: 25402844 NR Description: protein T10O22.15 [imported] - Arabidopsis >gi|8671769|gb|AAF78375.1|AC069551_8 T10O22.15 [Arabidopsis
  misc_feature (1)..(287): Homolog of NCBI NO: 13937298 NR Description: unknown protein [Oryza sativa]
  misc_feature (82)..(252): Homolog of NCBI NO: 9719732 NR Description: T10F20.18 [Arabidopsis thaliana]
  misc_feature (1)..(64): Homolog of NCBI NO: 9719732 NR Description: T10F20.18 [Arabidopsis thaliana]
  misc_feature (253)..(288): Homolog of NCBI NO: 9719732 NR Description: T10F20.18 [Arabidopsis thaliana]
MGTVLDSHFLALTAIVTVIYQFIFFVITALFKFDQVTDFAGSTNFVILAVLTLVLKASWHFRQIVLTLLVVVWGLRLGIFLLMRILQWGEDRRFDEQRGNIVRLIIFWTLQAVWVWTVSLPLTLVNASDGGGSLKPADVIGWTMWVFGFLIEAAADQQKLSFKNSPENRGKWCDVGVWKYSRHPNYFGEMLLWWGIFVAASPVLEGAEYLVIFGPLFLTLLLLFVSGIPLLEASADKKHGNSGAYRSYKKTTSPLILFPRGVYGNLPGWFKTVFLFEFPFYSRNLPQELG

SEQ ID NO: 83236 - protein, 208 aa, Arabidopsis thaliana; identical to SEQ ID NO: 37102
  peptide (1)..(208): Ceres Seq. ID no. 12669276
  misc_feature (1)..(208): Homolog of NCBI NO: 30698953 NR Description: expressed protein [Arabidopsis thaliana] At1g73650/F25P22_7 [Arabidopsis thaliana]
  misc_feature (1)..(207): Homolog of NCBI NO: 18410409 NR Description: expressed protein; protein id: At1g73650.1,
  misc_feature (1)..(207): Homolog of NCBI NO: 21537359 NR Description: unknown [Arabidopsis thaliana]
  misc_feature (1)..(206): Homolog of NCBI NO: 15221003 NR Description: hypothetical protein; protein id: At1g18180.1
  misc_feature (1)..(170): Homolog of NCBI NO: 25402844 NR Description: protein T10O22.15 [imported] - Arabidopsis >gi|8671769|gb|AAF78375.1|AC069551_8 T10O22.15 [Arabidopsis
  misc_feature (171)..(206): Homolog of NCBI NO: 25402844 NR Description: protein T10O22.15 [imported] - Arabidopsis >gi|8671769|gb|AAF78375.1|AC069551_8 T10O22.15 [Arabidopsis
  misc_feature (1)..(205): Homolog of NCBI NO: 13937298 NR Description: unknown protein [Oryza sativa]
  misc_feature (1)..(170): Homolog of NCBI NO: 9719732 NR Description: T10F20.18 [Arabidopsis thaliana]
  misc_feature (171)..(206): Homolog of NCBI NO: 9719732 NR Description: T10F20.18 [Arabidopsis thaliana]
  misc_feature (1)..(150): Homolog of NCBI NO: 25406281 NR Description: unknown protein F25P22.7 [imported] - Arabidopsis

SEQ ID NO: 83237 - DNA, 1129 bp, Arabidopsis thaliana
  misc_feature (1)..(1129): Ceres Seq. ID no. 12669345
  misc_feature: MA Experiment ID: 108435 Result: Down-regulated in Transcription
  misc_feature: MA Experiment 108435 PARAMETER Experiment Name: At_stm_Mutants_cDNA_P Parameter: Plant Line Value: wt Landsburg vs stm
  misc_feature: MA Experiment 108435 PARAMETER Experiment Name: At_stm_Mutants_cDNA_P Parameter: Tissue Value: Shoot Apical Meristem Region
  misc_feature: MA Experiment ID: 108462 Result: Up-regulated in Transcription
  misc_feature: MA Experiment 108462 PARAMETER Experiment Name: At_Germinating_Seeds_cDNA_P Parameter: Age (day) Value: 2 vs. 0
  misc_feature: MA Experiment 108462 PARAMETER Experiment Name: At_Germinating_Seeds_cDNA_P Parameter: Tissue Value: Germinating Seeds
  misc_feature: MA Experiment ID: 108501 Result: Down-regulated in Transcription
  misc_feature: MA Experiment 108501 PARAMETER Experiment Name: At_ap2_floral_buds_cDNA_P Parameter: Plant Line Value: ap2 (Ler.)
  misc_feature: MA Experiment 108501 PARAMETER Experiment Name: At_ap2_floral_buds_cDNA_P Parameter: Tissue Value: Closed Flower
  misc_feature: MA Experiment ID: 108668 Result: Down-regulated in Transcription
  misc_feature: MA Experiment 108668 PARAMETER Experiment Name: At_2mM_SA_cDNA_P Parameter: Plant Line Value: WS
  misc_feature: MA Experiment 108668 PARAMETER Experiment Name: At_2mM_SA_cDNA_P Parameter: Timepoint (hr) Value: 6
  misc_feature: MA Experiment 108668 PARAMETER Experiment Name: At_2mM_SA_cDNA_P Parameter: Treatment Value: 2mM SA vs. No Treatment
  misc_feature: MA Experiment ID: 20000113 Result: Down-regulated in Transcription
  misc_feature: MA Experiment 20000113 PARAMETER Experiment Name: At_42deg_Heat_cDNA_P Parameter: Temperature (deg C) Value: 42 vs. 22
  misc_feature: MA Experiment 20000113 PARAMETER Experiment Name: At_42deg_Heat_cDNA_P Parameter: Timepoint (hr) Value: 8
  misc_feature: MA Experiment 20000113 PARAMETER Experiment Name: At_42deg_Heat_cDNA_P Parameter: Tissue Value: Aerial
  misc_feature: MA Experiment ID: 20000182 Result: Down-regulated in Transcription
  misc_feature: MA Experiment 20000182 PARAMETER Experiment Name: At_2mM_SA_P Parameter: Age (day) Value: 14
  misc_feature: MA Experiment 20000182 PARAMETER Experiment Name: At_2mM_SA_P Parameter: Organism Value: A. thaliana
  misc_feature: MA Experiment 20000182 PARAMETER Experiment Name: At_2mM_SA_P Parameter: Plant Line Value: WS
  misc_feature: MA Experiment 20000182 PARAMETER Experiment Name: At_2mM_SA_P Parameter: Timepoint (hr) Value: 6
  misc_feature: MA Experiment 20000182 PARAMETER Experiment Name: At_2mM_SA_P Parameter: Tissue Value: Aerial
  misc_feature: MA Experiment 20000182 PARAMETER Experiment Name: At_2mM_SA_P Parameter: Treatment Value: 2mM SA vs. No Treatment
  misc_feature: MA Experiment ID: 20000265 Result: Up-regulated in Transcription
  misc_feature: MA Experiment 20000265 PARAMETER Experiment Name: At_Open_Flower_P Parameter: Age (day) Value: 21
  misc_feature: MA Experiment 20000265 PARAMETER Experiment Name: At_Open_Flower_P Parameter: Plant Line Value: WS
  misc_feature: MA Experiment 20000265 PARAMETER Experiment Name: At_Open_Flower_P Parameter: Tissue Value: Closed Flower vs. Whole Plant
  misc_feature: MA Experiment ID: 20001911 Result: Down-regulated in Transcription
  misc_feature: MA Experiment 20001911 PARAMETER Experiment Name: At_Drought_Reproduction_P Parameter: Age (day) Value: 40
  misc_feature: MA Experiment 20001911 PARAMETER Experiment Name: At_Drought_Reproduction_P Parameter: Organism Value: A. thaliana
  misc_feature: MA Experiment 20001911 PARAMETER Experiment Name: At_Drought_Reproduction_P Parameter: Plant Line Value: WS
  misc_feature: MA Experiment 20001911 PARAMETER Experiment Name: At_Drought_Reproduction_P Parameter: Timepoint (day) Value: 10
  misc_feature: MA Experiment 20001911 PARAMETER Experiment Name: At_Drought_Reproduction_P Parameter: Tissue Value: Flowers
  misc_feature: MA Experiment 20001911 PARAMETER Experiment Name: At_Drought_Reproduction_P Parameter: Treatment Value: Drought vs. No Drought
aaatcacaatctcaatatcacattcgttgcagagacaaagatgtctgagtatttggtaactggaggaacaggtttcattgcttcttacatcatcaaatcacttctcgaactcggacacaccgttcgaacaactgtccgaaacccacgtgatgaagaaaaggttggatttttatgggaatttcaaggagcaaaacagaggctaaagattctccaagctgatctaacggtagaaggaagttttgatgaagcagtgaatggtgttgatggagtattccacactgcttctcctgttcttgttccacaggatcataacattcaggagactttggttgatcctattataaagggtacaacaaatgtgatgagctcttgtgccaagtctaaagccacattgaaaaggattgttcttacgtcttcttgctcttcgatacgctaccgtttcgatgcaactgaagcttctcctctcaatgagtctcattggagtgatcctgaatattgcaaacgtttcaatctttggtatggatatgcaaagactttaggagaaagagaggcttggaggatagctgaagagaaaggattagacttggttgttgtgaatccttcgtttgtggttggtccattgcttggaccaaaaccaacaagtactctgcttatgattcttgctattgctaaaggtcttgctggagagtatccaaatttcactgtcgggtttgtgcatatagatgatgttgttgctgcacatgtattggctatggaagagcctaaagcatcagggagaatcatatgttcgagttctgttgctcattggtctgagatcattgagttgatgagaaataagtatcctaattacccatttgagaacaagtgtagtaacaaagaaggagacaatagtccacatagtatggatacaaggaagatacatgagttgggatttggatccttcaagtcactacctgagatgtttgatgattgcatcatcagttttcagaagaagggtctgctctaaatatatacattttcatacatcgaattgtcgattaatggatcgatttcaatgtattggactcttgccaagtagtaactggtttttaatttctgcctctagtataaattcaataagctggtgttg

SEQ ID NO: 83238 - protein, 334 aa, Arabidopsis thaliana; identical to SEQ ID NO: 41200
  peptide (1)..(334): Ceres Seq. ID no. 12669346
  misc_feature (18)..(280): Pfam Name: NAD dependent epimerase/dehydratase family Pfam Description: NAD dependent epimerase/dehydratase family
  misc_feature (14)..(334): Homolog of NCBI NO: 15221433 NR Description: putative reductase; protein id: At1g68540.1
  misc_feature (14)..(334): Homolog of NCBI NO: 15222595 NR Description: dihydroflavonol 4-reductase, putative; protein At1g25460.1 [Arabidopsis thaliana] >gi|25403022|pir||G86384
  misc_feature (14)..(334): Homolog of NCBI NO: 34895494 NR Description: putative reductase [Oryza sativa (japonica >gi|11275525|dbj|BAB18290.1| putative reductase [Oryza sativa
  misc_feature (19)..(334): Homolog of NCBI NO: 30690351 NR Description: dihydroflavonol 4-reductase (dihydrokaempferol
  misc_feature (19)..(334): Homolog of NCBI NO: 14030554 NR Description: dihydro-flavanoid reductase-like protein [Zea
  misc_feature (19)..(334): Homolog of NCBI NO: 4581047 NR Description: putative dihydroflavonol reductase [Oryza sativa]
  misc_feature (12)..(334): Homolog of NCBI NO: 34905082 NR Description: putative dihydroflavonol 4-reductase [Oryza
  misc_feature (19)..(334): Homolog of NCBI NO: 25140434 NR Description: cinnamoyl CoA reductase [Solanum tuberosum]
  misc_feature (3)..(334): Homolog of NCBI NO: 25405464 NR Description: hypothetical protein F5D21.12 [imported] - thaliana >gi|12325359|gb|AAG52618.1|AC024261_5 cinnamyl alcohol
  misc_feature (19)..(334): Homolog of NCBI NO: 2960364 NR Description: cinnamoyl CoA reductase [Populus balsamifera

SEQ ID NO: 83239 - protein, 321 aa, Arabidopsis thaliana; identical to SEQ ID NO: 41201
  peptide (1)..(321): Ceres Seq. ID no. 12669347
  misc_feature (5)..(267): Pfam Name: NAD dependent epimerase/dehydratase family Pfam Description: NAD dependent epimerase/dehydratase family
  misc_feature (1)..(321): Homolog of NCBI NO: 15221433 NR Description: putative reductase; protein id: At1g68540.1
  misc_feature (1)..(321): Homolog of NCBI NO: 15222595 NR Description: dihydroflavonol 4-reductase, putative; protein At1g25460.1 [Arabidopsis thaliana] >gi|25403022|pir||G86384
  misc_feature (1)..(321): Homolog of NCBI NO: 34895494 NR Description: putative reductase [Oryza sativa (japonica >gi|11275525|dbj|BAB18290.1| putative reductase [Oryza sativa
  misc_feature (6)..(321): Homolog of NCBI NO: 30690351 NR Description: dihydroflavonol 4-reductase (dihydrokaempferol
  misc_feature (6)..(321): Homolog of NCBI NO: 14030554 NR Description: dihydro-flavanoid reductase-like protein [Zea
  misc_feature (6)..(321): Homolog of NCBI NO: 4581047 NR Description: putative dihydroflavonol reductase [Oryza sativa]
  misc_feature (1)..(321): Homolog of NCBI NO: 34905082 NR Description: putative dihydroflavonol 4-reductase [Oryza
  misc_feature (6)..(321): Homolog of NCBI NO: 25140434 NR Description: cinnamoyl CoA reductase [Solanum tuberosum]
  misc_feature (1)..(321): Homolog of NCBI NO: 25405464 NR Description: hypothetical protein F5D21.12 [imported] - thaliana >gi|12325359|gb|AAG52618.1|AC024261_5 cinnamyl alcohol
  misc_feature (6)..(321): Homolog of NCBI NO: 2960364 NR Description: cinnamoyl CoA reductase [Populus balsamifera

SEQ ID NO: 83240 - protein, 214 aa, Arabidopsis thaliana; identical to SEQ ID NO: 41202
  peptide (1)..(214): Ceres Seq. ID no. 12669348
  misc_feature (1)..(160): Pfam Name: NAD dependent epimerase/dehydratase family Pfam Description: NAD dependent epimerase/dehydratase family
  misc_feature (1)..(214): Homolog of NCBI NO: 15221433 NR Description: putative reductase; protein id: At1g68540.1
  misc_feature (1)..(214): Homolog of NCBI NO: 15222595 NR Description: dihydroflavonol 4-reductase, putative; protein At1g25460.1 [Arabidopsis thaliana] >gi|25403022|pir||G86384
  misc_feature (1)..(214): Homolog of NCBI NO: 34895494 NR Description: putative reductase [Oryza sativa (japonica >gi|11275525|dbj|BAB18290.1| putative reductase [Oryza sativa
  misc_feature (1)..(214): Homolog of NCBI NO: 30690351 NR Description: dihydroflavonol 4-reductase (dihydrokaempferol
  misc_feature (1)..(214): Homolog of NCBI NO: 14030554 NR Description: dihydro-flavanoid reductase-like protein [Zea
  misc_feature (1)..(214): Homolog of NCBI NO: 4581047 NR Description: putative dihydroflavonol reductase [Oryza sativa]
  misc_feature (1)..(214): Homolog of NCBI NO: 34905082 NR Description: putative dihydroflavonol 4-reductase [Oryza
  misc_feature (1)..(214): Homolog of NCBI NO: 25140434 NR Description: cinnamoyl CoA reductase [Solanum tuberosum]
  misc_feature (1)..(214): Homolog of NCBI NO: 25405464 NR Description: hypothetical protein F5D21.12 [imported] - thaliana >gi|12325359|gb|AAG52618.1|AC024261_5 cinnamyl alcohol
  misc_feature (1)..(214): Homolog of NCBI NO: 2960364 NR Description: cinnamoyl CoA reductase [Populus balsamifera

SEQ ID NO: 83241 - DNA, 1005 bp, Arabidopsis thaliana
  misc_feature (1)..(1005): Ceres Seq. ID no. 12669387
  misc_feature: MA Experiment ID: 20000306 Result: Up-regulated in Transcription
  misc_feature: MA Experiment 20000306 PARAMETER Experiment Name: At_Germinating_Seeds_Sub_P Parameter: Age (hr) Value: 6 vs. 0
  misc_feature: MA Experiment 20000306 PARAMETER Experiment Name: At_Germinating_Seeds_Sub_P Parameter: Organism Value: A. thaliana
  misc_feature: MA Experiment 20000306 PARAMETER Experiment Name: At_Germinating_Seeds_Sub_P Parameter: Plant Line Value: WS
  misc_feature: MA Experiment 20000306 PARAMETER Experiment Name: At_Germinating_Seeds_Sub_P Parameter: Tissue Value: Germinating Seeds
  misc_feature: MA Experiment ID: 20000307 Result: Up-regulated in Transcription
  misc_feature: MA Experiment 20000307 PARAMETER Experiment Name: At_Germinating_Seeds_Sub_P Parameter: Age (hr) Value: 24 vs. 0
  misc_feature: MA Experiment 20000307 PARAMETER Experiment Name: At_Germinating_Seeds_Sub_P Parameter: Organism Value: A. thaliana
  misc_feature: MA Experiment 20000307 PARAMETER Experiment Name: At_Germinating_Seeds_Sub_P Parameter: Plant Line Value: WS
  misc_feature: MA Experiment 20000307 PARAMETER Experiment Name: At_Germinating_Seeds_Sub_P Parameter: Tissue Value: Germinating Seeds
  misc_feature: MA Experiment ID: 20000355 Result: Up-regulated in Transcription
  misc_feature: MA Experiment 20000355 PARAMETER Experiment Name: At_Siliques_Sub_P Parameter: Age (day) Value: 21
  misc_feature: MA Experiment 20000355 PARAMETER Experiment Name: At_Siliques_Sub_P Parameter: Organism Value: A. thaliana
  misc_feature: MA Experiment 20000355 PARAMETER Experiment Name: At_Siliques_Sub_P Parameter: Plant Line Value: WS
  misc_feature: MA Experiment 20000355 PARAMETER Experiment Name: At_Siliques_Sub_P Parameter: Tissue Value: Less Than 5mm Siliques vs. Whole Plant
atggtgtctgtacgatctgtgttcgtggctctaaccattctttccatggatctaaggatctctcaagccagacctcatgtcactttgaacgagcaatcaattgttgattaccaccaacaatggatgactcaattctctcgagtttacaaggatgaatccgagaaagaaatgaggcttaaagtgttcaagaaaaacttgaaattcattgagaacttcaataatatggggaaccaaagctatacacttggtgtcaacgagttcacggattggaaaacagaagagttccttgcgacccacaccggcctccgcgttaacgtaacttcactatccgaactatttaataaaacgaagccatcaaggaattggaacatgagtgatatcgacatggaagacgaaagcaaagactggagagacgaaggagctgtaacacctgttaaatatcaaggagcatgtcgtttgacaaagatatctggcaaaaatctattaacactgtccgaacaacagctaatagattgcgacatagagaaaaacggtggttgcaatggcggagaatttgaagaagctttcaagtacataataaaaaacggaggcgtttctttagaaacggaatacccttaccaagtgaaaaaggagagttgtcgtgccaacgccagacgcgccccacatacacagattagagggtttcaaatggttccaagccacaacgagcgtgcgttgctcgaggccgtaagaagacagcccgtctcggtgttgattgacgcaagagcggacagtttcggtcattacaaagggggagtgtacgctgggctggactgtgggacagacgtgaatcatgcagtgacgatcgttgggtacggaacgatgagtgggctcaactactgggttcttaagaactcttggggtgagagttggggagaaaatggttacatgaggatccgtagagatgtggagtggcctcaaggaatgtgtggtatagctcaggttgctgcttatccggttttttaa

SEQ ID NO: 83242 - protein, 334 aa, Arabidopsis thaliana
  peptide (1)..(334): Ceres Seq. ID no. 12669388
  misc_feature (135)..(333): Pfam Name: Papain family cysteine protease Pfam Description: Papain family cysteine protease
  misc_feature (1)..(334): Homolog of NCBI NO: 18396952 NR Description: cysteine proteinase; protein id: At1g29110.1
  misc_feature (135)..(334): Homolog of NCBI NO: 25289992 NR Description: probable cysteine proteinase [imported] - thaliana >gi|9502426|gb|AAF88125.1|AC021043_18 Putative cysteine
  misc_feature (1)..(151): Homolog of NCBI NO: 25289992 NR Description: probable cysteine proteinase [imported] - thaliana >gi|9502426|gb|AAF88125.1|AC021043_18 Putative cysteine
  misc_feature (4)..(333): Homolog of NCBI NO: 18396939 NR Description: cysteine protease; protein id: At1g29080.1
  misc_feature (1)..(333): Homolog of NCBI NO: 30690594 NR Description: cysteine proteinase [Arabidopsis thaliana]
  misc_feature (16)..(333): Homolog of NCBI NO: 25289991 NR Description: cysteine proteinase (EC 3.4.22.-) [similarity] - thaliana >gi|9502421|gb|AAF88120.1|AC021043_13 Putative cysteine
  misc_feature (1)..(333): Homolog of NCBI NO: 18403438 NR Description: cysteine proteinase; protein id: At2g34080.1
  misc_feature (1)..(333): Homolog of NCBI NO: 18408828 NR Description: cysteine protease; protein id: At3g49340.1
  misc_feature (28)..(332): Homolog of NCBI NO: 37780051 NR Description: cysteine protease 12 [Trifolium repens]
  misc_feature (28)..(332): Homolog of NCBI NO: 37780045 NR Description: cysteine protease 5 [Trifolium repens]
MVSVRSVFVALTILSMDLRISQARPHVTLNEQSIVDYHQQWMTQFSRVYKDESEKEMRLKVFKKNLKFIENFNNMGNQSYTLGVNEFTDWKTEEFLATHTGLRVNVTSLSELFNKTKPSRNWNMSDIDMEDESKDWRDEGAVTPVKYQGACRLTKISGKNLLTLSEQQLIDCDIEKNGGCNGGEFEEAFKYIIKNGGVSLETEYPYQVKKESCRANARRAPHTQIRGFQMVPSHNERALLEAVRRQPVSVLIDARADSFGHYKGGVYAGLDCGTDVNHAVTIVGYGTMSGLNYWVLKNSWGESWGENGYMRIRRDVEWPQGMCGIAQVAAYPVF

SEQ ID NO: 83243 - protein, 319 aa, Arabidopsis thaliana
  peptide (1)..(319): Ceres Seq. ID no. 12669389
  misc_feature (120)..(318): Pfam Name: Papain family cysteine protease Pfam Description: Papain family cysteine protease
  misc_feature (1)..(319): Homolog of NCBI NO: 18396952 NR Description: cysteine proteinase; protein id: At1g29110.1
  misc_feature (120)..(319): Homolog of NCBI NO: 25289992 NR Description: probable cysteine proteinase [imported] - thaliana >gi|9502426|gb|AAF88125.1|AC021043_18 Putative cysteine
  misc_feature (1)..(136): Homolog of NCBI NO: 25289992 NR Description: probable cysteine proteinase [imported] - thaliana >gi|9502426|gb|AAF88125.1|AC021043_18 Putative cysteine
  misc_feature (1)..(318): Homolog of NCBI NO: 18396939 NR Description: cysteine protease; protein id: At1g29080.1
  misc_feature (1)..(318): Homolog of NCBI NO: 30690594 NR Description: cysteine proteinase [Arabidopsis thaliana]
  misc_feature (1)..(318): Homolog of NCBI NO: 25289991 NR Description: cysteine proteinase (EC 3.4.22.-) [similarity] - thaliana >gi|9502421|gb|AAF88120.1|AC021043_13 Putative cysteine
  misc_feature (1)..(318): Homolog of NCBI NO: 18403438 NR Description: cysteine proteinase; protein id: At2g34080.1
  misc_feature (1)..(318): Homolog of NCBI NO: 18408828 NR Description: cysteine protease; protein id: At3g49340.1
  misc_feature (13)..(317): Homolog of NCBI NO: 37780051 NR Description: cysteine protease 12 [Trifolium repens]
  misc_feature (13)..(317): Homolog of NCBI NO: 37780045 NR Description: cysteine protease 5 [Trifolium repens]
MDLRISQARPHVTLNEQSIVDYHQQWMTQFSRVYKDESEKEMRLKVFKKNLKFIENFNNMGNQSYTLGVNEFTDWKTEEFLATHTGLRVNVTSLSELFNKTKPSRNWNMSDIDMEDESKDWRDEGAVTPVKYQGACRLTKISGKNLLTLSEQQLIDCDIEKNGGCNGGEFEEAFKYIIKNGGVSLETEYPYQVKKESCRANARRAPHTQIRGFQMVPSHNERALLEAVRRQPVSVLIDARADSFGHYKGGVYAGLDCGTDVNHAVTIVGYGTMSGLNYWVLKNSWGESWGENGYMRIRRDVEWPQGMCGIAQVAAYPVF

SEQ ID NO: 83244 - protein, 293 aa, Arabidopsis thaliana
  peptide (1)..(293): Ceres Seq. ID no. 12669390
  misc_feature (94)..(292): Pfam Name: Papain family cysteine protease Pfam Description: Papain family cysteine protease
  misc_feature (1)..(293): Homolog of NCBI NO: 18396952 NR Description: cysteine proteinase; protein id: At1g29110.1
  misc_feature (94)..(293): Homolog of NCBI NO: 25289992 NR Description: probable cysteine proteinase [imported] - thaliana >gi|9502426|gb|AAF88125.1|AC021043_18 Putative cysteine
  misc_feature (1)..(110): Homolog of NCBI NO: 25289992 NR Description: probable cysteine proteinase [imported] - thaliana >gi|9502426|gb|AAF88125.1|AC021043_18 Putative cysteine
  misc_feature (1)..(292): Homolog of NCBI NO: 18396939 NR Description: cysteine protease; protein id: At1g29080.1
  misc_feature (1)..(292): Homolog of NCBI NO: 30690594 NR Description: cysteine proteinase [Arabidopsis thaliana]
  misc_feature (1)..(292): Homolog of NCBI NO: 25289991 NR Description: cysteine proteinase (EC 3.4.22.-) [similarity] - thaliana >gi|9502421|gb|AAF88120.1|AC021043_13 Putative cysteine
  misc_feature (1)..(292): Homolog of NCBI NO: 18403438 NR Description: cysteine proteinase; protein id: At2g34080.1
  misc_feature (1)..(292): Homolog of NCBI NO: 18408828 NR Description: cysteine protease; protein id: At3g49340.1
  misc_feature (1)..(291): Homolog of NCBI NO: 37780051 NR Description: cysteine protease 12 [Trifolium repens]
  misc_feature (1)..(291): Homolog of NCBI NO: 37780045 NR Description: cysteine protease 5 [Trifolium repens]
MTQFSRVYKDESEKEMRLKVFKKNLKFIENFNNMGNQSYTLGVNEFTDWKTEEFLATHTGLRVNVTSLSELFNKTKPSRNWNMSDIDMEDESKDWRDEGAVTPVKYQGACRLTKISGKNLLTLSEQQLIDCDIEKNGGCNGGEFEEAFKYIIKNGGVSLETEYPYQVKKESCRANARRAPHTQIRGFQMVPSHNERALLEAVRRQPVSVLIDARADSFGHYKGGVYAGLDCGTDVNHAVTIVGYGTMSGLNYWVLKNSWGESWGENGYMRIRRDVEWPQGMCGIAQVAAYPVF

SEQ ID NO: 83245 - DNA, 1563 bp, Arabidopsis thaliana
  misc_feature (1)..(1563): Ceres Seq. ID no. 12669396
  misc_feature: MA Experiment ID: 20000347 Result: Up-regulated in Transcription
  misc_feature: MA Experiment 20000347 PARAMETER Experiment Name: At_2mM_SA_Sub_P Parameter: Age (day) Value: 14
  misc_feature: MA Experiment 20000347 PARAMETER Experiment Name: At_2mM_SA_Sub_P Parameter: Organism Value: A. thaliana
  misc_feature: MA Experiment 20000347 PARAMETER Experiment Name: At_2mM_SA_Sub_P Parameter: Plant Line Value: WS
  misc_feature: MA Experiment 20000347 PARAMETER Experiment Name: At_2mM_SA_Sub_P Parameter: Timepoint (hr) Value: 6
  misc_feature: MA Experiment 20000347 PARAMETER Experiment Name: At_2mM_SA_Sub_P Parameter: Tissue Value: Aerial
  misc_feature: MA Experiment 20000347 PARAMETER Experiment Name: At_2mM_SA_Sub_P Parameter: Treatment Value: 2mM SA vs. No Treatment
  misc_feature: MA Experiment ID: 20000440 Result: Up-regulated in Transcription
  misc_feature: MA Experiment 20000440 PARAMETER Experiment Name: At_Closed-Flower__Sub_P Parameter: Tissue Value: Closed Flower vs. Whole Plant
  misc_feature: MA Experiment ID: 20001807 Result: Down-regulated in Transcription
  misc_feature: MA Experiment 20001807 PARAMETER Experiment Name: At_50mM_NH4NO3_L-to-H_Sub_P Parameter: Timepoint (hr) Value: 6
  misc_feature: MA Experiment 20001807 PARAMETER Experiment Name: At_50mM_NH4NO3_L-to-H_Sub_P Parameter: Tissue Value: Leaf
  misc_feature: MA Experiment 20001807 PARAMETER Experiment Name: At_50mM_NH4NO3_L-to-H_Sub_P Parameter: Treatment Value: 50mM NH4NO3 vs 100mM Mannitol
atggctcaagccttggctcaaccaccactggtggtcaccaccgtcgtcccagacccgccgccgccgccaccaccaccgcacccaaagccgtatgctctacgatacatggcggatcttcttggccggattggtataatggatacagacaaagatggtaacatcagcccacagagtccgaggagtcctaggagcccaagaaacaacattctcatggggaagtacgagcttgggaagcttctcggccacggaacctttgcaaaggtttatttagctcaaaacatcaaatctggagataaagtcgccattaaagtcatcgacaaggagaagattatgaagagtggtttggttgctcacatcaaacgggaaatctctatcctccgccgtgtccgtcacccttacatcgttcatctattcgaggttatggcgacgaagtccaagatttactttgtgatggagtacgttggaggcggcgagttgttcaacacggttgctaaaggtcgattgcccgaggaaactgctcggagatatttccagcagctgatctcctctgtttcgttctgccatggccgcggtgtttaccaccgtgaccttaaaccagagaatctgcttttagacaacaaagggaaccttaaagtatctgactttggtctcagcgcggtggcagagcagcttcgtcaagacgggctctgccacacgttttgcgggactccagcgtatattgcacccgaggttttgactagaaaagggtacgatgcagcgaaagccgatgtttggtcatgtggagtgatcttattcgtgttgatggctggtcacattccgttctacgacaagaacataatggttatgtacaagaagatttacaaaggggaatttaggtgtcctcgttggttttcatcggatcttgttcggttattgactcggcttcttgatacgaatccggatactcggattacaatacccgagatcatgaagaacagatggttcaagaaaggattcaaacatgttaaattctacatcgaagatgataaactgtgtagggaagatgaagatgaggaggaagaggcatcatcatcaggccgctcttcgacagtttcagagagcgatgcagagttcgatgtaaaacggatgggaataggttcaatgccaagaccctcgagcttaaacgcgtttgacattatatctttctcttcagggtttgatctgtctggtttgtttgaggaagaaggaggagaagggacgaggtttgtgtcaggtgctcctgtttcaaagatcatatcgaagctggaagagattgcgaaaatcgtgagctttactgtgaggaagaaagaatggagtttgagattagaaggttgtagagaaggagcaaaaggaccgttgacaattgcggctgagatatttgagctgactccatctctagtggtggtggaggtgaagaagaaaggaggagacagagaagagtatgaagagttttgcaacaaggaactcagaccagagctggagaaactaatccatgaagaagttgtagtagaagaagcattgtatttgccatctgatactgaatag

SEQ ID NO: 83246 - protein, 520 aa, Arabidopsis thaliana
  peptide (1)..(520): Ceres Seq. ID no. 12669397
  misc_feature (74)..(328): Pfam Name: Protein kinase domain Pfam Description: Protein kinase domain
  misc_feature (1)..(520): Homolog of NCBI NO: 15218854 NR Description: protein kinase PK4, putative; protein id: supported by cDNA: gi_14334387 [Arabidopsis thaliana]
  misc_feature (28)..(520): Homolog of NCBI NO: 15226241 NR Description: putative protein kinase; protein id: At2g34180.1, by cDNA: gi_13249124 [Arabidopsis thaliana]
  misc_feature (59)..(510): Homolog of NCBI NO: 15233981 NR Description: putative protein kinase; protein id: At4g18700.1, by cDNA: gi_13249122, supported by cDNA: gi_13448040, supported cDNA: gi_16648898 [Arabidopsis thaliana] >gi|7446437|pir||T04862
  misc_feature (60)..(520): Homolog of NCBI NO: 15242507 NR Description: serine threonine protein kinase; protein id: supported by cDNA: gi_14009295 [Arabidopsis thaliana]
  misc_feature (55)..(348): Homolog of NCBI NO: 27549573 NR Description: calcineurin B-like-interacting protein kinase
  misc_feature (341)..(519): Homolog of NCBI NO: 27549573 NR Description: calcineurin B-like-interacting protein kinase
  misc_feature (70)..(352): Homolog of NCBI NO: 6651177 NR Description: protein kinase PK4 [Zea mays]
  misc_feature (350)..(507): Homolog of NCBI NO: 6651177 NR Description: protein kinase PK4 [Zea mays]
  misc_feature (65)..(344): Homolog of NCBI NO: 5821067 NR Description: OsPK4 [Oryza sativa]
  misc_feature (346)..(520): Homolog of NCBI NO: 5821067 NR Description: OsPK4 [Oryza sativa]
MAQALAQPPLVVTTVVPDPPPPPPPPHPKPYALRYMADLLGRIGIMDTDKDGNISPQSPRSPRSPRNNILMGKYELGKLLGHGTFAKVYLAQNIKSGDKVAIKVIDKEKIMKSGLVAHIKREISILRRVRHPYIVHLFEVMATKSKIYFVMEYVGGGELFNTVAKGRLPEETARRYFQQLISSVSFCHGRGVYHRDLKPENLLLDNKGNLKVSDFGLSAVAEQLRQDGLCHTFCGTPAYIAPEVLTRKGYDAAKADVWSCGVILFVLMAGHIPFYDKNIMVMYKKIYKGEFRCPRWFSSDLVRLLTRLLDTNPDTRITIPEIMKNRWFKKGFKHVKFYIEDDKLCREDEDEEEEASSSGRSSTVSESDAEFDVKRMGIGSMPRPSSLNAFDIISFSSGFDLSGLFEEEGGEGTRFVSGAPVSKIISKLEEIAKIVSFTVRKKEWSLRLEGCREGAKGPLTIAAEIFELTPSLVVVEVKKKGGDREEYEEFCNKELRPELEKLIHEEVVVEEALYLPSDTE

SEQ ID NO: 83247 - protein, 485 aa, Arabidopsis thaliana
  peptide (1)..(485): Ceres Seq. ID no. 12669398
  misc_feature (39)..(293): Pfam Name: Protein kinase domain Pfam Description: Protein kinase domain
  misc_feature (1)..(485): Homolog of NCBI NO: 15218854 NR Description: protein kinase PK4, putative; protein id: supported by cDNA: gi_14334387 [Arabidopsis thaliana]
  misc_feature (1)..(485): Homolog of NCBI NO: 15226241 NR Description: putative protein kinase; protein id: At2g34180.1, by cDNA: gi_13249124 [Arabidopsis thaliana]
  misc_feature (24)..(475): Homolog of NCBI NO: 15233981 NR Description: putative protein kinase; protein id: At4g18700.1, by cDNA: gi_13249122, supported by cDNA: gi_13448040, supported cDNA: gi_16648898 [Arabidopsis thaliana] >gi|7446437|pir||T04862
  misc_feature (25)..(485): Homolog of NCBI NO: 15242507 NR Description: serine threonine protein kinase; protein id: supported by cDNA: gi_14009295 [Arabidopsis thaliana]
  misc_feature (20)..(313): Homolog of NCBI NO: 27549573 NR Description: calcineurin B-like-interacting protein kinase
  misc_feature (306)..(484): Homolog of NCBI NO: 27549573 NR Description: calcineurin B-like-interacting protein kinase
  misc_feature (35)..(317): Homolog of NCBI NO: 6651177 NR Description: protein kinase PK4 [Zea mays]
  misc_feature (315)..(472): Homolog of NCBI NO: 6651177 NR Description: protein kinase PK4 [Zea mays]
  misc_feature (30)..(309): Homolog of NCBI NO: 5821067 NR Description: OsPK4 [Oryza sativa]
  misc_feature (311)..(485): Homolog of NCBI NO: 5821067 NR Description: OsPK4 [Oryza sativa]
MADLLGRIGIMDTDKDGNISPQSPRSPRSPRNNILMGKYELGKLLGHGTFAKVYLAQNIKSGDKVAIKVIDKEKIMKSGLVAHIKREISILRRVRHPYIVHLFEVMATKSKIYFVMEYVGGGELFNTVAKGRLPEETARRYFQQLISSVSFCHGRGVYHRDLKPENLLLDNKGNLKVSDFGLSAVAEQLRQDGLCHTFCGTPAYIAPEVLTRKGYDAAKADVWSCGVILFVLMAGHIPFYDKNIMVMYKKIYKGEFRCPRWFSSDLVRLLTRLLDTNPDTRITIPEIMKNRWFKKGFKHVKFYIEDDKLCREDEDEEEEASSSGRSSTVSESDAEFDVKRMGIGSMPRPSSLNAFDIISFSSGFDLSGLFEEEGGEGTRFVSGAPVSKIISKLEEIAKIVSFTVRKKEWSLRLEGCREGAKGPLTIAAEIFELTPSLVVVEVKKKGGDREEYEEFCNKELRPELEKLIHEEVVVEEALYLPSDTE

SEQ ID NO: 83248 - protein, 475 aa, Arabidopsis thaliana
  peptide (1)..(475): Ceres Seq. ID no. 12669399
  misc_feature (29)..(283): Pfam Name: Protein kinase domain Pfam Description: Protein kinase domain
  misc_feature (1)..(475): Homolog of NCBI NO: 15218854 NR Description: protein kinase PK4, putative; protein id: supported by cDNA: gi_14334387 [Arabidopsis thaliana]
  misc_feature (1)..(475): Homolog of NCBI NO: 15226241 NR Description: putative protein kinase; protein id: At2g34180.1, by cDNA: gi_13249124 [Arabidopsis thaliana]
  misc_feature (14)..(465): Homolog of NCBI NO: 15233981 NR Description: putative protein kinase; protein id: At4g18700.1, by cDNA: gi_13249122, supported by cDNA: gi_13448040, supported cDNA: gi_16648898 [Arabidopsis thaliana] >gi|7446437|pir||T04862
  misc_feature (15)..(475): Homolog of NCBI NO: 15242507 NR Description: serine threonine protein kinase; protein id: supported by cDNA: gi_14009295 [Arabidopsis thaliana]
  misc_feature (10)..(303): Homolog of NCBI NO: 27549573 NR Description: calcineurin B-like-interacting protein kinase
  misc_feature (296)..(474): Homolog of NCBI NO: 27549573 NR Description: calcineurin B-like-interacting protein kinase
  misc_feature (25)..(307): Homolog of NCBI NO: 6651177 NR Description: protein kinase PK4 [Zea mays]
  misc_feature (305)..(462): Homolog of NCBI NO: 6651177 NR Description: protein kinase PK4 [Zea mays]
  misc_feature (20)..(299): Homolog of NCBI NO: 5821067 NR Description: OsPK4 [Oryza sativa]
  misc_feature (301)..(475): Homolog of NCBI NO: 5821067 NR Description: OsPK4 [Oryza sativa]
MDTDKDGNISPQSPRSPRSPRNNILMGKYELGKLLGHGTFAKVYLAQNIKSGDKVAIKVIDKEKIMKSGLVAHIKREISILRRVRHPYIVHLFEVMATKSKIYFVMEYVGGGELFNTVAKGRLPEETARRYFQQLISSVSFCHGRGVYHRDLKPENLLLDNKGNLKVSDFGLSAVAEQLRQDGLCHTFCGTPAYIAPEVLTRKGYDAAKADVWSCGVILFVLMAGHIPFYDKNIMVMYKKIYKGEFRCPRWFSSDLVRLLTRLLDTNPDTRITIPEIMKNRWFKKGFKHVKFYIEDDKLCREDEDEEEEASSSGRSSTVSESDAEFDVKRMGIGSMPRPSSLNAFDIISFSSGFDLSGLFEEEGGEGTRFVSGAPVSKIISKLEEIAKIVSFTVRKKEWSLRLEGCREGAKGPLTIAAEIFELTPSLVVVEVKKKGGDREEYEEFCNKELRPELEKLIHEEVVVEEALYLPSDTE

SEQ ID NO: 83249 - DNA, 1815 bp, Arabidopsis thaliana
  misc_feature (1)..(1815): Ceres Seq. ID no. 12669408
  misc_feature: MA Experiment ID: 20000182 Result: Up-regulated in Transcription
  misc_feature: MA Experiment 20000182 PARAMETER Experiment Name: At_2mM_SA_P Parameter: Age (day) Value: 14
  misc_feature: MA Experiment 20000182 PARAMETER Experiment Name: At_2mM_SA_P Parameter: Organism Value: A. thaliana
  misc_feature: MA Experiment 20000182 PARAMETER Experiment Name: At_2mM_SA_P Parameter: Plant Line Value: WS
  misc_feature: MA Experiment 20000182 PARAMETER Experiment Name: At_2mM_SA_P Parameter: Timepoint (hr) Value: 6
  misc_feature: MA Experiment 20000182 PARAMETER Experiment Name: At_2mM_SA_P Parameter: Tissue Value: Aerial
  misc_feature: MA Experiment 20000182 PARAMETER Experiment Name: At_2mM_SA_P Parameter: Treatment Value: 2mM SA vs. No Treatment
  misc_feature: MA Experiment ID: 20000185 Result: Up-regulated in Transcription
  misc_feature: MA Experiment 20000185 PARAMETER Experiment Name: At_Roots__P Parameter: Age (day) Value: 7 vs. 21
  misc_feature: MA Experiment 20000185 PARAMETER Experiment Name: At_Roots__P Parameter: Organism Value: A. thaliana
  misc_feature: MA Experiment 20000185 PARAMETER Experiment Name: At_Roots__P Parameter: Tissue Value: Roots vs. Whole Plant
  misc_feature: MA Experiment ID: 20000227 Result: Down-regulated in Transcription
  misc_feature: MA Experiment 20000227 PARAMETER Experiment Name: At_Root-Tips-vs-Tops_P Parameter: Tissue Value: Root Tips vs. Root Tops
  misc_feature: MA Experiment ID: 20000495 Result: Down-regulated in Transcription
  misc_feature: MA Experiment 20000495 PARAMETER Experiment Name: At_Guard_Cells_P Parameter: Harvest Date Value: 8/2/2002
  misc_feature: MA Experiment 20000495 PARAMETER Experiment Name: At_Guard_Cells_P Parameter: Organism Value: A. thaliana
  misc_feature: MA Experiment 20000495 PARAMETER Experiment Name: At_Guard_Cells_P Parameter: Tissue Value: Guard Cells vs. Leaves
  misc_feature: MA Experiment ID: 20000794 Result: Up-regulated in Transcription
  misc_feature: MA Experiment 20000794 PARAMETER Experiment Name: At_Petals_P Parameter: Age (day) Value: 23-25 days
  misc_feature: MA Experiment 20000794 PARAMETER Experiment Name: At_Petals_P Parameter: Plant Line Value: WS
  misc_feature: MA Experiment 20000794 PARAMETER Experiment Name: At_Petals_P Parameter: Tissue Value: Petals vs. Whole plant
  misc_feature: MA Experiment ID: 20001557 Result: Up-regulated in Transcription
  misc_feature: MA Experiment 20001557 PARAMETER Experiment Name: At_Drought_Soil_Dry_P Parameter: Age (day) Value: 27
  misc_feature: MA Experiment 20001557 PARAMETER Experiment Name: At_Drought_Soil_Dry_P Parameter: Organism Value: A. thaliana
  misc_feature: MA Experiment 20001557 PARAMETER Experiment Name: At_Drought_Soil_Dry_P Parameter: Plant Line Value: WS
  misc_feature: MA Experiment 20001557 PARAMETER Experiment Name: At_Drought_Soil_Dry_P Parameter: Post Timepoint (hr) Value: 3
  misc_feature: MA Experiment 20001557 PARAMETER Experiment Name: At_Drought_Soil_Dry_P Parameter: Post-Treatment Value: Re-Water vs. No Drought
  misc_feature: MA Experiment 20001557 PARAMETER Experiment Name: At_Drought_Soil_Dry_P Parameter: Timepoint (day) Value: 13
  misc_feature: MA Experiment 20001557 PARAMETER Experiment Name: At_Drought_Soil_Dry_P Parameter: Treatment Value: Drought vs. No Drought
gctgtttcagactcaccaaaaaaacttctccttgtcagaaaaaaaaaaaaaaactactgaatctctctgtttttttttcctttcacaacatctcaatggagacattgaagaagaatccatcagtgagaagaaaaagcaagttagcgagaacattccagaaagtatgtaacctaagaacaacgtcgacgaaggtctcctccaacaacggaatcggaatctgtatgttaaagtcccaaaatccaaatttcgacgacgaagacgacgacggagactctgttttcgatttaaagagtacttccagtagcagaagcggagagatcaaagtgcgagagcgtaatagagctgttttacaagctgtggttgcgaagatcttcgctagtacgacttccattaaagctgcttacgcagagcttcagatggcgcaacgtccgtacgataacgacgctatacaagcggcggatacggcggtggtcgaagagcttagagctttatcggagcttaaacggagttttctcaggaaggaattgaatctgtctccgcaagttgcgattatgttagctgagatccaggagcaacagagtttgatgaggacttatgaaatcacgattaagaaactcgagtttgaagttacggagaagcaattgaagatcgatgaattgaagatgagttttgaagagagtttggttgtgaataaatcgttggagaagaaactctcagcgagtggatcggtctctgtgtttgataatattgaaattcgaaatttgaatttgagtagttttgttcaggttttaggttttacgttgagatctgtgagaagcttcgtgaaattgattgtgaaggagatggaatcagcgagctgggatctagacgccgccgcttccgccgctgtttcggtgaacgttaaaaacgcttccaccgttttcgcgaggccgagtcaccgttgtttcgcgtttgaatcgtttgtttgtgggaaaatgtttgagaattttggagctcctgatttctcgagacgtgaggaattcgaaaagttgagatccgttgacccgattcagtacttgacccggaacccgggttcgtcttttgccaggttcgtggttcataagtacttgagcgttgtacatgcgaagatggagtgttctttcttcgggaacttgaaccagaggaagctggttaactcgggtgggtttccggactcgggtttcttcgcgacgttttgtgaaatggcaaaacggatctggcttttacactgcttagcgttttcattaagcggaaacgtcacggtgtttcagctcaaacgaggttgtagattctctcaagtatatatggagagtgtgaaatccggcgatgagtcattattctccggtgataattcagatattcgggtcgggttcacggttgttcccgggtttaaaatcggcgagaatgtgatacaaagccaggtttacttgactccggttaacggttttacttcatgaataggccaatccaaagagaacgcggtgggttgtgttcacgcgccggggaagaaaaaagagaggcggcgcgtgaaaaggaaatggtggggacatgattccttgggggcagcaagactggcaagtgggacatgttttaagaatgtgacggagacagaaaatggcgcgagggacaatcattatgaaaaaacagtttagattagtgatcattttttgtttttaaaatttttagattatacagcttaaagtatgaagggcatagaagaaaaataatattctgtgtttttctataacgtattacgtaaaagtttttgttatatacctgatattttataatgtttgt

SEQ ID NO: 83250 - protein, 490 aa, Arabidopsis thaliana
  peptide (1)..(490): Ceres Seq. ID no. 12669409
  misc_feature (102)..(237): Pfam Name: Plant protein of unknown function (DUF641) Pfam Description: Plant protein of unknown function (DUF641)
  misc_feature (32)..(490): Homolog of NCBI NO: 22329840 NR Description: unknown protein; protein id: At1g29300.1, by cDNA: gi_20466323 [Arabidopsis thaliana]
  misc_feature (32)..(490): Homolog of NCBI NO: 20466324 NR Description: unknown protein [Arabidopsis thaliana]
  misc_feature (29)..(483): Homolog of NCBI NO: 8777470 NR Description: gb|AAB82637.1~gene_id:K15M2.1~similar to unknown
  misc_feature (32)..(483): Homolog of NCBI NO: 15231944 NR Description: hypothetical protein; protein id: At3g14870.1 thaliana] >gi|28393841|gb|AAO42328.1| unknown protein thaliana] >gi|28973373|gb|AAO64011.1| unknown protein
  misc_feature (93)..(483): Homolog of NCBI NO: 15219282 NR Description: unknown protein; protein id: At1g53380.1
  misc_feature (118)..(447): Homolog of NCBI NO: 34903732 NR Description: unnamed protein product [Oryza sativa (japonica group)] >gi|7340858|dbj|BAA92948.1| unnamed protein product
  misc_feature (157)..(485): Homolog of NCBI NO: 15225441 NR Description: hypothetical protein; protein id: At2g45260.1, by cDNA: gi_20268755, supported by cDNA: gi_21281073 [Arabidopsis >gi|25367434|pir||D84888 hypothetical protein At2g45260
  misc_feature (107)..(483): Homolog of NCBI NO: 15232398 NR Description: putative protein; protein id: At3g60680.1
  misc_feature (115)..(240): Homolog of NCBI NO: 15225192 NR Description: hypothetical protein; protein id: At2g32130.1
  misc_feature (46)..(486): Homolog of NCBI NO: 34907852 NR Description: P0031D02.13 [Oryza sativa (japonica
CFRLTKKTSPCQKKKKKLLNLSVFFSFHNISMETLKKNPSVRRKSKLARTFQKVCNLRTTSTKVSSNNGIGICMLKSQNPNFDDEDDDGDSVFDLKSTSSSRSGEIKVRERNRAVLQAVVAKIFASTTSIKAAYAELQMAQRPYDNDAIQAADTAVVEELRALSELKRSFLRKELNLSPQVAIMLAEIQEQQSLMRTYEITIKKLEFEVTEKQLKIDELKMSFEESLVVNKSLEKKLSASGSVSVFDNIEIRNLNLSSFVQVLGFTLRSVRSFVKLIVKEMESASWDLDAAASAAVSVNVKNASTVFARPSHRCFAFESFVCGKMFENFGAPDFSRREEFEKLRSVDPIQYLTRNPGSSFARFVVHKYLSVVHAKMECSFFGNLNQRKLVNSGGFPDSGFFATFCEMAKRIWLLHCLAFSLSGNVTVFQLKRGCRFSQVYMESVKSGDESLFSGDNSDIRVGFTVVPGFKIGENVIQSQVYLTPVNGFTS

SEQ ID NO: 83251 - protein, 459 aa, Arabidopsis thaliana
  peptide (1)..(459): Ceres Seq. ID no. 12669410
  misc_feature (71)..(206): Pfam Name: Plant protein of unknown function (DUF641) Pfam Description: Plant protein of unknown function (DUF641)
  misc_feature (1)..(459): Homolog of NCBI NO: 22329840 NR Description: unknown protein; protein id: At1g29300.1, by cDNA: gi_20466323 [Arabidopsis thaliana]
  misc_feature (1)..(459): Homolog of NCBI NO: 20466324 NR Description: unknown protein [Arabidopsis thaliana]
  misc_feature (1)..(452): Homolog of NCBI NO: 8777470 NR Description: gb|AAB82637.1~gene_id:K15M2.1~similar to unknown
  misc_feature (1)..(452): Homolog of NCBI NO: 15231944 NR Description: hypothetical protein; protein id: At3g14870.1 thaliana] >gi|28393841|gb|AAO42328.1| unknown protein thaliana] >gi|28973373|gb|AAO64011.1| unknown protein
  misc_feature (62)..(452): Homolog of NCBI NO: 15219282 NR Description: unknown protein; protein id: At1g53380.1
  misc_feature (87)..(416): Homolog of NCBI NO: 34903732 NR Description: unnamed protein product [Oryza sativa (japonica group)] >gi|7340858|dbj|BAA92948.1| unnamed protein product
  misc_feature (126)..(454): Homolog of NCBI NO: 15225441 NR Description: hypothetical protein; protein id: At2g45260.1, by cDNA: gi_20268755, supported by cDNA: gi_21281073 [Arabidopsis >gi|25367434|pir||D84888 hypothetical protein At2g45260
  misc_feature (76)..(452): Homolog of NCBI NO: 15232398 NR Description: putative protein; protein id: At3g60680.1
  misc_feature (84)..(209): Homolog of NCBI NO: 15225192 NR Description: hypothetical protein; protein id: At2g32130.1
  misc_feature (15)..(455): Homolog of NCBI NO: 34907852 NR Description: P0031D02.13 [Oryza sativa (japonica
METLKKNPSVRRKSKLARTFQKVCNLRTTSTKVSSNNGIGICMLKSQNPNFDDEDDDGDSVFDLKSTSSSRSGEIKVRERNRAVLQAVVAKIFASTTSIKAAYAELQMAQRPYDNDAIQAADTAVVEELRALSELKRSFLRKELNLSPQVAIMLAEIQEQQSLMRTYEITIKKLEFEVTEKQLKIDELKMSFEESLVVNKSLEKKLSASGSVSVFDNIEIRNLNLSSFVQVLGFTLRSVRSFVKLIVKEMESASWDLDAAASAAVSVNVKNASTVFARPSHRCFAFESFVCGKMFENFGAPDFSRREEFEKLRSVDPIQYLTRNPGSSFARFVVHKYLSVVHAKMECSFFGNLNQRKLVNSGGFPDSGFFATFCEMAKRIWLLHCLAFSLSGNVTVFQLKRGCRFSQVYMESVKSGDESLFSGDNSDIRVGFTVVPGFKIGENVIQSQVYLTPVNGFTS

SEQ ID NO: 83252 - protein, 417 aa, Arabidopsis thaliana
  peptide (1)..(417): Ceres Seq. ID no. 12669411
  misc_feature (29)..(164): Pfam Name: Plant protein of unknown function (DUF641) Pfam Description: Plant protein of unknown function (DUF641)
  misc_feature (1)..(417): Homolog of NCBI NO: 22329840 NR Description: unknown protein; protein id: At1g29300.1, by cDNA: gi_20466323 [Arabidopsis thaliana]
  misc_feature (1)..(417): Homolog of NCBI NO: 20466324 NR Description: unknown protein [Arabidopsis thaliana]
  misc_feature (1)..(410): Homolog of NCBI NO: 8777470 NR Description: gb|AAB82637.1~gene_id:K15M2.1~similar to unknown
  misc_feature (1)..(410): Homolog of NCBI NO: 15231944 NR Description: hypothetical protein; protein id: At3g14870.1 thaliana] >gi|28393841|gb|AAO42328.1| unknown protein thaliana] >gi|28973373|gb|AAO64011.1| unknown protein
  misc_feature (20)..(410): Homolog of NCBI NO: 15219282 NR Description: unknown protein; protein id: At1g53380.1
  misc_feature (45)..(374): Homolog of NCBI NO: 34903732 NR Description: unnamed protein product [Oryza sativa (japonica group)] >gi|7340858|dbj|BAA92948.1| unnamed protein product
  misc_feature (84)..(412): Homolog of NCBI NO: 15225441 NR Description: hypothetical protein; protein id: At2g45260.1, by cDNA: gi_20268755, supported by cDNA: gi_21281073 [Arabidopsis >gi|25367434|pir||D84888 hypothetical protein At2g45260
  misc_feature (34)..(410): Homolog of NCBI NO: 15232398 NR Description: putative protein; protein id: At3g60680.1
  misc_feature (42)..(167): Homolog of NCBI NO: 15225192 NR Description: hypothetical protein; protein id: At2g32130.1
  misc_feature (1)..(413): Homolog of NCBI NO: 34907852 NR Description: P0031D02.13 [Oryza sativa (japonica
MLKSQNPNFDDEDDDGDSVFDLKSTSSSRSGEIKVRERNRAVLQAVVAKIFASTTSIKAAYAELQMAQRPYDNDAIQAADTAVVEELRALSELKRSFLRKELNLSPQVAIMLAEIQEQQSLMRTYEITIKKLEFEVTEKQLKIDELKMSFEESLVVNKSLEKKLSASGSVSVFDNIEIRNLNLSSFVQVLGFTLRSVRSFVKLIVKEMESASWDLDAAASAAVSVNVKNASTVFARPSHRCFAFESFVCGKMFENFGAPDFSRREEFEKLRSVDPIQYLTRNPGSSFARFVVHKYLSVVHAKMECSFFGNLNQRKLVNSGGFPDSGFFATFCEMAKRIWLLHCLAFSLSGNVTVFQLKRGCRFSQVYMESVKSGDESLFSGDNSDIRVGFTVVPGFKIGENVIQSQVYLTPVNGFTS

SEQ ID NO: 83253 - DNA, 774 bp, Arabidopsis thaliana
  misc_feature (1)..(774): Ceres Seq. ID no. 12669439
  misc_feature: MA Experiment ID: 20000179 Result: Up-regulated in Transcription
  misc_feature: MA Experiment 20000179 PARAMETER Experiment Name: At_Germinating_Seeds_P Parameter: Age (hr) Value: 6 vs. 0
  misc_feature: MA Experiment 20000179 PARAMETER Experiment Name: At_Germinating_Seeds_P Parameter: Tissue Value: Germinating Seeds
  misc_feature: MA Experiment ID: 20000180 Result: Up-regulated in Transcription
  misc_feature: MA Experiment 20000180 PARAMETER Experiment Name: At_Germinating_Seeds_P Parameter: Age (hr) Value: 24 vs. 0
  misc_feature: MA Experiment 20000180 PARAMETER Experiment Name: At_Germinating_Seeds_P Parameter: Tissue Value: Germinating Seeds
  misc_feature: MA Experiment ID: 20000185 Result: Up-regulated in Transcription
  misc_feature: MA Experiment 20000185 PARAMETER Experiment Name: At_Roots__P Parameter: Age (day) Value: 7 vs. 21
  misc_feature: MA Experiment 20000185 PARAMETER Experiment Name: At_Roots__P Parameter: Organism Value: A. thaliana
  misc_feature: MA Experiment 20000185 PARAMETER Experiment Name: At_Roots__P Parameter: Tissue Value: Roots vs. Whole Plant
  misc_feature: MA Experiment ID: 20000439 Result: Up-regulated in Transcription
  misc_feature: MA Experiment 20000439 PARAMETER Experiment Name: At_Roots__P Parameter: Age (day) Value: 14 vs. 21
  misc_feature: MA Experiment 20000439 PARAMETER Experiment Name: At_Roots__P Parameter: Organism Value: A. thaliana
  misc_feature: MA Experiment 20000439 PARAMETER Experiment Name: At_Roots__P Parameter: Tissue Value: Roots vs. Whole Plant
  misc_feature: MA Experiment ID: 20000794 Result: Down-regulated in Transcription
  misc_feature: MA Experiment 20000794 PARAMETER Experiment Name: At_Petals_P Parameter: Age (day) Value: 23-25 days
  misc_feature: MA Experiment 20000794 PARAMETER Experiment Name: At_Petals_P Parameter: Plant Line Value: WS
  misc_feature: MA Experiment 20000794 PARAMETER Experiment Name: At_Petals_P Parameter: Tissue Value: Petals vs. Whole plant
  misc_feature: MA Experiment ID: 20001556 Result: Down-regulated in Transcription
  misc_feature: MA Experiment 20001556 PARAMETER Experiment Name: At_Drought_Soil_Dry_P Parameter: Age (day) Value: 26
  misc_feature: MA Experiment 20001556 PARAMETER Experiment Name: At_Drought_Soil_Dry_P Parameter: Organism Value: A. thaliana
  misc_feature: MA Experiment 20001556 PARAMETER Experiment Name: At_Drought_Soil_Dry_P Parameter: Plant Line Value: WS
  misc_feature: MA Experiment 20001556 PARAMETER Experiment Name: At_Drought_Soil_Dry_P Parameter: Post Timepoint (hr) Value: None
  misc_feature: MA Experiment 20001556 PARAMETER Experiment Name: At_Drought_Soil_Dry_P Parameter: Post-Treatment Value: None
  misc_feature: MA Experiment 20001556 PARAMETER Experiment Name: At_Drought_Soil_Dry_P Parameter: Timepoint (day) Value: 12
  misc_feature: MA Experiment 20001556 PARAMETER Experiment Name: At_Drought_Soil_Dry_P Parameter: Treatment Value: Drought vs. No Drought
  misc_feature: MA Experiment ID: 20001558 Result: Down-regulated in Transcription
  misc_feature: MA Experiment 20001558 PARAMETER Experiment Name: At_Drought_Soil_Dry_P Parameter: Age (day) Value: 27
  misc_feature: MA Experiment 20001558 PARAMETER Experiment Name: At_Drought_Soil_Dry_P Parameter: Organism Value: A. thaliana
  misc_feature: MA Experiment 20001558 PARAMETER Experiment Name: At_Drought_Soil_Dry_P Parameter: Plant Line Value: WS
  misc_feature: MA Experiment 20001558 PARAMETER Experiment Name: At_Drought_Soil_Dry_P Parameter: Post Timepoint (hr) Value: 6
  misc_feature: MA Experiment 20001558 PARAMETER Experiment Name: At_Drought_Soil_Dry_P Parameter: Post-Treatment Value: Re-Water vs. No Drought
  misc_feature: MA Experiment 20001558 PARAMETER Experiment Name: At_Drought_Soil_Dry_P Parameter: Timepoint (day) Value: 13
  misc_feature: MA Experiment 20001558 PARAMETER Experiment Name: At_Drought_Soil_Dry_P Parameter: Treatment Value: Drought vs. No Drought
  misc_feature: MA Experiment ID: 20001906 Result: Down-regulated in Transcription
  misc_feature: MA Experiment 20001906 PARAMETER Experiment Name: At_Drought_Reproduction_P Parameter: Age (day) Value: 35
  misc_feature: MA Experiment 20001906 PARAMETER Experiment Name: At_Drought_Reproduction_P Parameter: Organism Value: A. thaliana
  misc_feature: MA Experiment 20001906 PARAMETER Experiment Name: At_Drought_Reproduction_P Parameter: Plant Line Value: WS
  misc_feature: MA Experiment 20001906 PARAMETER Experiment Name: At_Drought_Reproduction_P Parameter: Timepoint (day) Value: 5
  misc_feature: MA Experiment 20001906 PARAMETER Experiment Name: At_Drought_Reproduction_P Parameter: Tissue Value: Siliques
  misc_feature: MA Experiment 20001906 PARAMETER Experiment Name: At_Drought_Reproduction_P Parameter: Treatment Value: Drought vs. No Drought
aaacataagaacaaacttcatcttcttcattcttctttcttctctttttgtcccgctttcgtagtttttcaaaaggcgaaatggcgggtgagcaaatcaaacctgttgcctctggacttctagttttgaacttctgcatgtatgtgatcgttctaggcattggaggatgggccatgaaccgagccatcgaccatggattcgaagtcggccctaatttagagcttccagcacatttctccccaatttatttcccgatgggaaacgcagccacaggattctttgtgatattcgcgttgctagcgggagtagttggagcagcttccacaatctcaggccttagccacattcgttcgtggaccgtgggaagcttaccagcagcagccacagctgcaaccattgcctggaccctcacagtccttgccatgggtttcgcttggaaagaaatcgagctacaagggagaaatgcaaaactgagaaccatggaggcgttcttgatcatactctcagtcacccagcttatttacatcgcagcagttcatggcgtgaggagaccttaaggaatcattcatgggcgtcggatttcttttcttcctattgtggcaatcatccgaaactcgggattgtgtgtgtgagcgtttgtatttgtgtgagtgtgctttattttcttcataggaagcttaagataaattcatgcattctttatgtacaaaaggattagatcttgttttgtgtgttgtcactttgtgttcatggaataaaatcgaactttgaggc

SEQ ID NO: 83254 - protein, 158 aa, Arabidopsis thaliana
  peptide (1)..(158): Ceres Seq. ID no. 12669440
  misc_feature (15)..(156): Pfam Name: AWPM-19-like family Pfam Description: AWPM-19-like family
  misc_feature (1)..(158): Homolog of NCBI NO: 15218953 NR Description: plasma membrane associated protein, putative; id: At1g29520.1, supported by cDNA: gi_18377740, supported by gi_20465528 [Arabidopsis thaliana] >gi|25354594|pir||B86418
  misc_feature (1)..(156): Homolog of NCBI NO: 34911480 NR Description: putative plasma membrane associated protein
  misc_feature (4)..(131): Homolog of NCBI NO: 34904644 NR Description: putative ABA-induced plasma membrane protein
  misc_feature (133)..(158): Homolog of NCBI NO: 34904644 NR Description: putative ABA-induced plasma membrane protein
  misc_feature (43)..(157): Homolog of NCBI NO: 15237455 NR Description: putative protein; protein id: At5g46530.1 thaliana] >gi|10177590|dbj|BAB10821.1| contains similarity to ABA
  misc_feature (1)..(155): Homolog of NCBI NO: 15239619 NR Description: plasma membrane associated protein -like; protein
  misc_feature (1)..(153): Homolog of NCBI NO: 7489659 NR Description: ABA-induced plasma membrane protein PM 19 - wheat
  misc_feature (1)..(153): Homolog of NCBI NO: 6851373 NR Description: plasma membrane associated protein [Hordeum
  misc_feature (1)..(153): Homolog of NCBI NO: 4097340 NR Description: hydrophobic LEA-like protein [Oryza sativa]
  misc_feature (9)..(153): Homolog of NCBI NO: 18390408 NR Description: expressed protein; protein id: At1g04560.1, by cDNA: gi_13507554, supported by cDNA: gi_15293292 [Arabidopsis
MAGEQIKPVASGLLVLNFCMYVIVLGIGGWAMNRAIDHGFEVGPNLELPAHFSPIYFPMGNAATGFFVIFALLAGVVGAASTISGLSHIRSWTVGSLPAAATAATIAWTLTVLAMGFAWKEIELQGRNAKLRTMEAFLIILSVTQLIYIAAVHGVRRP

SEQ ID NO: 83255 - protein, 139 aa, Arabidopsis thaliana
  peptide (1)..(139): Ceres Seq. ID no. 12669441
  misc_feature (1)..(137): Pfam Name: AWPM-19-like family Pfam Description: AWPM-19-like family
  misc_feature (1)..(139): Homolog of NCBI NO: 15218953 NR Description: plasma membrane associated protein, putative; id: At1g29520.1, supported by cDNA: gi_18377740, supported by gi_20465528 [Arabidopsis thaliana] >gi|25354594|pir||B86418
  misc_feature (1)..(137): Homolog of NCBI NO: 34911480 NR Description: putative plasma membrane associated protein
  misc_feature (1)..(112): Homolog of NCBI NO: 34904644 NR Description: putative ABA-induced plasma membrane protein
  misc_feature (114)..(139): Homolog of NCBI NO: 34904644 NR Description: putative ABA-induced plasma membrane protein
  misc_feature (24)..(138): Homolog of NCBI NO: 15237455 NR Description: putative protein; protein id: At5g46530.1 thaliana] >gi|10177590|dbj|BAB10821.1| contains similarity to ABA
  misc_feature (1)..(136): Homolog of NCBI NO: 15239619 NR Description: plasma membrane associated protein -like; protein
  misc_feature (1)..(134): Homolog of NCBI NO: 7489659 NR Description: ABA-induced plasma membrane protein PM 19 - wheat
  misc_feature (1)..(134): Homolog of NCBI NO: 6851373 NR Description: plasma membrane associated protein [Hordeum
  misc_feature (1)..(134): Homolog of NCBI NO: 4097340 NR Description: hydrophobic LEA-like protein [Oryza sativa]
  misc_feature (1)..(134): Homolog of NCBI NO: 18390408 NR Description: expressed protein; protein id: At1g04560.1, by cDNA: gi_13507554, supported by cDNA: gi_15293292 [Arabidopsis
MYVIVLGIGGWAMNRAIDHGFEVGPNLELPAHFSPIYFPMGNAATGFFVIFALLAGVVGAASTISGLSHIRSWTVGSLPAAATAATIAWTLTVLAMGFAWKEIELQGRNAKLRTMEAFLIILSVTQLIYIAAVHGVRRP

SEQ ID NO: 83256 - protein, 127 aa, Arabidopsis thaliana
  peptide (1)..(127): Ceres Seq. ID no. 12669442
  misc_feature (1)..(125): Pfam Name: AWPM-19-like family Pfam Description: AWPM-19-like family
  misc_feature (1)..(127): Homolog of NCBI NO: 15218953 NR Description: plasma membrane associated protein, putative; id: At1g29520.1, supported by cDNA: gi_18377740, supported by gi_20465528 [Arabidopsis thaliana] >gi|25354594|pir||B86418
  misc_feature (1)..(125): Homolog of NCBI NO: 34911480 NR Description: putative plasma membrane associated protein
  misc_feature (1)..(100): Homolog of NCBI NO: 34904644 NR Description: putative ABA-induced plasma membrane protein
  misc_feature (102)..(127): Homolog of NCBI NO: 34904644 NR Description: putative ABA-induced plasma membrane protein
  misc_feature (12)..(126): Homolog of NCBI NO: 15237455 NR Description: putative protein; protein id: At5g46530.1 thaliana] >gi|10177590|dbj|BAB10821.1| contains similarity to ABA
  misc_feature (1)..(124): Homolog of NCBI NO: 15239619 NR Description: plasma membrane associated protein -like; protein
  misc_feature (1)..(122): Homolog of NCBI NO: 7489659 NR Description: ABA-induced plasma membrane protein PM 19 - wheat
  misc_feature (1)..(122): Homolog of NCBI NO: 6851373 NR Description: plasma membrane associated protein [Hordeum
  misc_feature (1)..(122): Homolog of NCBI NO: 4097340 NR Description: hydrophobic LEA-like protein [Oryza sativa]
  misc_feature (1)..(122): Homolog of NCBI NO: 18390408 NR Description: expressed protein; protein id: At1g04560.1, by cDNA: gi_13507554, supported by cDNA: gi_15293292 [Arabidopsis
MNRAIDHGFEVGPNLELPAHFSPIYFPMGNAATGFFVIFALLAGVVGAASTISGLSHIRSWTVGSLPAAATAATIAWTLTVLAMGFAWKEIELQGRNAKLRTMEAFLIILSVTQLIYIAAVHGVRRP

SEQ ID NO: 83257 - DNA, 723 bp, Arabidopsis thaliana
  misc_feature (1)..(723): Ceres Seq. ID no. 12669443
  misc_feature: MA Experiment ID: 20000315 Result: Down-regulated in Transcription
  misc_feature: MA Experiment 20000315 PARAMETER Experiment Name: At_14day_Shoots-Roots_Sub_P Parameter: Age (day) Value: 14
  misc_feature: MA Experiment 20000315 PARAMETER Experiment Name: At_14day_Shoots-Roots_Sub_P Parameter: Organism Value: A. thaliana
  misc_feature: MA Experiment 20000315 PARAMETER Experiment Name: At_14day_Shoots-Roots_Sub_P Parameter: Plant Line Value: WS
  misc_feature: MA Experiment 20000315 PARAMETER Experiment Name: At_14day_Shoots-Roots_Sub_P Parameter: Tissue Value: Shoots vs. Whole Plant
atggtggttacggattctccagtttcggggataatggctgatcagaacatcgatcctaacaccacgacgagccctagtcctaaagagaagcatgtttctgcgattaaggctatctccggcgacgagaaagctccgtcgaaggagaaaaagaactacgcgtcgaagaaatcaactaccgtaatccagaaatcgcactgtttccagaattcttggacattttggttcgataatccttcctccaaatcgaatcaagtcatatggggaagctctttgagatccttgtatacattcggtactatcgaagagttctggagtctctacaataacattcatcctccaaccaagtgggtttcgggggcggatctttactgcttcaaagataagattgaaccaaaatgggaagatcctatctgtgctaatggaggaaaatggagtatgatgttccctaaagctacactagaatgcaattggcttaacacgttacttgcgttggttggtgagcaatttgaccaaggagatgagatctgtggagcagttttgaacttcagagcgagaggggacaggatctctctatggacaaagaacgctgcaaatgaggaggctcagctaagcattgggaagcagtggaaggaacttcttggctacaatgagacaatcggatttatagttcatgaggatgcaaagactcttgatcgtgatgctaaacgtcgatatactgtatga

SEQ ID NO: 83258 - protein, 240 aa, Arabidopsis thaliana
  peptide (1)..(240): Ceres Seq. ID no. 12669444
  misc_feature (28)..(240): Pfam Name: Eukaryotic initiation factor 4E Pfam Description: Eukaryotic initiation factor 4E
  misc_feature (1)..(240): Homolog of NCBI NO: 15220482 NR Description: eukaryotic translation initiation factor 4E, protein id: At1g29550.1 [Arabidopsis thaliana]
  misc_feature (1)..(240): Homolog of NCBI NO: 15220489 NR Description: eukaryotic translation initiation factor 4E, protein id: At1g29590.1 [Arabidopsis thaliana]
  misc_feature (1)..(240): Homolog of NCBI NO: 29839395 NR Description: Putative eukaryotic translation initiation factor
  misc_feature (24)..(240): Homolog of NCBI NO: 32698524 NR Description: eukaryotic translation initiation factor 4E
  misc_feature (1)..(239): Homolog of NCBI NO: 15236735 NR Description: translation initiation factor eIF4E; protein id: supported by cDNA: 25447., supported by cDNA: gi_14488075, by cDNA: gi_20147320 [Arabidopsis thaliana]
  misc_feature (53)..(238): Homolog of NCBI NO: 37813067 NR Description: eukaryotic translation initiation factor 4E
  misc_feature (12)..(240): Homolog of NCBI NO: 25176242 NR Description: eucaryotic initiation factor 4E [Capsicum annuum]
  misc_feature (12)..(240): Homolog of NCBI NO: 38565045 NR Description: eukaryotic translation initiation factor 4E
  misc_feature (12)..(240): Homolog of NCBI NO: 25176246 NR Description: eucaryotic initiation factor 4E [Capsicum annuum]
  misc_feature (12)..(240): Homolog of NCBI NO: 25176244 NR Description: eucaryotic initiation factor 4E [Capsicum annuum]
MVVTDSPVSGIMADQNIDPNTTTSPSPKEKHVSAIKAISGDEKAPSKEKKNYASKKSTTVIQKSHCFQNSWTFWFDNPSSKSNQVIWGSSLRSLYTFGTIEEFWSLYNNIHPPTKWVSGADLYCFKDKIEPKWEDPICANGGKWSMMFPKATLECNWLNTLLALVGEQFDQGDEICGAVLNFRARGDRISLWTKNAANEEAQLSIGKQWKELLGYNETIGFIVHEDAKTLDRDAKRRYTV

SEQ ID NO: 83259 - protein, 229 aa, Arabidopsis thaliana
  peptide (1)..(229): Ceres Seq. ID no. 12669445
  misc_feature (17)..(229): Pfam Name: Eukaryotic initiation factor 4E Pfam Description: Eukaryotic initiation factor 4E
  misc_feature (1)..(229): Homolog of NCBI NO: 15220482 NR Description: eukaryotic translation initiation factor 4E, protein id: At1g29550.1 [Arabidopsis thaliana]
  misc_feature (1)..(229): Homolog of NCBI NO: 15220489 NR Description: eukaryotic translation initiation factor 4E, protein id: At1g29590.1 [Arabidopsis thaliana]
  misc_feature (1)..(229): Homolog of NCBI NO: 29839395 NR Description: Putative eukaryotic translation initiation factor
  misc_feature (13)..(229): Homolog of NCBI NO: 32698524 NR Description: eukaryotic translation initiation factor 4E
  misc_feature (1)..(228): Homolog of NCBI NO: 15236735 NR Description: translation initiation factor eIF4E; protein id: supported by cDNA: 25447., supported by cDNA: gi_14488075, by cDNA: gi_20147320 [Arabidopsis thaliana]
  misc_feature (42)..(227): Homolog of NCBI NO: 37813067 NR Description: eukaryotic translation initiation factor 4E
  misc_feature (1)..(229): Homolog of NCBI NO: 25176242 NR Description: eucaryotic initiation factor 4E [Capsicum annuum]
  misc_feature (1)..(229): Homolog of NCBI NO: 38565045 NR Description: eukaryotic translation initiation factor 4E
  misc_feature (1)..(229): Homolog of NCBI NO: 25176246 NR Description: eucaryotic initiation factor 4E [Capsicum annuum]
  misc_feature (1)..(229): Homolog of NCBI NO: 25176244 NR Description: eucaryotic initiation factor 4E [Capsicum annuum]
MADQNIDPNTTTSPSPKEKHVSAIKAISGDEKAPSKEKKNYASKKSTTVIQKSHCFQNSWTFWFDNPSSKSNQVIWGSSLRSLYTFGTIEEFWSLYNNIHPPTKWVSGADLYCFKDKIEPKWEDPICANGGKWSMMFPKATLECNWLNTLLALVGEQFDQGDEICGAVLNFRARGDRISLWTKNAANEEAQLSIGKQWKELLGYNETIGFIVHEDAKTLDRDAKRRYTV

SEQ ID NO: 83260 - DNA, 423 bp, Arabidopsis thaliana
  misc_feature (1)..(423): Ceres Seq. ID no. 12669446
  misc_feature: MA Experiment ID: 20000166 Result: Up-regulated in Transcription
  misc_feature: MA Experiment 20000166 PARAMETER Experiment Name: At_100uM_ABA_P Parameter: Age (day) Value: 14
  misc_feature: MA Experiment 20000166 PARAMETER Experiment Name: At_100uM_ABA_P Parameter: Organism Value: A. thaliana
  misc_feature: MA Experiment 20000166 PARAMETER Experiment Name: At_100uM_ABA_P Parameter: Plant Line Value: WS
  misc_feature: MA Experiment 20000166 PARAMETER Experiment Name: At_100uM_ABA_P Parameter: Timepoint (hr) Value: 1
  misc_feature: MA Experiment 20000166 PARAMETER Experiment Name: At_100uM_ABA_P Parameter: Tissue Value: Aerial
  misc_feature: MA Experiment 20000166 PARAMETER Experiment Name: At_100uM_ABA_P Parameter: Treatment Value: 100uM ABA vs. No Treatment
  misc_feature: MA Experiment ID: 20000169 Result: Up-regulated in Transcription
  misc_feature: MA Experiment 20000169 PARAMETER Experiment Name: At_100uM_ABA_P Parameter: Age (day) Value: 14
  misc_feature: MA Experiment 20000169 PARAMETER Experiment Name: At_100uM_ABA_P Parameter: Organism Value: A. thaliana
  misc_feature: MA Experiment 20000169 PARAMETER Experiment Name: At_100uM_ABA_P Parameter: Plant Line Value: WS
  misc_feature: MA Experiment 20000169 PARAMETER Experiment Name: At_100uM_ABA_P Parameter: Timepoint (hr) Value: 6
  misc_feature: MA Experiment 20000169 PARAMETER Experiment Name: At_100uM_ABA_P Parameter: Tissue Value: Aerial
  misc_feature: MA Experiment 20000169 PARAMETER Experiment Name: At_100uM_ABA_P Parameter: Treatment Value: 100uM ABA vs. No Treatment
  misc_feature: MA Experiment ID: 20000171 Result: Up-regulated in Transcription
  misc_feature: MA Experiment 20000171 PARAMETER Experiment Name: At_42deg_Heat_P Parameter: Age (day) Value: 14
  misc_feature: MA Experiment 20000171 PARAMETER Experiment Name: At_42deg_Heat_P Parameter: Organism Value: A. thaliana
  misc_feature: MA Experiment 20000171 PARAMETER Experiment Name: At_42deg_Heat_P Parameter: Plant Line Value: WS
  misc_feature: MA Experiment 20000171 PARAMETER Experiment Name: At_42deg_Heat_P Parameter: Temperature (deg C) Value: 42 vs. 22
  misc_feature: MA Experiment 20000171 PARAMETER Experiment Name: At_42deg_Heat_P Parameter: Timepoint (hr) Value: 1
  misc_feature: MA Experiment 20000171 PARAMETER Experiment Name: At_42deg_Heat_P Parameter: Tissue Value: Aerial
  misc_feature: MA Experiment ID: 20000173 Result: Up-regulated in Transcription
  misc_feature: MA Experiment 20000173 PARAMETER Experiment Name: At_42deg_Heat_P Parameter: Age (day) Value: 14
  misc_feature: MA Experiment 20000173 PARAMETER Experiment Name: At_42deg_Heat_P Parameter: Organism Value: A. thaliana
  misc_feature: MA Experiment 20000173 PARAMETER Experiment Name: At_42deg_Heat_P Parameter: Plant Line Value: WS
  misc_feature: MA Experiment 20000173 PARAMETER Experiment Name: At_42deg_Heat_P Parameter: Temperature (deg C) Value: 42 vs. 22
  misc_feature: MA Experiment 20000173 PARAMETER Experiment Name: At_42deg_Heat_P Parameter: Timepoint (hr) Value: 6
  misc_feature: MA Experiment 20000173 PARAMETER Experiment Name: At_42deg_Heat_P Parameter: Tissue Value: Aerial
  misc_feature: MA Experiment ID: 20000182 Result: Up-regulated in Transcription
  misc_feature: MA Experiment 20000182 PARAMETER Experiment Name: At_2mM_SA_P Parameter: Age (day) Value: 14
  misc_feature: MA Experiment 20000182 PARAMETER Experiment Name: At_2mM_SA_P Parameter: Organism Value: A. thaliana
  misc_feature: MA Experiment 20000182 PARAMETER Experiment Name: At_2mM_SA_P Parameter: Plant Line Value: WS
  misc_feature: MA Experiment 20000182 PARAMETER Experiment Name: At_2mM_SA_P Parameter: Timepoint (hr) Value: 6
  misc_feature: MA Experiment 20000182 PARAMETER Experiment Name: At_2mM_SA_P Parameter: Tissue Value: Aerial
  misc_feature: MA Experiment 20000182 PARAMETER Experiment Name: At_2mM_SA_P Parameter: Treatment Value: 2mM SA vs. No Treatment
  misc_feature: MA Experiment ID: 20000234 Result: Down-regulated in Transcription
  misc_feature: MA Experiment 20000234 PARAMETER Experiment Name: At_Siliques_P Parameter: Age (day) Value: 21
  misc_feature: MA Experiment 20000234 PARAMETER Experiment Name: At_Siliques_P Parameter: Organism Value: A. thaliana
  misc_feature: MA Experiment 20000234 PARAMETER Experiment Name: At_Siliques_P Parameter: Plant Line Value: WS
  misc_feature: MA Experiment 20000234 PARAMETER Experiment Name: At_Siliques_P Parameter: Tissue Value: Less Than 5mm Siliques vs. Whole Plant
  misc_feature: MA Experiment ID: 20000267 Result: Up-regulated in Transcription
  misc_feature: MA Experiment 20000267 PARAMETER Experiment Name: At_Drought_P Parameter: Age (day) Value: 7
  misc_feature: MA Experiment 20000267 PARAMETER Experiment Name: At_Drought_P Parameter: Organism Value: A. thaliana
  misc_feature: MA Experiment 20000267 PARAMETER Experiment Name: At_Drought_P Parameter: Plant Line Value: WS
  misc_feature: MA Experiment 20000267 PARAMETER Experiment Name: At_Drought_P Parameter: Timepoint (hr) Value: 6
  misc_feature: MA Experiment 20000267 PARAMETER Experiment Name: At_Drought_P Parameter: Tissue Value: Whole Plant
  misc_feature: MA Experiment 20000267 PARAMETER Experiment Name: At_Drought_P Parameter: Treatment Value: Drought vs. No Drought
  misc_feature: MA Experiment ID: 20000436 Result: Up-regulated in Transcription
  misc_feature: MA Experiment 20000436 PARAMETER Experiment Name: At_Drought_P Parameter: Age (day) Value: 7
  misc_feature: MA Experiment 20000436 PARAMETER Experiment Name: At_Drought_P Parameter: Organism Value: A. thaliana
  misc_feature: MA Experiment 20000436 PARAMETER Experiment Name: At_Drought_P Parameter: Plant Line Value: WS
  misc_feature: MA Experiment 20000436 PARAMETER Experiment Name: At_Drought_P Parameter: Timepoint (hr) Value: 12
  misc_feature: MA Experiment 20000436 PARAMETER Experiment Name: At_Drought_P Parameter: Tissue Value: Whole Plant
  misc_feature: MA Experiment 20000436 PARAMETER Experiment Name: At_Drought_P Parameter: Treatment Value: Drought vs. No Drought
  misc_feature: MA Experiment ID: 20000437 Result: Up-regulated in Transcription
  misc_feature: MA Experiment 20000437 PARAMETER Experiment Name: At_Drought_P Parameter: Age (day) Value: 8
  misc_feature: MA Experiment 20000437 PARAMETER Experiment Name: At_Drought_P Parameter: Organism Value: A. thaliana
  misc_feature: MA Experiment 20000437 PARAMETER Experiment Name: At_Drought_P Parameter: Plant Line Value: WS
  misc_feature: MA Experiment 20000437 PARAMETER Experiment Name: At_Drought_P Parameter: Timepoint (hr) Value: 24
  misc_feature: MA Experiment 20000437 PARAMETER Experiment Name: At_Drought_P Parameter: Tissue Value: Whole Plant
  misc_feature: MA Experiment 20000437 PARAMETER Experiment Name: At_Drought_P Parameter: Treatment Value: Drought vs. No Drought
  misc_feature: MA Experiment ID: 20000438 Result: Down-regulated in Transcription
  misc_feature: MA Experiment 20000438 PARAMETER Experiment Name: At_Shoots__P Parameter: Age (day) Value: 14
  misc_feature: MA Experiment 20000438 PARAMETER Experiment Name: At_Shoots__P Parameter: Tissue Value: Shoots vs. Whole Plant
  misc_feature: MA Experiment ID: 20000453 Result: Up-regulated in Transcription
  misc_feature: MA Experiment 20000453 PARAMETER Experiment Name: At_100uM_ABA_P Parameter: Age (day) Value: 15
  misc_feature: MA Experiment 20000453 PARAMETER Experiment Name: At_100uM_ABA_P Parameter: Organism Value: A. thaliana
  misc_feature: MA Experiment 20000453 PARAMETER Experiment Name: At_100uM_ABA_P Parameter: Plant Line Value: WS
  misc_feature: MA Experiment 20000453 PARAMETER Experiment Name: At_100uM_ABA_P Parameter: Timepoint (hr) Value: 24
  misc_feature: MA Experiment 20000453 PARAMETER Experiment Name: At_100uM_ABA_P Parameter: Tissue Value: Aerial
  misc_feature: MA Experiment 20000453 PARAMETER Experiment Name: At_100uM_ABA_P Parameter: Treatment Value: 100uM ABA vs. No Treatment
  misc_feature: MA Experiment ID: 20000794 Result: Up-regulated in Transcription
  misc_feature: MA Experiment 20000794 PARAMETER Experiment Name: At_Petals_P Parameter: Age (day) Value: 23-25 days
  misc_feature: MA Experiment 20000794 PARAMETER Experiment Name: At_Petals_P Parameter: Plant Line Value: WS
  misc_feature: MA Experiment 20000794 PARAMETER Experiment Name: At_Petals_P Parameter: Tissue Value: Petals vs. Whole plant
  misc_feature: MA Experiment ID: 20001560 Result: Up-regulated in Transcription
  misc_feature: MA Experiment 20001560 PARAMETER Experiment Name: At_Drought_Soil_Dry_P Parameter: Age (day) Value: 28
  misc_feature: MA Experiment 20001560 PARAMETER Experiment Name: At_Drought_Soil_Dry_P Parameter: Organism Value: A. thaliana
  misc_feature: MA Experiment 20001560 PARAMETER Experiment Name: At_Drought_Soil_Dry_P Parameter: Plant Line Value: WS
  misc_feature: MA Experiment 20001560 PARAMETER Experiment Name: At_Drought_Soil_Dry_P Parameter: Post Timepoint (hr) Value: None
  misc_feature: MA Experiment 20001560 PARAMETER Experiment Name: At_Drought_Soil_Dry_P Parameter: Post-Treatment Value: None
  misc_feature: MA Experiment 20001560 PARAMETER Experiment Name: At_Drought_Soil_Dry_P Parameter: Timepoint (day) Value: 14
  misc_feature: MA Experiment 20001560 PARAMETER Experiment Name: At_Drought_Soil_Dry_P Parameter: Treatment Value: Drought vs. No Drought
  misc_feature: MA Experiment ID: 20001904 Result: Up-regulated in Transcription
  misc_feature: MA Experiment 20001904 PARAMETER Experiment Name: At_Drought_Reproduction_P Parameter: Age (day) Value: 37
  misc_feature: MA Experiment 20001904 PARAMETER Experiment Name: At_Drought_Reproduction_P Parameter: Organism Value: A. thaliana
  misc_feature: MA Experiment 20001904 PARAMETER Experiment Name: At_Drought_Reproduction_P Parameter: Plant Line Value: WS
  misc_feature: MA Experiment 20001904 PARAMETER Experiment Name: At_Drought_Reproduction_P Parameter: Timepoint (day) Value: 7
  misc_feature: MA Experiment 20001904 PARAMETER Experiment Name: At_Drought_Reproduction_P Parameter: Tissue Value: Rosettes
  misc_feature: MA Experiment 20001904 PARAMETER Experiment Name: At_Drought_Reproduction_P Parameter: Treatment Value: Drought vs. No Drought
  misc_feature: MA Experiment ID: 20001905 Result: Up-regulated in Transcription
  misc_feature: MA Experiment 20001905 PARAMETER Experiment Name: At_Drought_Reproduction_P Parameter: Age (day) Value: 40
  misc_feature: MA Experiment 20001905 PARAMETER Experiment Name: At_Drought_Reproduction_P Parameter: Organism Value: A. thaliana
  misc_feature: MA Experiment 20001905 PARAMETER Experiment Name: At_Drought_Reproduction_P Parameter: Plant Line Value: WS
  misc_feature: MA Experiment 20001905 PARAMETER Experiment Name: At_Drought_Reproduction_P Parameter: Timepoint (day) Value: 10
  misc_feature: MA Experiment 20001905 PARAMETER Experiment Name: At_Drought_Reproduction_P Parameter: Tissue Value: Rosettes
  misc_feature: MA Experiment 20001905 PARAMETER Experiment Name: At_Drought_Reproduction_P Parameter: Treatment Value: Drought vs. No Drought
atgtcggaagaattcgacgaatctgagatcattttctctgacaattactttccgattcgccggcgagaagacggtaacgagaaagagaataaccgtccggtggatttccgggaaaattctgagagagtgtggaacaagtcatctagacggagtaaaacgacgccgttgccttcagcggtgacggcgttttctagttcgcttccggttaacataccgatgaggaggtattcgacggaggaggaatattccgatgacgacggaggaaggaaaatgattccgccgcatttgatagttggacggaggatggaaggaggtcaaatggcgttttccgtttgtacaggtaacggaagaactcttaaaggacgagatctgagccgggttcgtaattcggttctcaaattaaccgggtttttggaagcttga

SEQ ID NO: 83261 - protein, 140 aa, Arabidopsis thaliana
  peptide (1)..(140): Ceres Seq. ID no. 12669447
  misc_feature (1)..(139): Pfam Name: Protein of unknown function, DUF584 Pfam Description: Protein of unknown function, DUF584
  misc_feature (1)..(140): Homolog of NCBI NO: 15220508 NR Description: hypothetical protein; protein id: At1g29640.1
  misc_feature (1)..(140): Homolog of NCBI NO: 18403527 NR Description: expressed protein; protein id: At2g34340.1, by cDNA: 29146. [Arabidopsis thaliana] >gi|7485466|pir||T02322
  misc_feature (26)..(139): Homolog of NCBI NO: 18412629 NR Description: putative protein; protein id: At4g04630.1, by cDNA: 118778. [Arabidopsis thaliana]
  misc_feature (26)..(139): Homolog of NCBI NO: 25354620 NR Description: hypothetical protein AT4g04630 [imported] - thaliana >gi|4773907|gb|AAD29777.1|AF074021_9 hypothetical [Arabidopsis thaliana] >gi|7267221|emb|CAB80828.1| putative
  misc_feature (26)..(139): Homolog of NCBI NO: 26452217 NR Description: unknown protein [Arabidopsis thaliana]
  misc_feature (1)..(139): Homolog of NCBI NO: 7485420 NR Description: hypothetical protein F13C5.150 - Arabidopsis >gi|2832626|emb|CAA16755.1| hypothetical protein [Arabidopsis >gi|7268692|emb|CAB78900.1| hypothetical protein [Arabidopsis
  misc_feature (27)..(137): Homolog of NCBI NO: 7487830 NR Description: hypothetical protein T8O5.180 - Arabidopsis >gi|2894575|emb|CAA17164.1| putative protein [Arabidopsis
  misc_feature (27)..(137): Homolog of NCBI NO: 15234679 NR Description: hypothetical protein; protein id: At4g21970.1
  misc_feature (47)..(139): Homolog of NCBI NO: 15230636 NR Description: putative protein; protein id: At3g45210.1, by cDNA: gi_15724293, supported by cDNA: gi_20334743 [Arabidopsis
  misc_feature (26)..(139): Homolog of NCBI NO: 30684599 NR Description: expressed protein [Arabidopsis thaliana] unknown protein [Arabidopsis thaliana]
MSEEFDESEIIFSDNYFPIRRREDGNEKENNRPVDFRENSERVWNKSSRRSKTTPLPSAVTAFSSSLPVNIPMRRYSTEEEYSDDDGGRKMIPPHLIVGRRMEGGQMAFSVCTGNGRTLKGRDLSRVRNSVLKLTGFLEA

SEQ ID NO: 83262 - DNA, 1384 bp, Arabidopsis thaliana
  misc_feature (1)..(1384): Ceres Seq. ID no. 12669456
  misc_feature: MA Experiment ID: 20000171 Result: Down-regulated in Transcription
  misc_feature: MA Experiment 20000171 PARAMETER Experiment Name: At_42deg_Heat_P Parameter: Age (day) Value: 14
  misc_feature: MA Experiment 20000171 PARAMETER Experiment Name: At_42deg_Heat_P Parameter: Organism Value: A. thaliana
  misc_feature: MA Experiment 20000171 PARAMETER Experiment Name: At_42deg_Heat_P Parameter: Plant Line Value: WS
  misc_feature: MA Experiment 20000171 PARAMETER Experiment Name: At_42deg_Heat_P Parameter: Temperature (deg C) Value: 42 vs. 22
  misc_feature: MA Experiment 20000171 PARAMETER Experiment Name: At_42deg_Heat_P Parameter: Timepoint (hr) Value: 1
  misc_feature: MA Experiment 20000171 PARAMETER Experiment Name: At_42deg_Heat_P Parameter: Tissue Value: Aerial
  misc_feature: MA Experiment ID: 20000173 Result: Down-regulated in Transcription
  misc_feature: MA Experiment 20000173 PARAMETER Experiment Name: At_42deg_Heat_P Parameter: Age (day) Value: 14
  misc_feature: MA Experiment 20000173 PARAMETER Experiment Name: At_42deg_Heat_P Parameter: Organism Value: A. thaliana
  misc_feature: MA Experiment 20000173 PARAMETER Experiment Name: At_42deg_Heat_P Parameter: Plant Line Value: WS
  misc_feature: MA Experiment 20000173 PARAMETER Experiment Name: At_42deg_Heat_P Parameter: Temperature (deg C) Value: 42 vs. 22
  misc_feature: MA Experiment 20000173 PARAMETER Experiment Name: At_42deg_Heat_P Parameter: Timepoint (hr) Value: 6
  misc_feature: MA Experiment 20000173 PARAMETER Experiment Name: At_42deg_Heat_P Parameter: Tissue Value: Aerial
  misc_feature: MA Experiment ID: 20000184 Result: Down-regulated in Transcription
  misc_feature: MA Experiment 20000184 PARAMETER Experiment Name: At_Shoots__P Parameter: Age (day) Value: 7
  misc_feature: MA Experiment 20000184 PARAMETER Experiment Name: At_Shoots__P Parameter: Tissue Value: Shoots vs. Whole Plant
  misc_feature: MA Experiment ID: 20000264 Result: Down-regulated in Transcription
  misc_feature: MA Experiment 20000264 PARAMETER Experiment Name: At_Open_Flower_P Parameter: Age (day) Value: 21
  misc_feature: MA Experiment 20000264 PARAMETER Experiment Name: At_Open_Flower_P Parameter: Plant Line Value: WS
  misc_feature: MA Experiment 20000264 PARAMETER Experiment Name: At_Open_Flower_P Parameter: Tissue Value: Open Flower vs. Whole Plant
  misc_feature: MA Experiment ID: 20000265 Result: Down-regulated in Transcription
  misc_feature: MA Experiment 20000265 PARAMETER Experiment Name: At_Open_Flower_P Parameter: Age (day) Value: 21
  misc_feature: MA Experiment 20000265 PARAMETER Experiment Name: At_Open_Flower_P Parameter: Plant Line Value: WS
  misc_feature: MA Experiment 20000265 PARAMETER Experiment Name: At_Open_Flower_P Parameter: Tissue Value: Closed Flower vs. Whole Plant
  misc_feature: MA Experiment ID: 20000286 Result: Down-regulated in Transcription
  misc_feature: MA Experiment 20000286 PARAMETER Experiment Name: At_Open_Flower_P Parameter: Age (day) Value: 21
  misc_feature: MA Experiment 20000286 PARAMETER Experiment Name: At_Open_Flower_P Parameter: Plant Line Value: WS
  misc_feature: MA Experiment 20000286 PARAMETER Experiment Name: At_Open_Flower_P Parameter: Tissue Value: Half Open vs. Whole Plant
  misc_feature: MA Experiment ID: 20000437 Result: Down-regulated in Transcription
  misc_feature: MA Experiment 20000437 PARAMETER Experiment Name: At_Drought_P Parameter: Age (day) Value: 8
  misc_feature: MA Experiment 20000437 PARAMETER Experiment Name: At_Drought_P Parameter: Organism Value: A. thaliana
  misc_feature: MA Experiment 20000437 PARAMETER Experiment Name: At_Drought_P Parameter: Plant Line Value: WS
  misc_feature: MA Experiment 20000437 PARAMETER Experiment Name: At_Drought_P Parameter: Timepoint (hr) Value: 24
  misc_feature: MA Experiment 20000437 PARAMETER Experiment Name: At_Drought_P Parameter: Tissue Value: Whole Plant
  misc_feature: MA Experiment 20000437 PARAMETER Experiment Name: At_Drought_P Parameter: Treatment Value: Drought vs. No Drought
  misc_feature: MA Experiment ID: 20000455 Result: Down-regulated in Transcription
  misc_feature: MA Experiment 20000455 PARAMETER Experiment Name: At_100uM_ABA_P Parameter: Age (day) Value: 16
  misc_feature: MA Experiment 20000455 PARAMETER Experiment Name: At_100uM_ABA_P Parameter: Organism Value: A. thaliana
  misc_feature: MA Experiment 20000455 PARAMETER Experiment Name: At_100uM_ABA_P Parameter: Plant Line Value: WS
  misc_feature: MA Experiment 20000455 PARAMETER Experiment Name: At_100uM_ABA_P Parameter: Timepoint (hr) Value: 48
  misc_feature: MA Experiment 20000455 PARAMETER Experiment Name: At_100uM_ABA_P Parameter: Tissue Value: Aerial
  misc_feature: MA Experiment 20000455 PARAMETER Experiment Name: At_100uM_ABA_P Parameter: Treatment Value: 100uM ABA vs. No Treatment
  misc_feature: MA Experiment ID: 20000460 Result: Down-regulated in Transcription
  misc_feature: MA Experiment 20000460 PARAMETER Experiment Name: At_10percent_PEG_P Parameter: Age (day) Value: 12
  misc_feature: MA Experiment 20000460 PARAMETER Experiment Name: At_10percent_PEG_P Parameter: Organism Value: A. thaliana
  misc_feature: MA Experiment 20000460 PARAMETER Experiment Name: At_10percent_PEG_P Parameter: Plant Line Value: WS
  misc_feature: MA Experiment 20000460 PARAMETER Experiment Name: At_10percent_PEG_P Parameter: Timepoint (day) Value: 12
  misc_feature: MA Experiment 20000460 PARAMETER Experiment Name: At_10percent_PEG_P Parameter: Tissue Value: Whole Plant
  misc_feature: MA Experiment 20000460 PARAMETER Experiment Name: At_10percent_PEG_P Parameter: Treatment Value: 10percent PEG vs. No Treatment
  misc_feature: MA Experiment ID: 20000527 Result: Down-regulated in Transcription
  misc_feature: MA Experiment 20000527 PARAMETER Experiment Name: At_10percent_PEG_P Parameter: Age (day) Value: 20
  misc_feature: MA Experiment 20000527 PARAMETER Experiment Name: At_10percent_PEG_P Parameter: Organism Value: A. thaliana
  misc_feature: MA Experiment 20000527 PARAMETER Experiment Name: At_10percent_PEG_P Parameter: Plant Line Value: WS
  misc_feature: MA Experiment 20000527 PARAMETER Experiment Name: At_10percent_PEG_P Parameter: Timepoint (day) Value: 20
  misc_feature: MA Experiment 20000527 PARAMETER Experiment Name: At_10percent_PEG_P Parameter: Tissue Value: Whole Plant
  misc_feature: MA Experiment 20000527 PARAMETER Experiment Name: At_10percent_PEG_P Parameter: Treatment Value: 10percent PEG vs. No Treatment
  misc_feature: MA Experiment ID: 20000573 Result: Down-regulated in Transcription
  misc_feature: MA Experiment 20000573 PARAMETER Experiment Name: At_100uM_ABA_Mutants__P Parameter: Organism Value: A. thaliana
  misc_feature: MA Experiment 20000573 PARAMETER Experiment Name: At_100uM_ABA_Mutants__P Parameter: Plant Line Value: CS22 vs. Ler wt
  misc_feature: MA Experiment 20000573 PARAMETER Experiment Name: At_100uM_ABA_Mutants__P Parameter: Timepoint (hr) Value: N/A
  misc_feature: MA Experiment 20000573 PARAMETER Experiment Name: At_100uM_ABA_Mutants__P Parameter: Tissue Value: Whole Plant
  misc_feature: MA Experiment 20000573 PARAMETER Experiment Name: At_100uM_ABA_Mutants__P Parameter: Treatment Value: None
  misc_feature: MA Experiment ID: 20000574 Result: Down-regulated in Transcription
  misc_feature: MA Experiment 20000574 PARAMETER Experiment Name: At_100uM_ABA_Mutants__P Parameter: Organism Value: A. thaliana
  misc_feature: MA Experiment 20000574 PARAMETER Experiment Name: At_100uM_ABA_Mutants__P Parameter: Plant Line Value: CS23 vs. Ler wt
  misc_feature: MA Experiment 20000574 PARAMETER Experiment Name: At_100uM_ABA_Mutants__P Parameter: Timepoint (hr) Value: N/A
  misc_feature: MA Experiment 20000574 PARAMETER Experiment Name: At_100uM_ABA_Mutants__P Parameter: Tissue Value: Whole Plant
  misc_feature: MA Experiment 20000574 PARAMETER Experiment Name: At_100uM_ABA_Mutants__P Parameter: Treatment Value: None
  misc_feature: MA Experiment ID: 20000709 Result: Down-regulated in Transcription
  misc_feature: MA Experiment 20000709 PARAMETER Experiment Name: At_15mM_NH4NO3_L-to-H_P Parameter: Age (hr) Value: 14
  misc_feature: MA Experiment 20000709 PARAMETER Experiment Name: At_15mM_NH4NO3_L-to-H_P Parameter: Organism Value: A. thaliana
  misc_feature: MA Experiment 20000709 PARAMETER Experiment Name: At_15mM_NH4NO3_L-to-H_P Parameter: Plant Line Value: WS
  misc_feature: MA Experiment 20000709 PARAMETER Experiment Name: At_15mM_NH4NO3_L-to-H_P Parameter: Timepoint (hr) Value: 4
  misc_feature: MA Experiment 20000709 PARAMETER Experiment Name: At_15mM_NH4NO3_L-to-H_P Parameter: Tissue Value: Aerial
  misc_feature: MA Experiment 20000709 PARAMETER Experiment Name: At_15mM_NH4NO3_L-to-H_P Parameter: Treatment Value: 15mM NH4NO3 vs. 30mM Mannitol
  misc_feature: MA Experiment ID: 20001248 Result: Down-regulated in Transcription
  misc_feature: MA Experiment 20001248 PARAMETER Experiment Name: At_Far-red-induction_P Parameter: Age (day) Value: 7
  misc_feature: MA Experiment 20001248 PARAMETER Experiment Name: At_Far-red-induction_P Parameter: Light Value: Far-red vs. White
  misc_feature: MA Experiment 20001248 PARAMETER Experiment Name: At_Far-red-induction_P Parameter: Organism Value: A. thaliana
  misc_feature: MA Experiment 20001248 PARAMETER Experiment Name: At_Far-red-induction_P Parameter: Plant Line Value: Columbia
  misc_feature: MA Experiment 20001248 PARAMETER Experiment Name: At_Far-red-induction_P Parameter: Timepoint (hr) Value: 4
  misc_feature: MA Experiment 20001248 PARAMETER Experiment Name: At_Far-red-induction_P Parameter: Tissue Value: Whole Plant
  misc_feature: MA Experiment ID: 20001450 Result: Down-regulated in Transcription
  misc_feature: MA Experiment 20001450 PARAMETER Experiment Name: At_Far-red-induction_P Parameter: Age (day) Value: 7
  misc_feature: MA Experiment 20001450 PARAMETER Experiment Name: At_Far-red-induction_P Parameter: Light Value: Far-red vs. White
  misc_feature: MA Experiment 20001450 PARAMETER Experiment Name: At_Far-red-induction_P Parameter: Organism Value: A. thaliana
  misc_feature: MA Experiment 20001450 PARAMETER Experiment Name: At_Far-red-induction_P Parameter: Plant Line Value: Columbia
  misc_feature: MA Experiment 20001450 PARAMETER Experiment Name: At_Far-red-induction_P Parameter: Timepoint (hr) Value: 8
  misc_feature: MA Experiment 20001450 PARAMETER Experiment Name: At_Far-red-induction_P Parameter: Tissue Value: Whole Plant
  misc_feature: MA Experiment ID: 20001451 Result: Down-regulated in Transcription
  misc_feature: MA Experiment 20001451 PARAMETER Experiment Name: At_Far-red-induction_P Parameter: Age (day) Value: 7
  misc_feature: MA Experiment 20001451 PARAMETER Experiment Name: At_Far-red-induction_P Parameter: Light Value: Far-red vs. White
  misc_feature: MA Experiment 20001451 PARAMETER Experiment Name: At_Far-red-induction_P Parameter: Organism Value: A. thaliana
  misc_feature: MA Experiment 20001451 PARAMETER Experiment Name: At_Far-red-induction_P Parameter: Plant Line Value: Columbia
  misc_feature: MA Experiment 20001451 PARAMETER Experiment Name: At_Far-red-induction_P Parameter: Timepoint (hr) Value: 24
  misc_feature: MA Experiment 20001451 PARAMETER Experiment Name: At_Far-red-induction_P Parameter: Tissue Value: Whole Plant
  misc_feature: MA Experiment ID: 20001504 Result: Down-regulated in Transcription
  misc_feature: MA Experiment 20001504 PARAMETER Experiment Name: At_Far-red-enriched_P Parameter: Age (day) Value: 10
  misc_feature: MA Experiment 20001504 PARAMETER Experiment Name: At_Far-red-enriched_P Parameter: Light Value: Far-red enriched vs. White
  misc_feature: MA Experiment 20001504 PARAMETER Experiment Name: At_Far-red-enriched_P Parameter: Organism Value: A. thaliana
  misc_feature: MA Experiment 20001504 PARAMETER Experiment Name: At_Far-red-enriched_P Parameter: Plant Line Value: Columbia
  misc_feature: MA Experiment 20001504 PARAMETER Experiment Name: At_Far-red-enriched_P Parameter: Timepoint (day) Value: 6
  misc_feature: MA Experiment 20001504 PARAMETER Experiment Name: At_Far-red-enriched_P Parameter: Tissue Value: Whole Plant
  misc_feature: MA Experiment ID: 20001773 Result: Down-regulated in Transcription
  misc_feature: MA Experiment 20001773 PARAMETER Experiment Name: At_Far-red-enriched-adult_P Parameter: Age (day) Value: 30
  misc_feature: MA Experiment 20001773 PARAMETER Experiment Name: At_Far-red-enriched-adult_P Parameter: Light Value: Far-red enriched vs. White
  misc_feature: MA Experiment 20001773 PARAMETER Experiment Name: At_Far-red-enriched-adult_P Parameter: Organism Value: A. thaliana
  misc_feature: MA Experiment 20001773 PARAMETER Experiment Name: At_Far-red-enriched-adult_P Parameter: Plant Line Value: Columbia
  misc_feature: MA Experiment 20001773 PARAMETER Experiment Name: At_Far-red-enriched-adult_P Parameter: Timepoint (hr) Value: 48
  misc_feature: MA Experiment 20001773 PARAMETER Experiment Name: At_Far-red-enriched-adult_P Parameter: Tissue Value: Aerial
  misc_feature: MA Experiment ID: 20001904 Result: Down-regulated in Transcription
  misc_feature: MA Experiment 20001904 PARAMETER Experiment Name: At_Drought_Reproduction_P Parameter: Age (day) Value: 37
  misc_feature: MA Experiment 20001904 PARAMETER Experiment Name: At_Drought_Reproduction_P Parameter: Organism Value: A. thaliana
  misc_feature: MA Experiment 20001904 PARAMETER Experiment Name: At_Drought_Reproduction_P Parameter: Plant Line Value: WS
  misc_feature: MA Experiment 20001904 PARAMETER Experiment Name: At_Drought_Reproduction_P Parameter: Timepoint (day) Value: 7
  misc_feature: MA Experiment 20001904 PARAMETER Experiment Name: At_Drought_Reproduction_P Parameter: Tissue Value: Rosettes
  misc_feature: MA Experiment 20001904 PARAMETER Experiment Name: At_Drought_Reproduction_P Parameter: Treatment Value: Drought vs. No Drought
  misc_feature: MA Experiment ID: 20001906 Result: Down-regulated in Transcription
  misc_feature: MA Experiment 20001906 PARAMETER Experiment Name: At_Drought_Reproduction_P Parameter: Age (day) Value: 35
  misc_feature: MA Experiment 20001906 PARAMETER Experiment Name: At_Drought_Reproduction_P Parameter: Organism Value: A. thaliana
  misc_feature: MA Experiment 20001906 PARAMETER Experiment Name: At_Drought_Reproduction_P Parameter: Plant Line Value: WS
  misc_feature: MA Experiment 20001906 PARAMETER Experiment Name: At_Drought_Reproduction_P Parameter: Timepoint (day) Value: 5
  misc_feature: MA Experiment 20001906 PARAMETER Experiment Name: At_Drought_Reproduction_P Parameter: Tissue Value: Siliques
  misc_feature: MA Experiment 20001906 PARAMETER Experiment Name: At_Drought_Reproduction_P Parameter: Treatment Value: Drought vs. No Drought
atgtatatatatattttcacttttagtgtctcatttgtagtggagaaaacaaaacatcacattaagtatcccctaattttgggggcttcgggtgccttggtaacaattgttctattggctgtgggaatatatgctcggggaatatacagaagagacaataataggagagaacgagatttgagagcccagggtctacaaactgtttgcttttcttggaggcaactgcaaacagcaacaaacaattttgatcaggccaacaaacttggagaaggaggcttcggatccgtattcaaaggagagctgtcggatggaactatcatagcagtcaagcagctttcttccaagtcaagtcaaggaaaccgcgagtttgtgaatgagataggcatgatttcaggtctgaaccatcctaaccttgtcaagctttatggatgctgtgtcgagagagatcaattgctgctcgtgtatgagtacatggaaaataactcccttgctcttgctttgtttggacaaaactccttgaaattggactgggcagcaagacaaaaaatatgtgttggaatcgcaagagggcttgaattcctccacgatggatcagcgatgagaatggttcaccgtgacataaaaaccactaatgtgcttctagacaccgaccttaatgcaaaaatatctgactttggattagctaggcttcatgaagcagaacacactcacattagcaccaaggttgcaggaaccatcggatatatggctccagaatatgcattatggggtcaactgacagagaaagcagatgtgtacagcttcggagttgtggcaatggaaattgttagtggaaagagtaataccaaacagcagggaaatgctgatagcgtctcgcttatcaattgggcgctgacgctgcaacagacaggggacatactggagattgtagatcgaatgcttgagggtgagttcaatagaagtgaagccgtgaggatgatcaaagttgctctcgtttgcacaaactcatctccttccttaaggccaacaatgtcagaggctgtgaagatgctagagggagagatcgaaataacacaggttatgtcagatcctggtatatatgggcacgactggagcatctcaaagctgagggacattgatacgcatagtagctcgagcacgtctggtgtgaccgatcagacgacaacaacaatgaaatcctctgtttctggttgtgatctctatccgttataccctgaatccatgatcttaaactccacagtagagaattcttcctcgtcactgtaatatcaaaagctatgatacattgcctacttaatgagaggctagtgaggttatccgaaagttaactacgtagttatatcattaaagttgtctggaacct

SEQ ID NO: 83263 - protein, 428 aa, Arabidopsis thaliana
  peptide (1)..(428): Ceres Seq. ID no. 12669457
  misc_feature (14)..(428): Homolog of NCBI NO: 25513647 NR Description: probable receptor-like serine/threonine kinase -
  misc_feature (14)..(424): Homolog of NCBI NO: 9972372 NR Description: Putative receptor-like serine/threonine kinase -
  misc_feature (129)..(428): Homolog of NCBI NO: 30690862 NR Description: protein kinase family [Arabidopsis thaliana] At1g29720/T3M22_6 [Arabidopsis thaliana]
  misc_feature (14)..(418): Homolog of NCBI NO: 25403090 NR Description: probable receptor-like serine/threonine kinase
  misc_feature (14)..(415): Homolog of NCBI NO: 12321409 NR Description: receptor protein kinase, putative [Arabidopsis
  misc_feature (14)..(415): Homolog of NCBI NO: 15220545 NR Description: receptor-like serine/threonine kinase, putative;
  misc_feature (60)..(416): Homolog of NCBI NO: 15220541 NR Description: receptor-like serine threonine kinase, putative; id: At1g29730.1 [Arabidopsis thaliana]
  misc_feature (70)..(416): Homolog of NCBI NO: 25403088 NR Description: probable receptor-like serine/threonine kinase
  misc_feature (25)..(389): Homolog of NCBI NO: 15222473 NR Description: leucine-rich repeat transmembrane protein kinase,
  misc_feature (25)..(389): Homolog of NCBI NO: 25406989 NR Description: hypothetical protein [imported] - Arabidopsis
MYIYIFTFSVSFVVEKTKHHIKYPLILGASGALVTIVLLAVGIYARGIYRRDNNRRERDLRAQGLQTVCFSWRQLQTATNNFDQANKLGEGGFGSVFKGELSDGTIIAVKQLSSKSSQGNREFVNEIGMISGLNHPNLVKLYGCCVERDQLLLVYEYMENNSLALALFGQNSLKLDWAARQKICVGIARGLEFLHDGSAMRMVHRDIKTTNVLLDTDLNAKISDFGLARLHEAEHTHISTKVAGTIGYMAPEYALWGQLTEKADVYSFGVVAMEIVSGKSNTKQQGNADSVSLINWALTLQQTGDILEIVDRMLEGEFNRSEAVRMIKVALVCTNSSPSLRPTMSEAVKMLEGEIEITQVMSDPGIYGHDWSISKLRDIDTHSSSSTSGVTDQTTTTMKSSVSGCDLYPLYPESMILNSTVENSSSSL

SEQ ID NO: 83264 - protein, 300 aa, Arabidopsis thaliana
  peptide (1)..(300): Ceres Seq. ID no. 12669458
  misc_feature (1)..(300): Homolog of NCBI NO: 25513647 NR Description: probable receptor-like serine/threonine kinase -
  misc_feature (1)..(296): Homolog of NCBI NO: 9972372 NR Description: Putative receptor-like serine/threonine kinase -
  misc_feature (1)..(300): Homolog of NCBI NO: 30690862 NR Description: protein kinase family [Arabidopsis thaliana] At1g29720/T3M22_6 [Arabidopsis thaliana]
  misc_feature (1)..(290): Homolog of NCBI NO: 25403090 NR Description: probable receptor-like serine/threonine kinase
  misc_feature (1)..(287): Homolog of NCBI NO: 12321409 NR Description: receptor protein kinase, putative [Arabidopsis
  misc_feature (1)..(287): Homolog of NCBI NO: 15220545 NR Description: receptor-like serine/threonine kinase, putative;
  misc_feature (1)..(288): Homolog of NCBI NO: 15220541 NR Description: receptor-like serine threonine kinase, putative; id: At1g29730.1 [Arabidopsis thaliana]
  misc_feature (1)..(288): Homolog of NCBI NO: 25403088 NR Description: probable receptor-like serine/threonine kinase
  misc_feature (1)..(261): Homolog of NCBI NO: 15222473 NR Description: leucine-rich repeat transmembrane protein kinase,
  misc_feature (1)..(261): Homolog of NCBI NO: 25406989 NR Description: hypothetical protein [imported] - Arabidopsis
MISGLNHPNLVKLYGCCVERDQLLLVYEYMENNSLALALFGQNSLKLDWAARQKICVGIARGLEFLHDGSAMRMVHRDIKTTNVLLDTDLNAKISDFGLARLHEAEHTHISTKVAGTIGYMAPEYALWGQLTEKADVYSFGVVAMEIVSGKSNTKQQGNADSVSLINWALTLQQTGDILEIVDRMLEGEFNRSEAVRMIKVALVCTNSSPSLRPTMSEAVKMLEGEIEITQVMSDPGIYGHDWSISKLRDIDTHSSSSTSGVTDQTTTTMKSSVSGCDLYPLYPESMILNSTVENSSSSL

SEQ ID NO: 83265 - protein, 271 aa, Arabidopsis thaliana
  peptide (1)..(271): Ceres Seq. ID no. 12669459
  misc_feature (1)..(271): Homolog of NCBI NO: 25513647 NR Description: probable receptor-like serine/threonine kinase -
  misc_feature (1)..(267): Homolog of NCBI NO: 9972372 NR Description: Putative receptor-like serine/threonine kinase -
  misc_feature (1)..(271): Homolog of NCBI NO: 30690862 NR Description: protein kinase family [Arabidopsis thaliana] At1g29720/T3M22_6 [Arabidopsis thaliana]
  misc_feature (1)..(261): Homolog of NCBI NO: 25403090 NR Description: probable receptor-like serine/threonine kinase
  misc_feature (1)..(258): Homolog of NCBI NO: 12321409 NR Description: receptor protein kinase, putative [Arabidopsis
  misc_feature (1)..(258): Homolog of NCBI NO: 15220545 NR Description: receptor-like serine/threonine kinase, putative;
  misc_feature (1)..(259): Homolog of NCBI NO: 15220541 NR Description: receptor-like serine threonine kinase, putative; id: At1g29730.1 [Arabidopsis thaliana]
  misc_feature (1)..(259): Homolog of NCBI NO: 25403088 NR Description: probable receptor-like serine/threonine kinase
  misc_feature (1)..(232): Homolog of NCBI NO: 15222473 NR Description: leucine-rich repeat transmembrane protein kinase,
  misc_feature (1)..(232): Homolog of NCBI NO: 25406989 NR Description: hypothetical protein [imported] - Arabidopsis
MENNSLALALFGQNSLKLDWAARQKICVGIARGLEFLHDGSAMRMVHRDIKTTNVLLDTDLNAKISDFGLARLHEAEHTHISTKVAGTIGYMAPEYALWGQLTEKADVYSFGVVAMEIVSGKSNTKQQGNADSVSLINWALTLQQTGDILEIVDRMLEGEFNRSEAVRMIKVALVCTNSSPSLRPTMSEAVKMLEGEIEITQVMSDPGIYGHDWSISKLRDIDTHSSSSTSGVTDQTTTTMKSSVSGCDLYPLYPESMILNSTVENSSSSL

SEQ ID NO: 83266 - DNA, 3646 bp, Arabidopsis thaliana
  misc_feature (1)..(3646): Ceres Seq. ID no. 12669464
  misc_feature: MA Experiment ID: 20000180 Result: Up-regulated in Transcription
  misc_feature: MA Experiment 20000180 PARAMETER Experiment Name: At_Germinating_Seeds_P Parameter: Age (hr) Value: 24 vs. 0
  misc_feature: MA Experiment 20000180 PARAMETER Experiment Name: At_Germinating_Seeds_P Parameter: Tissue Value: Germinating Seeds
  misc_feature: MA Experiment ID: 20000495 Result: Up-regulated in Transcription
  misc_feature: MA Experiment 20000495 PARAMETER Experiment Name: At_Guard_Cells_P Parameter: Harvest Date Value: 8/2/2002
  misc_feature: MA Experiment 20000495 PARAMETER Experiment Name: At_Guard_Cells_P Parameter: Organism Value: A. thaliana
  misc_feature: MA Experiment 20000495 PARAMETER Experiment Name: At_Guard_Cells_P Parameter: Tissue Value: Guard Cells vs. Leaves
  misc_feature: MA Experiment ID: 20000794 Result: Up-regulated in Transcription
  misc_feature: MA Experiment 20000794 PARAMETER Experiment Name: At_Petals_P Parameter: Age (day) Value: 23-25 days
  misc_feature: MA Experiment 20000794 PARAMETER Experiment Name: At_Petals_P Parameter: Plant Line Value: WS
  misc_feature: MA Experiment 20000794 PARAMETER Experiment Name: At_Petals_P Parameter: Tissue Value: Petals vs. Whole plant
  misc_feature: MA Experiment ID: 20001905 Result: Up-regulated in Transcription
  misc_feature: MA Experiment 20001905 PARAMETER Experiment Name: At_Drought_Reproduction_P Parameter: Age (day) Value: 40
  misc_feature: MA Experiment 20001905 PARAMETER Experiment Name: At_Drought_Reproduction_P Parameter: Organism Value: A. thaliana
  misc_feature: MA Experiment 20001905 PARAMETER Experiment Name: At_Drought_Reproduction_P Parameter: Plant Line Value: WS
  misc_feature: MA Experiment 20001905 PARAMETER Experiment Name: At_Drought_Reproduction_P Parameter: Timepoint (day) Value: 10
  misc_feature: MA Experiment 20001905 PARAMETER Experiment Name: At_Drought_Reproduction_P Parameter: Tissue Value: Rosettes
  misc_feature: MA Experiment 20001905 PARAMETER Experiment Name: At_Drought_Reproduction_P Parameter: Treatment Value: Drought vs. No Drought
gggtttacagattctatgcaaagtttgctcctttttctcattttatttgtaaagtttccttttttgggttttcattatctgttggaaatgggatttcatgattggtagccgcaacaattccggtgacgttggggtttttcatttttttaattgaagttttttgagtccaaaatctgcaggtgttaattgggtgtgattaggtccattagggtttattaaatcattttttgattgattatggtttgaatccccttgaccattgagttaccttgagaaagaacttgtcatatttttgtattaaactcttcattaggccttctttcacatgatgatgatgatgatgaattgatgatcctataaactgttgaagcaatcattcatattttgttgtggttgatgaagagttctagataaattgtttatcctgctttagtttgatgattgttaaggccaagaagagtgtaattcttgttgttgctcaagtaattgaactgatattttatgatgtttgcttctgtgtctgttccttagtcgatgctctgcagcaaatcgctaccacattgggctcgaaattctggaaattcgatgctgaaaattgtaagattgaaatggtggggttaactgaaactcctcctccaacagctaagcaagaaatagaatgtgaatgcagtcccactaacgacactgattgtcatgttgtcaaatttgcattcaaggaccataatcttccaggaactcttcctcaaatagtcaagcttccctaccttcgggagatagacttggcctacaactacatcaatgggaccttacctcgtgaatgggcttcttcaaatttaacttttatttctcttcttgtgaatcggttgtctggagaaattccgaaggagtttggaaactcttctctaacatacttggatctcgagtcaaatgcgttttctggaactattcctcaggagcttgggaacttagtccacttgaaaaaactgttgctttcctctaacaaattgaccggaactttgccagcttcactagctagactacagaatatgacagatttcaggattaacgatcttcaactcagtggaacgatacctagttacatacaaaattggaagcaactcgagagacttgaaatgattgcatctggtctcactggtccaatcccatcggtcatctcagttctgagcaatcttgttaatctgaggatcagtgatatacgtggaccagtccaaccattcccttcgttgaagaacgtgacaggtctaactaaaattatattgaagaactgtaacatttctggacaaattcctacttatctttcacatttgaaggagttggagacactggatttgagttttaacaagttggttgggggaattccgtcgcttgcacaagcagaaaatttacggcttataattttggctggaaatatgctcgagggagatgctccagatgaattactaagagatggaatcacagaagatctttcatataacaatctcaagtggcagagtcctgaaagtcgtgcttgtcgcccaaatatgaatctgaatctaaacttgtttcagagcacttcgacaaaaaaatcgagcaaatttctgccgtgtatcaaagatttcaaatgtcctcgatattctagctgcttgcatgtgaactgcggtggaagcgatatgtatgttaaggagaaaaaaacaaaagaattatatgaaggagatggaaatgttgaaggtggtgctgctaagtattttttgaagcctgacgctaattggggatttagcagcacaggggacttcatggacgataacaatttccaaaacactagattcaccatgtttgtcccggcatctaaccagtctgatctctacaaatcggcacgaattgctccagtatctctaacttacttccatgcctgcttggaaaatggaaattacactataaatctagacttcgctgagatacggttcaccaatgatgaaaactataaccggcttggaaggcgtctgtttgacatttacattcaggagaaattagtggcaaaggactttaacatcatggatgaagcaaagggagctcaaacacctataatcaaaccacttactgcctatgtgacaaaccactttttaaccatccggttgagttgggccggtaaaggaactaccaggattcccactagaggggtttatggtcctatcatatcggctatttccatagtttcagattccaagccgtgcgaacgtccgaaaactggaatgagccctggagcatatattgcaattggaattggagcaccatgtcttattatctttatactgggatttctgtggatatgtggctgcctcccaagatgtggtcgacaacgaaaagatccgtatgaagaagagttgccttctggaacttttacattgaggcaaatcaaattcgctacggatgacttcaatccaactaacaagattggagaaggtggtttcggtgctgtctttaagggtgtgttagcagatggaagagttgtagcagttaagcaactctcatctaaatcgagacaagggaaccgagaatttctaaacgagataggcgcaatttcttgtcttcaacatccaaatctcgtcaagcttcatggtttctgcgtcgagcgggctcagctattactggcgtacgaatacatggaaaataacagtttatctagcgcgttattcagtccaaagcataaacagataccaatggactggcctactaggtttaagatttgctgcgggatcgcaaagggtctcgcgtttctccatgaggaatcaccgttgaagtttgtacatagagacatcaaggccacaaatattttattggacaaggacttaactcccaagatatctgatttcggattggctaggcttgacgaagaggagaaaacacacatcagcaccaaagttgctgggactataggatatatggcaccagaatacgcactgtggggctacctaactttcaaagcagatgtctacagcttcggtgttttggttctagaaatcgtcgccggcataaccaacagtaatttcatgggggcaggagattccgtttgcctcttagaatttgctaacgagtgcgtagaatcggggcacttgatgcaagtagtggatgagaggttgaggcctgaagtggatagaaaagaagcagaggcggttataaaagtggctctcgtgtgctcgagcgcttctccaacagatcgtcctttaatgtcagaggtcgttgctatgctagaaggtctatatccagtgccagaatcaacaccaggagtaagcaggaacgcaggggatataaggtttaaggcatttaaagatttaaggagaggcatggagaacaatagtaagacgcagtgttctgttaaaagctatccgtcttcttcttcgacttcttctggggcaggacaagcagttcaagaaagaaagaaagaagagtcaaggccttgaagaggttttgaatccttccctctcttttttttttttttgtaaaatgtctgtctttagtaaaatgtttatgagtttattctgtgattagtcatttactgtaattccccatatctgtatttaggttctgttagttggggattgaatgttgtgaaaactcaaaactcaaatgatatataatcagtgatctt

SEQ ID NO: 83267 - protein, 1006 aa, Arabidopsis thaliana
  peptide (1)..(1006): Ceres Seq. ID no. 12669465
  misc_feature (666)..(864): Pfam Name: Protein kinase domain Pfam Description: Protein kinase domain
  misc_feature (444)..(950): Homolog of NCBI NO: 25513647 NR Description: probable receptor-like serine/threonine kinase -
  misc_feature (26)..(336): Homolog of NCBI NO: 25513647 NR Description: probable receptor-like serine/threonine kinase -
  misc_feature (6)..(987): Homolog of NCBI NO: 15220790 NR Description: receptor-like serine/threonine kinase, putative;
  misc_feature (1)..(596): Homolog of NCBI NO: 25403088 NR Description: probable receptor-like serine/threonine kinase
  misc_feature (651)..(960): Homolog of NCBI NO: 25403088 NR Description: probable receptor-like serine/threonine kinase
  misc_feature (32)..(991): Homolog of NCBI NO: 15220789 NR Description: receptor-like serine/threonine kinase, putative;
  misc_feature (107)..(950): Homolog of NCBI NO: 9972372 NR Description: Putative receptor-like serine/threonine kinase -
  misc_feature (132)..(960): Homolog of NCBI NO: 12321409 NR Description: receptor protein kinase, putative [Arabidopsis
  misc_feature (132)..(960): Homolog of NCBI NO: 15220545 NR Description: receptor-like serine/threonine kinase, putative;
  misc_feature (176)..(991): Homolog of NCBI NO: 25405628 NR Description: hypothetical protein T3F20.25 [imported] -
MIVKAKKSVILVVAQVIELIFYDVCFCVCSLVDALQQIATTLGSKFWKFDAENCKIEMVGLTETPPPTAKQEIECECSPTNDTDCHVVKFAFKDHNLPGTLPQIVKLPYLREIDLAYNYINGTLPREWASSNLTFISLLVNRLSGEIPKEFGNSSLTYLDLESNAFSGTIPQELGNLVHLKKLLLSSNKLTGTLPASLARLQNMTDFRINDLQLSGTIPSYIQNWKQLERLEMIASGLTGPIPSVISVLSNLVNLRISDIRGPVQPFPSLKNVTGLTKIILKNCNISGQIPTYLSHLKELETLDLSFNKLVGGIPSLAQAENLRLIILAGNMLEGDAPDELLRDGITEDLSYNNLKWQSPESRACRPNMNLNLNLFQSTSTKKSSKFLPCIKDFKCPRYSSCLHVNCGGSDMYVKEKKTKELYEGDGNVEGGAAKYFLKPDANWGFSSTGDFMDDNNFQNTRFTMFVPASNQSDLYKSARIAPVSLTYFHACLENGNYTINLDFAEIRFTNDENYNRLGRRLFDIYIQEKLVAKDFNIMDEAKGAQTPIIKPLTAYVTNHFLTIRLSWAGKGTTRIPTRGVYGPIISAISIVSDSKPCERPKTGMSPGAYIAIGIGAPCLIIFILGFLWICGCLPRCGRQRKDPYEEELPSGTFTLRQIKFATDDFNPTNKIGEGGFGAVFKGVLADGRVVAVKQLSSKSRQGNREFLNEIGAISCLQHPNLVKLHGFCVERAQLLLAYEYMENNSLSSALFSPKHKQIPMDWPTRFKICCGIAKGLAFLHEESPLKFVHRDIKATNILLDKDLTPKISDFGLARLDEEEKTHISTKVAGTIGYMAPEYALWGYLTFKADVYSFGVLVLEIVAGITNSNFMGAGDSVCLLEFANECVESGHLMQVVDERLRPEVDRKEAEAVIKVALVCSSASPTDRPLMSEVVAMLEGLYPVPESTPGVSRNAGDIRFKAFKDLRRGMENNSKTQCSVKSYPSSSSTSSGAGQAVQERKKEESRP

SEQ ID NO: 83268 - protein, 949 aa, Arabidopsis thaliana; identical to SEQ ID NO: 49856
  peptide (1)..(949): Ceres Seq. ID no. 12669466
  misc_feature (609)..(807): Pfam Name: Protein kinase domain Pfam Description: Protein kinase domain
  misc_feature (387)..(893): Homolog of NCBI NO: 25513647 NR Description: probable receptor-like serine/threonine kinase -
  misc_feature (1)..(279): Homolog of NCBI NO: 25513647 NR Description: probable receptor-like serine/threonine kinase -
  misc_feature (1)..(930): Homolog of NCBI NO: 15220790 NR Description: receptor-like serine/threonine kinase, putative;
  misc_feature (1)..(539): Homolog of NCBI NO: 25403088 NR Description: probable receptor-like serine/threonine kinase
  misc_feature (594)..(903): Homolog of NCBI NO: 25403088 NR Description: probable receptor-like serine/threonine kinase
  misc_feature (1)..(934): Homolog of NCBI NO: 15220789 NR Description: receptor-like serine/threonine kinase, putative;
  misc_feature (50)..(893): Homolog of NCBI NO: 9972372 NR Description: Putative receptor-like serine/threonine kinase -
  misc_feature (75)..(903): Homolog of NCBI NO: 12321409 NR Description: receptor protein kinase, putative [Arabidopsis
  misc_feature (75)..(903): Homolog of NCBI NO: 15220545 NR Description: receptor-like serine/threonine kinase, putative;
  misc_feature (119)..(934): Homolog of NCBI NO: 25405628 NR Description: hypothetical protein T3F20.25 [imported] -

SEQ ID NO: 83269 - protein, 803 aa, Arabidopsis thaliana; identical to SEQ ID NO: 49857
  peptide (1)..(803): Ceres Seq. ID no. 12669467
  misc_feature (463)..(661): Pfam Name: Protein kinase domain Pfam Description: Protein kinase domain
  misc_feature (241)..(747): Homolog of NCBI NO: 25513647 NR Description: probable receptor-like serine/threonine kinase -
  misc_feature (1)..(133): Homolog of NCBI NO: 25513647 NR Description: probable receptor-like serine/threonine kinase -
  misc_feature (1)..(784): Homolog of NCBI NO: 15220790 NR Description: receptor-like serine/threonine kinase, putative;
  misc_feature (1)..(393): Homolog of NCBI NO: 25403088 NR Description: probable receptor-like serine/threonine kinase
  misc_feature (448)..(757): Homolog of NCBI NO: 25403088 NR Description: probable receptor-like serine/threonine kinase
  misc_feature (1)..(788): Homolog of NCBI NO: 15220789 NR Description: receptor-like serine/threonine kinase, putative;
  misc_feature (1)..(747): Homolog of NCBI NO: 9972372 NR Description: Putative receptor-like serine/threonine kinase -
  misc_feature (1)..(757): Homolog of NCBI NO: 12321409 NR Description: receptor protein kinase, putative [Arabidopsis
  misc_feature (1)..(757): Homolog of NCBI NO: 15220545 NR Description: receptor-like serine/threonine kinase, putative;
  misc_feature (1)..(788): Homolog of NCBI NO: 25405628 NR Description: hypothetical protein T3F20.25 [imported] -

SEQ ID NO: 83270 - DNA, 792 bp, Arabidopsis thaliana
  misc_feature (1)..(792): Ceres Seq. ID no. 12669480
  misc_feature: MA Experiment ID: 20000315 Result: Down-regulated in Transcription
  misc_feature: MA Experiment 20000315 PARAMETER Experiment Name: At_14day_Shoots-Roots_Sub_P Parameter: Age (day) Value: 14
  misc_feature: MA Experiment 20000315 PARAMETER Experiment Name: At_14day_Shoots-Roots_Sub_P Parameter: Organism Value: A. thaliana
  misc_feature: MA Experiment 20000315 PARAMETER Experiment Name: At_14day_Shoots-Roots_Sub_P Parameter: Plant Line Value: WS
  misc_feature: MA Experiment 20000315 PARAMETER Experiment Name: At_14day_Shoots-Roots_Sub_P Parameter: Tissue Value: Shoots vs. Whole Plant
  misc_feature: MA Experiment ID: 20000328 Result: Down-regulated in Transcription
  misc_feature: MA Experiment 20000328 PARAMETER Experiment Name: At_42deg_Heat_Sub_P Parameter: Age (day) Value: 14
  misc_feature: MA Experiment 20000328 PARAMETER Experiment Name: At_42deg_Heat_Sub_P Parameter: Organism Value: A. thaliana
  misc_feature: MA Experiment 20000328 PARAMETER Experiment Name: At_42deg_Heat_Sub_P Parameter: Plant Line Value: WS
  misc_feature: MA Experiment 20000328 PARAMETER Experiment Name: At_42deg_Heat_Sub_P Parameter: Temperature (deg C) Value: 42 vs. 22
  misc_feature: MA Experiment 20000328 PARAMETER Experiment Name: At_42deg_Heat_Sub_P Parameter: Timepoint (hr) Value: 6
  misc_feature: MA Experiment 20000328 PARAMETER Experiment Name: At_42deg_Heat_Sub_P Parameter: Tissue Value: Aerial
  misc_feature: MA Experiment ID: 20000440 Result: Up-regulated in Transcription
  misc_feature: MA Experiment 20000440 PARAMETER Experiment Name: At_Closed-Flower__Sub_P Parameter: Tissue Value: Closed Flower vs. Whole Plant
atggattcgtctcagggaatttcagctactacacaacagaagatagtgattctgaatagcaacaacgagaagctagtgggtctgcttcatgaaactggttcaacagaaattgtggtcttgtgccatggctttcgatcaaccaagaatgaccaagtcatgaaaaatgttgctgctgctatagagaaagaagggatcagcgctttccgttttgatttctctgggaacggagagagtaaaggcagtttctattttggtaactacaactatgaagctgatgatctacattctgttatccgatacttcactaacatgaaccgtgtggttcctataattattggccacagtaaaggtggtgatgtggtcctcgtctatgcctcgaagtatcaagatattcgcaatgtaatcaatctctcgggacgttatgatctgaagagaggcataggagagcgtcttggggaagattatttggaaagaataaagcaacaaggattcatcgatattaaagaaggaaacgctgggtttcgtgttaccgaggagagcttaatggaaaggttaaacactgatatgcatgaagcttgcctcaagattgacaaagaatgcagggtcttgacggttcatggctcggctgacgaggtaatacccctggaagatgccaaggagtttgcaaagatcataccgaaccacaagctggagattgtggaaggagctgatcattgttataccaaacatcaaagtcaattaattacaaatgttatggagttcataaagacagtcattgtgaagaacaactag

SEQ ID NO: 83271 - protein, 263 aa, Arabidopsis thaliana
  peptide (1)..(263): Ceres Seq. ID no. 12669481
  misc_feature (1)..(263): Homolog of NCBI NO: 15220578 NR Description: hypothetical protein; protein id: At1g29840.1
  misc_feature (1)..(263): Homolog of NCBI NO: 15232826 NR Description: putative protein; protein id: At3g47560.1, by cDNA: 262295. [Arabidopsis thaliana] >gi|11281956|pir||T45716
  misc_feature (1)..(257): Homolog of NCBI NO: 21554728 NR Description: putative esterase [Arabidopsis thaliana]
  misc_feature (1)..(263): Homolog of NCBI NO: 22135864 NR Description: putative protein [Arabidopsis thaliana]
  misc_feature (1)..(263): Homolog of NCBI NO: 15228202 NR Description: putative protein; protein id: At3g47590.1
  misc_feature (14)..(263): Homolog of NCBI NO: 15224799 NR Description: putative esterase; protein id: At2g19550.1
  misc_feature (3)..(255): Homolog of NCBI NO: 34913064 NR Description: P0013G02.24 [Oryza sativa (japonica
  misc_feature (9)..(255): Homolog of NCBI NO: 34913068 NR Description: P0013G02.26 [Oryza sativa (japonica
  misc_feature (6)..(256): Homolog of NCBI NO: 11358640 NR Description: probable esterase-like protein - Arabidopsis
  misc_feature (8)..(256): Homolog of NCBI NO: 18416707 NR Description: putative esterase - like protein; protein id:
MDSSQGISATTQQKIVILNSNNEKLVGLLHETGSTEIVVLCHGFRSTKNDQVMKNVAAAIEKEGISAFRFDFSGNGESKGSFYFGNYNYEADDLHSVIRYFTNMNRVVPIIIGHSKGGDVVLVYASKYQDIRNVINLSGRYDLKRGIGERLGEDYLERIKQQGFIDIKEGNAGFRVTEESLMERLNTDMHEACLKIDKECRVLTVHGSADEVIPLEDAKEFAKIIPNHKLEIVEGADHCYTKHQSQLITNVMEFIKTVIVKNN

SEQ ID NO: 83272 - protein, 211 aa, Arabidopsis thaliana
  peptide (1)..(211): Ceres Seq. ID no. 12669482
  misc_feature (1)..(211): Homolog of NCBI NO: 15220578 NR Description: hypothetical protein; protein id: At1g29840.1
  misc_feature (1)..(211): Homolog of NCBI NO: 15232826 NR Description: putative protein; protein id: At3g47560.1, by cDNA: 262295. [Arabidopsis thaliana] >gi|11281956|pir||T45716
  misc_feature (1)..(205): Homolog of NCBI NO: 21554728 NR Description: putative esterase [Arabidopsis thaliana]
  misc_feature (1)..(211): Homolog of NCBI NO: 22135864 NR Description: putative protein [Arabidopsis thaliana]
  misc_feature (1)..(211): Homolog of NCBI NO: 15228202 NR Description: putative protein; protein id: At3g47590.1
  misc_feature (1)..(211): Homolog of NCBI NO: 15224799 NR Description: putative esterase; protein id: At2g19550.1
  misc_feature (1)..(203): Homolog of NCBI NO: 34913064 NR Description: P0013G02.24 [Oryza sativa (japonica
  misc_feature (1)..(203): Homolog of NCBI NO: 34913068 NR Description: P0013G02.26 [Oryza sativa (japonica
  misc_feature (1)..(204): Homolog of NCBI NO: 11358640 NR Description: probable esterase-like protein - Arabidopsis
  misc_feature (1)..(204): Homolog of NCBI NO: 18416707 NR Description: putative esterase - like protein; protein id:
MKNVAAAIEKEGISAFRFDFSGNGESKGSFYFGNYNYEADDLHSVIRYFTNMNRVVPIIIGHSKGGDVVLVYASKYQDIRNVINLSGRYDLKRGIGERLGEDYLERIKQQGFIDIKEGNAGFRVTEESLMERLNTDMHEACLKIDKECRVLTVHGSADEVIPLEDAKEFAKIIPNHKLEIVEGADHCYTKHQSQLITNVMEFIKTVIVKNN

SEQ ID NO: 83273 - protein, 160 aa, Arabidopsis thaliana
  peptide (1)..(160): Ceres Seq. ID no. 12669483
  misc_feature (1)..(160): Homolog of NCBI NO: 15220578 NR Description: hypothetical protein; protein id: At1g29840.1
  misc_feature (1)..(160): Homolog of NCBI NO: 15232826 NR Description: putative protein; protein id: At3g47560.1, by cDNA: 262295. [Arabidopsis thaliana] >gi|11281956|pir||T45716
  misc_feature (1)..(154): Homolog of NCBI NO: 21554728 NR Description: putative esterase [Arabidopsis thaliana]
  misc_feature (1)..(160): Homolog of NCBI NO: 22135864 NR Description: putative protein [Arabidopsis thaliana]
  misc_feature (1)..(160): Homolog of NCBI NO: 15228202 NR Description: putative protein; protein id: At3g47590.1
  misc_feature (1)..(160): Homolog of NCBI NO: 15224799 NR Description: putative esterase; protein id: At2g19550.1
  misc_feature (1)..(152): Homolog of NCBI NO: 34913064 NR Description: P0013G02.24 [Oryza sativa (japonica
  misc_feature (1)..(152): Homolog of NCBI NO: 34913068 NR Description: P0013G02.26 [Oryza sativa (japonica
  misc_feature (1)..(153): Homolog of NCBI NO: 11358640 NR Description: probable esterase-like protein - Arabidopsis
  misc_feature (1)..(153): Homolog of NCBI NO: 18416707 NR Description: putative esterase - like protein; protein id:
MNRVVPIIIGHSKGGDVVLVYASKYQDIRNVINLSGRYDLKRGIGERLGEDYLERIKQQGFIDIKEGNAGFRVTEESLMERLNTDMHEACLKIDKECRVLTVHGSADEVIPLEDAKEFAKIIPNHKLEIVEGADHCYTKHQSQLITNVMEFIKTVIVKNN

SEQ ID NO: 83274 - DNA, 933 bp, Arabidopsis thaliana
  misc_feature (1)..(933): Ceres Seq. ID no. 12669508
  misc_feature: MA Experiment ID: 20000355 Result: Up-regulated in Transcription
  misc_feature: MA Experiment 20000355 PARAMETER Experiment Name: At_Siliques_Sub_P Parameter: Age (day) Value: 21
  misc_feature: MA Experiment 20000355 PARAMETER Experiment Name: At_Siliques_Sub_P Parameter: Organism Value: A. thaliana
  misc_feature: MA Experiment 20000355 PARAMETER Experiment Name: At_Siliques_Sub_P Parameter: Plant Line Value: WS
  misc_feature: MA Experiment 20000355 PARAMETER Experiment Name: At_Siliques_Sub_P Parameter: Tissue Value: Less Than 5mm Siliques vs. Whole Plant
atggcgactccgtcgtcgtctttctggaacacagcttcacgagaagccatgaaaagcggcgtgttactcgcgaaactctactgctttcttcatgtaacaacaaactatctcggattcatggcttatgcttatggtccgagcatgactccgacgcttcatccttcgggaaatgtgttattagcggagagaatctcgaagcggtatcagaaaccgagtcgtggagatatagttgtgatacgatctccagaaaaccctaataagactccaattaaaagagttattggtattgaaggtgattgtataagctttgtgattgattcaaggaagagtgatgaatctcaaaccattgtggttcctaaaggacatgtctttgttcaaggtgactatactcataactcacgagactcaagaaactttggtactgtaccttacggtcttattcaaggcagagtgctttggaggcgtcgaaatggtatctacactaaactcagtgagctttccattctctgtggtgctgaagttgcgtttctcgggtattcttgctctggaaaaccatacacattcggcagtccgtccttccaagccgtggcagagcggtttctcaacggcgaggcctcgtcgtcttcttcatcatcgttgcaacgatcggtcatgaatgctcatcagcaagcgaagattcaagagctttgcaaagtatacaatagattggtggaggagataacggtggaagaagtcaaattaaagaagacggctgcattggcggagatgatgcccatgaatgaggatgcgtggtggaaagtggatccaaatgacgtgaaggatcgcgaagaggtgaagaagatgatggagaagcatcaagagctctatgagaaactgtgcgaggaagctgcttcaaggatcaagagaggacatgatgagaataataacaaatga

SEQ ID NO: 83275 - protein, 310 aa, Arabidopsis thaliana
  peptide (1)..(310): Ceres Seq. ID no. 12669509
  misc_feature (13)..(118): Pfam Name: Signal peptidase I Pfam Description: Signal peptidase I
  misc_feature (1)..(310): Homolog of NCBI NO: 15220621 NR Description: hypothetical protein; protein id: At1g29960.1
  misc_feature (152)..(310): Homolog of NCBI NO: 32402452 NR Description: MADS-box protein AGL64 [Arabidopsis thaliana]
  misc_feature (1)..(230): Homolog of NCBI NO: 22329754 NR Description: polygalacturonase, putative; protein id:
  misc_feature (1)..(204): Homolog of NCBI NO: 25518432 NR Description: hypothetical protein F5O8.3 - Arabidopsis >gi|4056468|gb|AAC98041.1| Contains similarity to gb|X66426 from Persea americana and is a member of the signal peptidase
  misc_feature (1)..(230): Homolog of NCBI NO: 8778577 NR Description: F28C11.10 [Arabidopsis thaliana]
  misc_feature (154)..(310): Homolog of NCBI NO: 15218684 NR Description: MADS-box protein; protein id: At1g28460.1
  misc_feature (152)..(310): Homolog of NCBI NO: 15218663 NR Description: MADS-box protein; protein id: At1g28450.1 thaliana] >gi|6560765|gb|AAF16765.1|AC010155_18 F3M18.11
  misc_feature (164)..(310): Homolog of NCBI NO: 15221890 NR Description: MADS-box protein; protein id: At1g54760.1
  misc_feature (9)..(154): Homolog of NCBI NO: 30695525 NR Description: expressed protein [Arabidopsis thaliana]
  misc_feature (9)..(154): Homolog of NCBI NO: 22208508 NR Description: unknown protein [Sorghum bicolor]
MATPSSSFWNTASREAMKSGVLLAKLYCFLHVTTNYLGFMAYAYGPSMTPTLHPSGNVLLAERISKRYQKPSRGDIVVIRSPENPNKTPIKRVIGIEGDCISFVIDSRKSDESQTIVVPKGHVFVQGDYTHNSRDSRNFGTVPYGLIQGRVLWRRRNGIYTKLSELSILCGAEVAFLGYSCSGKPYTFGSPSFQAVAERFLNGEASSSSSSSLQRSVMNAHQQAKIQELCKVYNRLVEEITVEEVKLKKTAALAEMMPMNEDAWWKVDPNDVKDREEVKKMMEKHQELYEKLCEEAASRIKRGHDENNNK

SEQ ID NO: 83276 - protein, 294 aa, Arabidopsis thaliana
  peptide (1)..(294): Ceres Seq. ID no. 12669510
  misc_feature (1)..(102): Pfam Name: Signal peptidase I Pfam Description: Signal peptidase I
  misc_feature (1)..(294): Homolog of NCBI NO: 15220621 NR Description: hypothetical protein; protein id: At1g29960.1
  misc_feature (136)..(294): Homolog of NCBI NO: 32402452 NR Description: MADS-box protein AGL64 [Arabidopsis thaliana]
  misc_feature (1)..(214): Homolog of NCBI NO: 22329754 NR Description: polygalacturonase, putative; protein id:
  misc_feature (1)..(188): Homolog of NCBI NO: 25518432 NR Description: hypothetical protein F5O8.3 - Arabidopsis >gi|4056468|gb|AAC98041.1| Contains similarity to gb|X66426 from Persea americana and is a member of the signal peptidase
  misc_feature (1)..(214): Homolog of NCBI NO: 8778577 NR Description: F28C11.10 [Arabidopsis thaliana]
  misc_feature (138)..(294): Homolog of NCBI NO: 15218684 NR Description: MADS-box protein; protein id: At1g28460.1
  misc_feature (136)..(294): Homolog of NCBI NO: 15218663 NR Description: MADS-box protein; protein id: At1g28450.1 thaliana] >gi|6560765|gb|AAF16765.1|AC010155_18 F3M18.11
  misc_feature (148)..(294): Homolog of NCBI NO: 15221890 NR Description: MADS-box protein; protein id: At1g54760.1
  misc_feature (1)..(138): Homolog of NCBI NO: 30695525 NR Description: expressed protein [Arabidopsis thaliana]
  misc_feature (1)..(138): Homolog of NCBI NO: 22208508 NR Description: unknown protein [Sorghum bicolor]
MKSGVLLAKLYCFLHVTTNYLGFMAYAYGPSMTPTLHPSGNVLLAERISKRYQKPSRGDIVVIRSPENPNKTPIKRVIGIEGDCISFVIDSRKSDESQTIVVPKGHVFVQGDYTHNSRDSRNFGTVPYGLIQGRVLWRRRNGIYTKLSELSILCGAEVAFLGYSCSGKPYTFGSPSFQAVAERFLNGEASSSSSSSLQRSVMNAHQQAKIQELCKVYNRLVEEITVEEVKLKKTAALAEMMPMNEDAWWKVDPNDVKDREEVKKMMEKHQELYEKLCEEAASRIKRGHDENNNK

SEQ ID NO: 83277 - protein, 271 aa, Arabidopsis thaliana
  peptide (1)..(271): Ceres Seq. ID no. 12669511
  misc_feature (1)..(79): Pfam Name: Signal peptidase I Pfam Description: Signal peptidase I
  misc_feature (1)..(271): Homolog of NCBI NO: 15220621 NR Description: hypothetical protein; protein id: At1g29960.1
  misc_feature (113)..(271): Homolog of NCBI NO: 32402452 NR Description: MADS-box protein AGL64 [Arabidopsis thaliana]
  misc_feature (1)..(191): Homolog of NCBI NO: 22329754 NR Description: polygalacturonase, putative; protein id:
  misc_feature (1)..(165): Homolog of NCBI NO: 25518432 NR Description: hypothetical protein F5O8.3 - Arabidopsis >gi|4056468|gb|AAC98041.1| Contains similarity to gb|X66426 from Persea americana and is a member of the signal peptidase
  misc_feature (1)..(191): Homolog of NCBI NO: 8778577 NR Description: F28C11.10 [Arabidopsis thaliana]
  misc_feature (115)..(271): Homolog of NCBI NO: 15218684 NR Description: MADS-box protein; protein id: At1g28460.1
  misc_feature (113)..(271): Homolog of NCBI NO: 15218663 NR Description: MADS-box protein; protein id: At1g28450.1 thaliana] >gi|6560765|gb|AAF16765.1|AC010155_18 F3M18.11
  misc_feature (125)..(271): Homolog of NCBI NO: 15221890 NR Description: MADS-box protein; protein id: At1g54760.1
  misc_feature (1)..(115): Homolog of NCBI NO: 30695525 NR Description: expressed protein [Arabidopsis thaliana]
  misc_feature (1)..(115): Homolog of NCBI NO: 22208508 NR Description: unknown protein [Sorghum bicolor]
MAYAYGPSMTPTLHPSGNVLLAERISKRYQKPSRGDIVVIRSPENPNKTPIKRVIGIEGDCISFVIDSRKSDESQTIVVPKGHVFVQGDYTHNSRDSRNFGTVPYGLIQGRVLWRRRNGIYTKLSELSILCGAEVAFLGYSCSGKPYTFGSPSFQAVAERFLNGEASSSSSSSLQRSVMNAHQQAKIQELCKVYNRLVEEITVEEVKLKKTAALAEMMPMNEDAWWKVDPNDVKDREEVKKMMEKHQELYEKLCEEAASRIKRGHDENNNK

SEQ ID NO: 83278 - DNA, 1478 bp, Arabidopsis thaliana
  misc_feature (1)..(1478): Ceres Seq. ID no. 12669512
  misc_feature: MA Experiment ID: 20000182 Result: Down-regulated in Transcription
  misc_feature: MA Experiment 20000182 PARAMETER Experiment Name: At_2mM_SA_P Parameter: Age (day) Value: 14
  misc_feature: MA Experiment 20000182 PARAMETER Experiment Name: At_2mM_SA_P Parameter: Organism Value: A. thaliana
  misc_feature: MA Experiment 20000182 PARAMETER Experiment Name: At_2mM_SA_P Parameter: Plant Line Value: WS
  misc_feature: MA Experiment 20000182 PARAMETER Experiment Name: At_2mM_SA_P Parameter: Timepoint (hr) Value: 6
  misc_feature: MA Experiment 20000182 PARAMETER Experiment Name: At_2mM_SA_P Parameter: Tissue Value: Aerial
  misc_feature: MA Experiment 20000182 PARAMETER Experiment Name: At_2mM_SA_P Parameter: Treatment Value: 2mM SA vs. No Treatment
  misc_feature: MA Experiment ID: 20000234 Result: Up-regulated in Transcription
  misc_feature: MA Experiment 20000234 PARAMETER Experiment Name: At_Siliques_P Parameter: Age (day) Value: 21
  misc_feature: MA Experiment 20000234 PARAMETER Experiment Name: At_Siliques_P Parameter: Organism Value: A. thaliana
  misc_feature: MA Experiment 20000234 PARAMETER Experiment Name: At_Siliques_P Parameter: Plant Line Value: WS
  misc_feature: MA Experiment 20000234 PARAMETER Experiment Name: At_Siliques_P Parameter: Tissue Value: Less Than 5mm Siliques vs. Whole Plant
  misc_feature: MA Experiment ID: 20000235 Result: Up-regulated in Transcription
  misc_feature: MA Experiment 20000235 PARAMETER Experiment Name: At_Siliques_P Parameter: Age (day) Value: 21
  misc_feature: MA Experiment 20000235 PARAMETER Experiment Name: At_Siliques_P Parameter: Organism Value: A. thaliana
  misc_feature: MA Experiment 20000235 PARAMETER Experiment Name: At_Siliques_P Parameter: Plant Line Value: WS
  misc_feature: MA Experiment 20000235 PARAMETER Experiment Name: At_Siliques_P Parameter: Tissue Value: 5-10mm Siliques vs. Whole Plant
  misc_feature: MA Experiment ID: 20000264 Result: Up-regulated in Transcription
  misc_feature: MA Experiment 20000264 PARAMETER Experiment Name: At_Open_Flower_P Parameter: Age (day) Value: 21
  misc_feature: MA Experiment 20000264 PARAMETER Experiment Name: At_Open_Flower_P Parameter: Plant Line Value: WS
  misc_feature: MA Experiment 20000264 PARAMETER Experiment Name: At_Open_Flower_P Parameter: Tissue Value: Open Flower vs. Whole Plant
  misc_feature: MA Experiment ID: 20000265 Result: Up-regulated in Transcription
  misc_feature: MA Experiment 20000265 PARAMETER Experiment Name: At_Open_Flower_P Parameter: Age (day) Value: 21
  misc_feature: MA Experiment 20000265 PARAMETER Experiment Name: At_Open_Flower_P Parameter: Plant Line Value: WS
  misc_feature: MA Experiment 20000265 PARAMETER Experiment Name: At_Open_Flower_P Parameter: Tissue Value: Closed Flower vs. Whole Plant
  misc_feature: MA Experiment ID: 20000286 Result: Up-regulated in Transcription
  misc_feature: MA Experiment 20000286 PARAMETER Experiment Name: At_Open_Flower_P Parameter: Age (day) Value: 21
  misc_feature: MA Experiment 20000286 PARAMETER Experiment Name: At_Open_Flower_P Parameter: Plant Line Value: WS
  misc_feature: MA Experiment 20000286 PARAMETER Experiment Name: At_Open_Flower_P Parameter: Tissue Value: Half Open vs. Whole Plant
  misc_feature: MA Experiment ID: 20000437 Result: Down-regulated in Transcription
  misc_feature: MA Experiment 20000437 PARAMETER Experiment Name: At_Drought_P Parameter: Age (day) Value: 8
  misc_feature: MA Experiment 20000437 PARAMETER Experiment Name: At_Drought_P Parameter: Organism Value: A. thaliana
  misc_feature: MA Experiment 20000437 PARAMETER Experiment Name: At_Drought_P Parameter: Plant Line Value: WS
  misc_feature: MA Experiment 20000437 PARAMETER Experiment Name: At_Drought_P Parameter: Timepoint (hr) Value: 24
  misc_feature: MA Experiment 20000437 PARAMETER Experiment Name: At_Drought_P Parameter: Tissue Value: Whole Plant
  misc_feature: MA Experiment 20000437 PARAMETER Experiment Name: At_Drought_P Parameter: Treatment Value: Drought vs. No Drought
  misc_feature: MA Experiment ID: 20000495 Result: Up-regulated in Transcription
  misc_feature: MA Experiment 20000495 PARAMETER Experiment Name: At_Guard_Cells_P Parameter: Harvest Date Value: 8/2/2002
  misc_feature: MA Experiment 20000495 PARAMETER Experiment Name: At_Guard_Cells_P Parameter: Organism Value: A. thaliana
  misc_feature: MA Experiment 20000495 PARAMETER Experiment Name: At_Guard_Cells_P Parameter: Tissue Value: Guard Cells vs. Leaves
  misc_feature: MA Experiment ID: 20001557 Result: Up-regulated in Transcription
  misc_feature: MA Experiment 20001557 PARAMETER Experiment Name: At_Drought_Soil_Dry_P Parameter: Age (day) Value: 27
  misc_feature: MA Experiment 20001557 PARAMETER Experiment Name: At_Drought_Soil_Dry_P Parameter: Organism Value: A. thaliana
  misc_feature: MA Experiment 20001557 PARAMETER Experiment Name: At_Drought_Soil_Dry_P Parameter: Plant Line Value: WS
  misc_feature: MA Experiment 20001557 PARAMETER Experiment Name: At_Drought_Soil_Dry_P Parameter: Post Timepoint (hr) Value: 3
  misc_feature: MA Experiment 20001557 PARAMETER Experiment Name: At_Drought_Soil_Dry_P Parameter: Post-Treatment Value: Re-Water vs. No Drought
  misc_feature: MA Experiment 20001557 PARAMETER Experiment Name: At_Drought_Soil_Dry_P Parameter: Timepoint (day) Value: 13
  misc_feature: MA Experiment 20001557 PARAMETER Experiment Name: At_Drought_Soil_Dry_P Parameter: Treatment Value: Drought vs. No Drought
  misc_feature: MA Experiment ID: 20001558 Result: Up-regulated in Transcription
  misc_feature: MA Experiment 20001558 PARAMETER Experiment Name: At_Drought_Soil_Dry_P Parameter: Age (day) Value: 27
  misc_feature: MA Experiment 20001558 PARAMETER Experiment Name: At_Drought_Soil_Dry_P Parameter: Organism Value: A. thaliana
  misc_feature: MA Experiment 20001558 PARAMETER Experiment Name: At_Drought_Soil_Dry_P Parameter: Plant Line Value: WS
  misc_feature: MA Experiment 20001558 PARAMETER Experiment Name: At_Drought_Soil_Dry_P Parameter: Post Timepoint (hr) Value: 6
  misc_feature: MA Experiment 20001558 PARAMETER Experiment Name: At_Drought_Soil_Dry_P Parameter: Post-Treatment Value: Re-Water vs. No Drought
  misc_feature: MA Experiment 20001558 PARAMETER Experiment Name: At_Drought_Soil_Dry_P Parameter: Timepoint (day) Value: 13
  misc_feature: MA Experiment 20001558 PARAMETER Experiment Name: At_Drought_Soil_Dry_P Parameter: Treatment Value: Drought vs. No Drought
  misc_feature: MA Experiment ID: 20001560 Result: Up-regulated in Transcription
  misc_feature: MA Experiment 20001560 PARAMETER Experiment Name: At_Drought_Soil_Dry_P Parameter: Age (day) Value: 28
  misc_feature: MA Experiment 20001560 PARAMETER Experiment Name: At_Drought_Soil_Dry_P Parameter: Organism Value: A. thaliana
  misc_feature: MA Experiment 20001560 PARAMETER Experiment Name: At_Drought_Soil_Dry_P Parameter: Plant Line Value: WS
  misc_feature: MA Experiment 20001560 PARAMETER Experiment Name: At_Drought_Soil_Dry_P Parameter: Post Timepoint (hr) Value: None
  misc_feature: MA Experiment 20001560 PARAMETER Experiment Name: At_Drought_Soil_Dry_P Parameter: Post-Treatment Value: None
  misc_feature: MA Experiment 20001560 PARAMETER Experiment Name: At_Drought_Soil_Dry_P Parameter: Timepoint (day) Value: 14
  misc_feature: MA Experiment 20001560 PARAMETER Experiment Name: At_Drought_Soil_Dry_P Parameter: Treatment Value: Drought vs. No Drought
  misc_feature: MA Experiment ID: 20001911 Result: Down-regulated in Transcription
  misc_feature: MA Experiment 20001911 PARAMETER Experiment Name: At_Drought_Reproduction_P Parameter: Age (day) Value: 40
  misc_feature: MA Experiment 20001911 PARAMETER Experiment Name: At_Drought_Reproduction_P Parameter: Organism Value: A. thaliana
  misc_feature: MA Experiment 20001911 PARAMETER Experiment Name: At_Drought_Reproduction_P Parameter: Plant Line Value: WS
  misc_feature: MA Experiment 20001911 PARAMETER Experiment Name: At_Drought_Reproduction_P Parameter: Timepoint (day) Value: 10
  misc_feature: MA Experiment 20001911 PARAMETER Experiment Name: At_Drought_Reproduction_P Parameter: Tissue Value: Flowers
  misc_feature: MA Experiment 20001911 PARAMETER Experiment Name: At_Drought_Reproduction_P Parameter: Treatment Value: Drought vs. No Drought
gctgcccgaaaagaacatacagaaagacactttcacatttcacacttacagagagagagaagagagataaagagagcatttagatatcttgaggaagacgaagaagaagtagaggagagatatggttccgagcaacaatagatgcaaatggagttccattttcttgtttctgctcagtgtctccgttgccgtcttagtcgccgtcgctgacgacaagtctccggcggttgaggatggtttagtgatcaacggcgacttcgaaacatcaccgtcaagtggctttcctgacgacggagtaactgacggaccatccgatatcccaagctggaaatccaacggtacggtggagctaataaattccggtcaaaaacaaggcggaatgatcctcattgtcccacaaggccgtcacgccgtccgattagggaacgacgcagagatcagccaagatctaacggttgagaaaggttttgtctattcagtcacgttcagcgctgctcgcacgtgcgctcaactcgaatcgataaacgtgtcggtagcgtctgtgaacgcagacgcggacgatatgctggcgtcgcggaacgttgatttgcaaacgctttatagcgttcaagggtgggacccttatgcgtgggcgtttgaagcggaagatgatcatgtacggttggtttttaagaatccgggtatggaagatgatccgacttgtggaccaatcatcgatgacattgctattaagaagctctttactcctgataaacccaaagataatgcggtgattaatggagatttcgaagatggtccatggatgtttaggaacacgtctcttggtgttttacttccgacaaacctcgacgaagaaatctcgtctcttcctggttggactgttgaatcgaacagagcggttcggtttgttgactcggatcacttctctgttccaaagggcaaacgagccgtcgagctactctcaggcaaagaaggaattatttcacaaatggttgagaccaaagcagataagccgtacatattgtctttctcactaggccacgcaggtgataaatgcaaggaaccattggctattatggcattcgcaggtgatcaggcgcagaactttcattacatggcgcaagcgaactccagtttcgaaaaggccggtttgaatttcacggctaaggctgatcgaaccagagttgcgttctacagtgtttattacaatacgaggactgatgatatgagctccttgtgtggacctgtgatcgatgacgttagagtgtggttctccgggtcgaagagaatcggagctgggtttgggttttgggtttttgttcttctcgttgtcggtttggtttaagtaactcaaaatttagatgttccggttttattctagtgtaccagtaaaatgttgttgcaaaccaagaagaattctgtatggtttatttatccatcgggttaaagcaaattcgaaggtgtttatcgttatgcaa

SEQ ID NO: 83279 - protein, 407 aa, Arabidopsis thaliana
  peptide (1)..(407): Ceres Seq. ID no. 12669513
  misc_feature (55)..(386): Pfam Name: Protein of unknown function, DUF642 Pfam Description: Protein of unknown function, DUF642
  misc_feature (1)..(407): Homolog of NCBI NO: 18397308 NR Description: expressed protein; protein id: At1g29980.1, by cDNA: gi_15010695 [Arabidopsis thaliana]
  misc_feature (1)..(402): Homolog of NCBI NO: 15226760 NR Description: unknown protein; protein id: At2g34510.1, by cDNA: gi_13272420 [Arabidopsis thaliana]
  misc_feature (15)..(407): Homolog of NCBI NO: 34909656 NR Description: OJ1414_E05.5 [Oryza sativa (japonica
  misc_feature (1)..(173): Homolog of NCBI NO: 15010696 NR Description: At1g29980/T1P2_9 [Arabidopsis thaliana]
  misc_feature (86)..(407): Homolog of NCBI NO: 34913458 NR Description: P0702H08.18 [Oryza sativa (japonica
  misc_feature (20)..(382): Homolog of NCBI NO: 7488898 NR Description: hypothetical protein - castor bean
  misc_feature (12)..(382): Homolog of NCBI NO: 7488741 NR Description: hypothetical protein precursor - alfalfa
  misc_feature (38)..(382): Homolog of NCBI NO: 18418018 NR Description: putative protein; protein id: At4g32460.1, by cDNA: 37529. [Arabidopsis thaliana]
  misc_feature (14)..(382): Homolog of NCBI NO: 23397043 NR Description: unknown protein [Arabidopsis thaliana]
  misc_feature (14)..(382): Homolog of NCBI NO: 15239049 NR Description: putative protein; protein id: At5g11420.1, by cDNA: 25522., supported by cDNA: gi_15028264, supported by
MVPSNNRCKWSSIFLFLLSVSVAVLVAVADDKSPAVEDGLVINGDFETSPSSGFPDDGVTDGPSDIPSWKSNGTVELINSGQKQGGMILIVPQGRHAVRLGNDAEISQDLTVEKGFVYSVTFSAARTCAQLESINVSVASVNADADDMLASRNVDLQTLYSVQGWDPYAWAFEAEDDHVRLVFKNPGMEDDPTCGPIIDDIAIKKLFTPDKPKDNAVINGDFEDGPWMFRNTSLGVLLPTNLDEEISSLPGWTVESNRAVRFVDSDHFSVPKGKRAVELLSGKEGIISQMVETKADKPYILSFSLGHAGDKCKEPLAIMAFAGDQAQNFHYMAQANSSFEKAGLNFTAKADRTRVAFYSVYYNTRTDDMSSLCGPVIDDVRVWFSGSKRIGAGFGFWVFVLLVVGLV

SEQ ID NO: 83280 - protein, 321 aa, Arabidopsis thaliana
  peptide (1)..(321): Ceres Seq. ID no. 12669514
  misc_feature (1)..(300): Pfam Name: Protein of unknown function, DUF642 Pfam Description: Protein of unknown function, DUF642
  misc_feature (1)..(321): Homolog of NCBI NO: 18397308 NR Description: expressed protein; protein id: At1g29980.1, by cDNA: gi_15010695 [Arabidopsis thaliana]
  misc_feature (1)..(316): Homolog of NCBI NO: 15226760 NR Description: unknown protein; protein id: At2g34510.1, by cDNA: gi_13272420 [Arabidopsis thaliana]
  misc_feature (1)..(321): Homolog of NCBI NO: 34909656 NR Description: OJ1414_E05.5 [Oryza sativa (japonica
  misc_feature (1)..(87): Homolog of NCBI NO: 15010696 NR Description: At1g29980/T1P2_9 [Arabidopsis thaliana]
  misc_feature (1)..(321): Homolog of NCBI NO: 34913458 NR Description: P0702H08.18 [Oryza sativa (japonica
  misc_feature (1)..(296): Homolog of NCBI NO: 7488898 NR Description: hypothetical protein - castor bean
  misc_feature (1)..(296): Homolog of NCBI NO: 7488741 NR Description: hypothetical protein precursor - alfalfa
  misc_feature (1)..(296): Homolog of NCBI NO: 18418018 NR Description: putative protein; protein id: At4g32460.1, by cDNA: 37529. [Arabidopsis thaliana]
  misc_feature (1)..(296): Homolog of NCBI NO: 23397043 NR Description: unknown protein [Arabidopsis thaliana]
  misc_feature (1)..(296): Homolog of NCBI NO: 15239049 NR Description: putative protein; protein id: At5g11420.1, by cDNA: 25522., supported by cDNA: gi_15028264, supported by
MILIVPQGRHAVRLGNDAEISQDLTVEKGFVYSVTFSAARTCAQLESINVSVASVNADADDMLASRNVDLQTLYSVQGWDPYAWAFEAEDDHVRLVFKNPGMEDDPTCGPIIDDIAIKKLFTPDKPKDNAVINGDFEDGPWMFRNTSLGVLLPTNLDEEISSLPGWTVESNRAVRFVDSDHFSVPKGKRAVELLSGKEGIISQMVETKADKPYILSFSLGHAGDKCKEPLAIMAFAGDQAQNFHYMAQANSSFEKAGLNFTAKADRTRVAFYSVYYNTRTDDMSSLCGPVIDDVRVWFSGSKRIGAGFGFWVFVLLVVGLV

SEQ ID NO: 83281 - protein, 260 aa, Arabidopsis thaliana
  peptide (1)..(260): Ceres Seq. ID no. 12669515
  misc_feature (1)..(239): Pfam Name: Protein of unknown function, DUF642 Pfam Description: Protein of unknown function, DUF642
  misc_feature (1)..(260): Homolog of NCBI NO: 18397308 NR Description: expressed protein; protein id: At1g29980.1, by cDNA: gi_15010695 [Arabidopsis thaliana]
  misc_feature (1)..(255): Homolog of NCBI NO: 15226760 NR Description: unknown protein; protein id: At2g34510.1, by cDNA: gi_13272420 [Arabidopsis thaliana]
  misc_feature (1)..(260): Homolog of NCBI NO: 34909656 NR Description: OJ1414_E05.5 [Oryza sativa (japonica
  misc_feature (1)..(26): Homolog of NCBI NO: 15010696 NR Description: At1g29980/T1P2_9 [Arabidopsis thaliana]
  misc_feature (1)..(260): Homolog of NCBI NO: 34913458 NR Description: P0702H08.18 [Oryza sativa (japonica
  misc_feature (1)..(235): Homolog of NCBI NO: 7488898 NR Description: hypothetical protein - castor bean
  misc_feature (1)..(235): Homolog of NCBI NO: 7488741 NR Description: hypothetical protein precursor - alfalfa
  misc_feature (1)..(235): Homolog of NCBI NO: 18418018 NR Description: putative protein; protein id: At4g32460.1, by cDNA: 37529. [Arabidopsis thaliana]
  misc_feature (1)..(235): Homolog of NCBI NO: 23397043 NR Description: unknown protein [Arabidopsis thaliana]
  misc_feature (1)..(235): Homolog of NCBI NO: 15239049 NR Description: putative protein; protein id: At5g11420.1, by cDNA: 25522., supported by cDNA: gi_15028264, supported by
MLASRNVDLQTLYSVQGWDPYAWAFEAEDDHVRLVFKNPGMEDDPTCGPIIDDIAIKKLFTPDKPKDNAVINGDFEDGPWMFRNTSLGVLLPTNLDEEISSLPGWTVESNRAVRFVDSDHFSVPKGKRAVELLSGKEGIISQMVETKADKPYILSFSLGHAGDKCKEPLAIMAFAGDQAQNFHYMAQANSSFEKAGLNFTAKADRTRVAFYSVYYNTRTDDMSSLCGPVIDDVRVWFSGSKRIGAGFGFWVFVLLVVGLV

SEQ ID NO: 83282 - DNA, 1131 bp, Arabidopsis thaliana
  misc_feature (1)..(1131): Ceres Seq. ID no. 12669533
  misc_feature: MA Experiment ID: 20000171 Result: Up-regulated in Transcription
  misc_feature: MA Experiment 20000171 PARAMETER Experiment Name: At_42deg_Heat_P Parameter: Age (day) Value: 14
  misc_feature: MA Experiment 20000171 PARAMETER Experiment Name: At_42deg_Heat_P Parameter: Organism Value: A. thaliana
  misc_feature: MA Experiment 20000171 PARAMETER Experiment Name: At_42deg_Heat_P Parameter: Plant Line Value: WS
  misc_feature: MA Experiment 20000171 PARAMETER Experiment Name: At_42deg_Heat_P Parameter: Temperature (deg C) Value: 42 vs. 22
  misc_feature: MA Experiment 20000171 PARAMETER Experiment Name: At_42deg_Heat_P Parameter: Timepoint (hr) Value: 1
  misc_feature: MA Experiment 20000171 PARAMETER Experiment Name: At_42deg_Heat_P Parameter: Tissue Value: Aerial
  misc_feature: MA Experiment ID: 20000185 Result: Up-regulated in Transcription
  misc_feature: MA Experiment 20000185 PARAMETER Experiment Name: At_Roots__P Parameter: Age (day) Value: 7 vs. 21
  misc_feature: MA Experiment 20000185 PARAMETER Experiment Name: At_Roots__P Parameter: Organism Value: A. thaliana
  misc_feature: MA Experiment 20000185 PARAMETER Experiment Name: At_Roots__P Parameter: Tissue Value: Roots vs. Whole Plant
  misc_feature: MA Experiment ID: 20000286 Result: Up-regulated in Transcription
  misc_feature: MA Experiment 20000286 PARAMETER Experiment Name: At_Open_Flower_P Parameter: Age (day) Value: 21
  misc_feature: MA Experiment 20000286 PARAMETER Experiment Name: At_Open_Flower_P Parameter: Plant Line Value: WS
  misc_feature: MA Experiment 20000286 PARAMETER Experiment Name: At_Open_Flower_P Parameter: Tissue Value: Half Open vs. Whole Plant
  misc_feature: MA Experiment ID: 20000439 Result: Up-regulated in Transcription
  misc_feature: MA Experiment 20000439 PARAMETER Experiment Name: At_Roots__P Parameter: Age (day) Value: 14 vs. 21
  misc_feature: MA Experiment 20000439 PARAMETER Experiment Name: At_Roots__P Parameter: Organism Value: A. thaliana
  misc_feature: MA Experiment 20000439 PARAMETER Experiment Name: At_Roots__P Parameter: Tissue Value: Roots vs. Whole Plant
  misc_feature: MA Experiment ID: 20000451 Result: Up-regulated in Transcription
  misc_feature: MA Experiment 20000451 PARAMETER Experiment Name: At_CS6879_Shoots-Roots_P Parameter: Age (day) Value: 14
  misc_feature: MA Experiment 20000451 PARAMETER Experiment Name: At_CS6879_Shoots-Roots_P Parameter: Organism Value: A. thaliana
  misc_feature: MA Experiment 20000451 PARAMETER Experiment Name: At_CS6879_Shoots-Roots_P Parameter: Plant Line Value: CS6879 vs. WS
  misc_feature: MA Experiment 20000451 PARAMETER Experiment Name: At_CS6879_Shoots-Roots_P Parameter: Tissue Value: Roots
atgtctaacatgtttagcagaattgccatgaccaactctatcgttcttcttctattttccttgactttcttagaacatggattgttgtttcaaagggtctcctctcttggcatcaactatggtcaagtcggcgacaatcttcctccaccggacaaagttctacaactcttgagttcactccatatcaataagacaagaatctatgacacaaaccctcgagtgttaacctcatttgccaattccaatatcgagctctttgtcaccgtcgaaaatgaaatgcttcccagcttagtagaccctcaacaagctctccaatgggtcactacccgtatcaaaccctactttccggccaccaagatcggtggtatcgccgtcggcaacgaactatacactgacgatgactcaagccttatagggtatcttatgcctgcaatgatgagcattcatggggctttggtccaaaccggactagacaagtacattcaagtatcgactccgaactcactatccgtccttcaagaatcttaccctccatccgccggatgttttaggccggaagtagctggcgtaatgacacagctactaggtttcttgcgtaacacgaattcccccttctggatcaacgcttacccttacttcgcttacaaggattccccaacaaagatcccattagactacgtcctcttcaaccctaaccctggaatggttgacccctataccaagtaccgctatgacaacatgctctacgctcaagtagacgctgtgatctttgccatggcgaggcttggcttcaaagacatcgaagttggggtctcggagactggatggccgtctaaaggcgatggagatgaggttggagccactgtggccaacgcagccgtttataacaaaaatattctaaggagacaacttcaaaatgaaggaacgccattgagaccaaacttgagttttgatgtttatctatttgctcttttcaatgaagaccttaaaccaggaccaacctctgagaggaattatggattgtatcagcctgatgagaccatgacttacaatgtaggctttaaagaagggaaagcaacggttgatgtattggacatgcgtttatttgttggccattcacatgctaattag

SEQ ID NO: 83283 - protein, 376 aa, Arabidopsis thaliana
  peptide (1)..(376): Ceres Seq. ID no. 12669534
  misc_feature (36)..(354): Pfam Name: Glycosyl hydrolases family 17 Pfam Description: Glycosyl hydrolases family 17
  misc_feature (1)..(376): Homolog of NCBI NO: 25316440 NR Description: hypothetical protein T1P2.13 - Arabidopsis
  misc_feature (1)..(353): Homolog of NCBI NO: 30691233 NR Description: glycosyl hydrolase family 17 [Arabidopsis
  misc_feature (1)..(353): Homolog of NCBI NO: 22530916 NR Description: putative beta-1,3-glucanase precursor
  misc_feature (15)..(360): Homolog of NCBI NO: 7447983 NR Description: hypothetical protein T9A21.190 - Arabidopsis
  misc_feature (15)..(360): Homolog of NCBI NO: 22328768 NR Description: glycosyl hydrolase family 17; protein id:
  misc_feature (13)..(354): Homolog of NCBI NO: 25316443 NR Description: CDS protein F9L11.6 [imported] - Arabidopsis
  misc_feature (13)..(354): Homolog of NCBI NO: 30692765 NR Description: glycosyl hydrolase family 17 [Arabidopsis
  misc_feature (16)..(353): Homolog of NCBI NO: 419789 NR Description: hypothetical protein - potato
  misc_feature (13)..(357): Homolog of NCBI NO: 34908492 NR Description: putative beta-1,3-glucanase [Oryza sativa
  misc_feature (35)..(355): Homolog of NCBI NO: 38346337 NR Description: OSJNBa0073L04.8 [Oryza sativa (japonica
MSNMFSRIAMTNSIVLLLFSLTFLEHGLLFQRVSSLGINYGQVGDNLPPPDKVLQLLSSLHINKTRIYDTNPRVLTSFANSNIELFVTVENEMLPSLVDPQQALQWVTTRIKPYFPATKIGGIAVGNELYTDDDSSLIGYLMPAMMSIHGALVQTGLDKYIQVSTPNSLSVLQESYPPSAGCFRPEVAGVMTQLLGFLRNTNSPFWINAYPYFAYKDSPTKIPLDYVLFNPNPGMVDPYTKYRYDNMLYAQVDAVIFAMARLGFKDIEVGVSETGWPSKGDGDEVGATVANAAVYNKNILRRQLQNEGTPLRPNLSFDVYLFALFNEDLKPGPTSERNYGLYQPDETMTYNVGFKEGKATVDVLDMRLFVGHSHAN

SEQ ID NO: 83284 - protein, 373 aa, Arabidopsis thaliana
  peptide (1)..(373): Ceres Seq. ID no. 12669535
  misc_feature (33)..(351): Pfam Name: Glycosyl hydrolases family 17 Pfam Description: Glycosyl hydrolases family 17
  misc_feature (1)..(373): Homolog of NCBI NO: 25316440 NR Description: hypothetical protein T1P2.13 - Arabidopsis
  misc_feature (1)..(350): Homolog of NCBI NO: 30691233 NR Description: glycosyl hydrolase family 17 [Arabidopsis
  misc_feature (1)..(350): Homolog of NCBI NO: 22530916 NR Description: putative beta-1,3-glucanase precursor
  misc_feature (12)..(357): Homolog of NCBI NO: 7447983 NR Description: hypothetical protein T9A21.190 - Arabidopsis
  misc_feature (12)..(357): Homolog of NCBI NO: 22328768 NR Description: glycosyl hydrolase family 17; protein id:
  misc_feature (10)..(351): Homolog of NCBI NO: 25316443 NR Description: CDS protein F9L11.6 [imported] - Arabidopsis
  misc_feature (10)..(351): Homolog of NCBI NO: 30692765 NR Description: glycosyl hydrolase family 17 [Arabidopsis
  misc_feature (13)..(350): Homolog of NCBI NO: 419789 NR Description: hypothetical protein - potato
  misc_feature (10)..(354): Homolog of NCBI NO: 34908492 NR Description: putative beta-1,3-glucanase [Oryza sativa
  misc_feature (32)..(352): Homolog of NCBI NO: 38346337 NR Description: OSJNBa0073L04.8 [Oryza sativa (japonica
MFSRIAMTNSIVLLLFSLTFLEHGLLFQRVSSLGINYGQVGDNLPPPDKVLQLLSSLHINKTRIYDTNPRVLTSFANSNIELFVTVENEMLPSLVDPQQALQWVTTRIKPYFPATKIGGIAVGNELYTDDDSSLIGYLMPAMMSIHGALVQTGLDKYIQVSTPNSLSVLQESYPPSAGCFRPEVAGVMTQLLGFLRNTNSPFWINAYPYFAYKDSPTKIPLDYVLFNPNPGMVDPYTKYRYDNMLYAQVDAVIFAMARLGFKDIEVGVSETGWPSKGDGDEVGATVANAAVYNKNILRRQLQNEGTPLRPNLSFDVYLFALFNEDLKPGPTSERNYGLYQPDETMTYNVGFKEGKATVDVLDMRLFVGHSHAN

SEQ ID NO: 83285 - protein, 367 aa, Arabidopsis thaliana
  peptide (1)..(367): Ceres Seq. ID no. 12669536
  misc_feature (27)..(345): Pfam Name: Glycosyl hydrolases family 17 Pfam Description: Glycosyl hydrolases family 17
  misc_feature (1)..(367): Homolog of NCBI NO: 25316440 NR Description: hypothetical protein T1P2.13 - Arabidopsis
  misc_feature (1)..(344): Homolog of NCBI NO: 30691233 NR Description: glycosyl hydrolase family 17 [Arabidopsis
  misc_feature (1)..(344): Homolog of NCBI NO: 22530916 NR Description: putative beta-1,3-glucanase precursor
  misc_feature (6)..(351): Homolog of NCBI NO: 7447983 NR Description: hypothetical protein T9A21.190 - Arabidopsis
  misc_feature (6)..(351): Homolog of NCBI NO: 22328768 NR Description: glycosyl hydrolase family 17; protein id:
  misc_feature (4)..(345): Homolog of NCBI NO: 25316443 NR Description: CDS protein F9L11.6 [imported] - Arabidopsis
  misc_feature (4)..(345): Homolog of NCBI NO: 30692765 NR Description: glycosyl hydrolase family 17 [Arabidopsis
  misc_feature (7)..(344): Homolog of NCBI NO: 419789 NR Description: hypothetical protein - potato
  misc_feature (4)..(348): Homolog of NCBI NO: 34908492 NR Description: putative beta-1,3-glucanase [Oryza sativa
  misc_feature (26)..(346): Homolog of NCBI NO: 38346337 NR Description: OSJNBa0073L04.8 [Oryza sativa (japonica
MTNSIVLLLFSLTFLEHGLLFQRVSSLGINYGQVGDNLPPPDKVLQLLSSLHINKTRIYDTNPRVLTSFANSNIELFVTVENEMLPSLVDPQQALQWVTTRIKPYFPATKIGGIAVGNELYTDDDSSLIGYLMPAMMSIHGALVQTGLDKYIQVSTPNSLSVLQESYPPSAGCFRPEVAGVMTQLLGFLRNTNSPFWINAYPYFAYKDSPTKIPLDYVLFNPNPGMVDPYTKYRYDNMLYAQVDAVIFAMARLGFKDIEVGVSETGWPSKGDGDEVGATVANAAVYNKNILRRQLQNEGTPLRPNLSFDVYLFALFNEDLKPGPTSERNYGLYQPDETMTYNVGFKEGKATVDVLDMRLFVGHSHAN

SEQ ID NO: 83286 - DNA, 1908 bp, Arabidopsis thaliana
  misc_feature (1)..(1908): Ceres Seq. ID no. 12669552
  misc_feature: MA Experiment ID: 20000307 Result: Down-regulated in Transcription
  misc_feature: MA Experiment 20000307 PARAMETER Experiment Name: At_Germinating_Seeds_Sub_P Parameter: Age (hr) Value: 24 vs. 0
  misc_feature: MA Experiment 20000307 PARAMETER Experiment Name: At_Germinating_Seeds_Sub_P Parameter: Organism Value: A. thaliana
  misc_feature: MA Experiment 20000307 PARAMETER Experiment Name: At_Germinating_Seeds_Sub_P Parameter: Plant Line Value: WS
  misc_feature: MA Experiment 20000307 PARAMETER Experiment Name: At_Germinating_Seeds_Sub_P Parameter: Tissue Value: Germinating Seeds
  misc_feature: MA Experiment ID: 20000314 Result: Down-regulated in Transcription
  misc_feature: MA Experiment 20000314 PARAMETER Experiment Name: At_14day_Shoots-Roots_Sub_P Parameter: Age (day) Value: 14
  misc_feature: MA Experiment 20000314 PARAMETER Experiment Name: At_14day_Shoots-Roots_Sub_P Parameter: Organism Value: A. thaliana
  misc_feature: MA Experiment 20000314 PARAMETER Experiment Name: At_14day_Shoots-Roots_Sub_P Parameter: Plant Line Value: WS
  misc_feature: MA Experiment 20000314 PARAMETER Experiment Name: At_14day_Shoots-Roots_Sub_P Parameter: Tissue Value: Roots vs. Whole Plant
  misc_feature: MA Experiment ID: 20000315 Result: Down-regulated in Transcription
  misc_feature: MA Experiment 20000315 PARAMETER Experiment Name: At_14day_Shoots-Roots_Sub_P Parameter: Age (day) Value: 14
  misc_feature: MA Experiment 20000315 PARAMETER Experiment Name: At_14day_Shoots-Roots_Sub_P Parameter: Organism Value: A. thaliana
  misc_feature: MA Experiment 20000315 PARAMETER Experiment Name: At_14day_Shoots-Roots_Sub_P Parameter: Plant Line Value: WS
  misc_feature: MA Experiment 20000315 PARAMETER Experiment Name: At_14day_Shoots-Roots_Sub_P Parameter: Tissue Value: Shoots vs. Whole Plant
  misc_feature: MA Experiment ID: 20000349 Result: Up-regulated in Transcription
  misc_feature: MA Experiment 20000349 PARAMETER Experiment Name: At_100uM_ABA_Sub_P Parameter: Age (day) Value: 14
  misc_feature: MA Experiment 20000349 PARAMETER Experiment Name: At_100uM_ABA_Sub_P Parameter: Organism Value: A. thaliana
  misc_feature: MA Experiment 20000349 PARAMETER Experiment Name: At_100uM_ABA_Sub_P Parameter: Plant Line Value: WS
  misc_feature: MA Experiment 20000349 PARAMETER Experiment Name: At_100uM_ABA_Sub_P Parameter: Timepoint (hr) Value: 6
  misc_feature: MA Experiment 20000349 PARAMETER Experiment Name: At_100uM_ABA_Sub_P Parameter: Tissue Value: Aerial
  misc_feature: MA Experiment 20000349 PARAMETER Experiment Name: At_100uM_ABA_Sub_P Parameter: Treatment Value: 100uM ABA vs. No Treatment
  misc_feature: MA Experiment ID: 20000352 Result: Up-regulated in Transcription
  misc_feature: MA Experiment 20000352 PARAMETER Experiment Name: At_Drought_Sub_P Parameter: Age (day) Value: 7
  misc_feature: MA Experiment 20000352 PARAMETER Experiment Name: At_Drought_Sub_P Parameter: Organism Value: A. thaliana
  misc_feature: MA Experiment 20000352 PARAMETER Experiment Name: At_Drought_Sub_P Parameter: Plant Line Value: WS
  misc_feature: MA Experiment 20000352 PARAMETER Experiment Name: At_Drought_Sub_P Parameter: Timepoint (hr) Value: 6
  misc_feature: MA Experiment 20000352 PARAMETER Experiment Name: At_Drought_Sub_P Parameter: Tissue Value: Whole Plant
  misc_feature: MA Experiment 20000352 PARAMETER Experiment Name: At_Drought_Sub_P Parameter: Treatment Value: Drought vs. No Drought
  misc_feature: MA Experiment ID: 20000355 Result: Up-regulated in Transcription
  misc_feature: MA Experiment 20000355 PARAMETER Experiment Name: At_Siliques_Sub_P Parameter: Age (day) Value: 21
  misc_feature: MA Experiment 20000355 PARAMETER Experiment Name: At_Siliques_Sub_P Parameter: Organism Value: A. thaliana
  misc_feature: MA Experiment 20000355 PARAMETER Experiment Name: At_Siliques_Sub_P Parameter: Plant Line Value: WS
  misc_feature: MA Experiment 20000355 PARAMETER Experiment Name: At_Siliques_Sub_P Parameter: Tissue Value: Less Than 5mm Siliques vs. Whole Plant
acacacttctaactcttttaacccaaaaaaaaatggagggaggaataatacatggaggagcagatgaatcagctttcaaagaatgtttctctctaacatggaagaatccttatgttcttcgtcttgctttctctgccggaatcggtggtcttctctttggttacgacaccggagtgatatcaggtgctctgctttatatcagagatgatttcaagtctgttgacagaaatacttggttacaggagatgatagtgagcatggcagttgcaggagccatcgttggagccgccataggaggttgggcgaacgacaaattagggaggagaagcgcgattctcatggcggatttcctctttttattaggagctatcattatggcggctgctcctaacccgtccctccttgtcgttggccgtgtttttgtgggcctcggggtcgggatggcctcgatgaccgctcctctatacatctcagaagcttcgcctgctaagatcagaggagctttggtcagtactaatgggtttctcattaccggaggacagttcttgtcttacctcataaacttagcctttactgatgtgaccggaacgtggagatggatgctcggaatcgccggaattccagctcttttacagtttgtcttaatgtttacactcccggagtcacctcgatggttataccgcaagggaagagaagaagaggctaaagcgattctaagaagaatatactcagcagaagatgtagaacaagagatacgtgcacttaaagactcagttgaaacagagatacttgaagaagggtcttccgagaaaatcaacatgatcaaactatgcaaagctaaaaccgttagacgaggactaatagctggtgttggtctccaagtgtttcaacagttcgttgggatcaacacagttatgtattacagtccaaccattgttcagcttgccggtttcgcttcaaacagaacagctcttctcttgtctctagttaccgcaggacttaatgcatttggttctataattagcatttacttcattgatagaatcggaaggaaaaagcttttgatcattagccttttcggagtcattatctcgctaggaatactaaccggtgttttttatgaagcggctactcacgctcctgcgattagctcactcgagacacaaaggttcaataatattagttgtccggattataagtcagctatgaataccaatgcttgggattgtatgacttgtttgaaagcttcttctccatcttgtggctattgttcctctcccattggaaaggaacatcccggggcatgttggatctctgatgattcggttaaggacttatgtcataacgaaaaccggctttggtacacgagaggatgtcctagcaattttggttggtttgctcttcttggattgggactttatatcatcttcttctctcctggaatggggactgttccatggatagttaactcagagatttatccattgagattcagaggaatatgtggaggaatagctgcaactgcaaattggatatcaaatttgattgtggctcaatcttttttgtcattgaccgaagctattgggacttcttggacttttctcatctttggagtgatctcagtcattgctcttctctttgttatggtttgtgttccggagacaaaaggaatgccaatggaggagattgagaagatgcttgaacgaagatcgatggagtttaagttttggaagaaaaaatcaaaacttgttgagaaacaaaaccagagtgcatgagagaaactcttaaaggaagcataatcaatgagaaagcacatgagacttgtaacttggtattgaaacttaatagtgacaaagtgatctattttaagaaccagtaaaaaagtgttgttatgaatctacttattgg

SEQ ID NO: 83287 - protein, 590 aa, Arabidopsis thaliana
  peptide (1)..(590): Ceres Seq. ID no. 12669553
  misc_feature (41)..(566): Pfam Name: Sugar (and other) transporter Pfam Description: Sugar (and other) transporter
  misc_feature (11)..(590): Homolog of NCBI NO: 15220697 NR Description: hypothetical protein; protein id: At1g30220.1, by cDNA: gi_18377758 [Arabidopsis thaliana]
  misc_feature (11)..(579): Homolog of NCBI NO: 33146705 NR Description: putative proton myo-inositol transporter [Oryza
  misc_feature (11)..(567): Homolog of NCBI NO: 9652186 NR Description: putative Na+/myo-inositol symporter
  misc_feature (11)..(568): Homolog of NCBI NO: 9652184 NR Description: putative Na+/myo-inositol symporter
  misc_feature (11)..(567): Homolog of NCBI NO: 15235767 NR Description: membrane transporter like protein; protein id:
  misc_feature (27)..(567): Homolog of NCBI NO: 15227479 NR Description: putative sugar transporter; protein id: [Arabidopsis thaliana] >gi|25309025|pir||D84772 probable sugar
  misc_feature (35)..(374): Homolog of NCBI NO: 30689342 NR Description: sugar transporter family [Arabidopsis thaliana] putative membrane transporter protein [Arabidopsis thaliana]
  misc_feature (462)..(570): Homolog of NCBI NO: 30689342 NR Description: sugar transporter family [Arabidopsis thaliana] putative membrane transporter protein [Arabidopsis thaliana]
  misc_feature (33)..(372): Homolog of NCBI NO: 38347452 NR Description: OSJNBa0076N16.21 [Oryza sativa (japonica
  misc_feature (441)..(570): Homolog of NCBI NO: 38347452 NR Description: OSJNBa0076N16.21 [Oryza sativa (japonica
TLLTLLTQKKMEGGIIHGGADESAFKECFSLTWKNPYVLRLAFSAGIGGLLFGYDTGVISGALLYIRDDFKSVDRNTWLQEMIVSMAVAGAIVGAAIGGWANDKLGRRSAILMADFLFLLGAIIMAAAPNPSLLVVGRVFVGLGVGMASMTAPLYISEASPAKIRGALVSTNGFLITGGQFLSYLINLAFTDVTGTWRWMLGIAGIPALLQFVLMFTLPESPRWLYRKGREEEAKAILRRIYSAEDVEQEIRALKDSVETEILEEGSSEKINMIKLCKAKTVRRGLIAGVGLQVFQQFVGINTVMYYSPTIVQLAGFASNRTALLLSLVTAGLNAFGSIISIYFIDRIGRKKLLIISLFGVIISLGILTGVFYEAATHAPAISSLETQRFNNISCPDYKSAMNTNAWDCMTCLKASSPSCGYCSSPIGKEHPGACWISDDSVKDLCHNENRLWYTRGCPSNFGWFALLGLGLYIIFFSPGMGTVPWIVNSEIYPLRFRGICGGIAATANWISNLIVAQSFLSLTEAIGTSWTFLIFGVISVIALLFVMVCVPETKGMPMEEIEKMLERRSMEFKFWKKKSKLVEKQNQSA

SEQ ID NO: 83288 - protein, 580 aa, Arabidopsis thaliana
  peptide (1)..(580): Ceres Seq. ID no. 12669554
  misc_feature (31)..(556): Pfam Name: Sugar (and other) transporter Pfam Description: Sugar (and other) transporter
  misc_feature (1)..(580): Homolog of NCBI NO: 15220697 NR Description: hypothetical protein; protein id: At1g30220.1, by cDNA: gi_18377758 [Arabidopsis thaliana]
  misc_feature (1)..(569): Homolog of NCBI NO: 33146705 NR Description: putative proton myo-inositol transporter [Oryza
  misc_feature (1)..(557): Homolog of NCBI NO: 9652186 NR Description: putative Na+/myo-inositol symporter
  misc_feature (1)..(558): Homolog of NCBI NO: 9652184 NR Description: putative Na+/myo-inositol symporter
  misc_feature (1)..(557): Homolog of NCBI NO: 15235767 NR Description: membrane transporter like protein; protein id:
  misc_feature (17)..(557): Homolog of NCBI NO: 15227479 NR Description: putative sugar transporter; protein id: [Arabidopsis thaliana] >gi|25309025|pir||D84772 probable sugar
  misc_feature (25)..(364): Homolog of NCBI NO: 30689342 NR Description: sugar transporter family [Arabidopsis thaliana] putative membrane transporter protein [Arabidopsis thaliana]
  misc_feature (452)..(560): Homolog of NCBI NO: 30689342 NR Description: sugar transporter family [Arabidopsis thaliana] putative membrane transporter protein [Arabidopsis thaliana]
  misc_feature (23)..(362): Homolog of NCBI NO: 38347452 NR Description: OSJNBa0076N16.21 [Oryza sativa (japonica
  misc_feature (431)..(560): Homolog of NCBI NO: 38347452 NR Description: OSJNBa0076N16.21 [Oryza sativa (japonica
MEGGIIHGGADESAFKECFSLTWKNPYVLRLAFSAGIGGLLFGYDTGVISGALLYIRDDFKSVDRNTWLQEMIVSMAVAGAIVGAAIGGWANDKLGRRSAILMADFLFLLGAIIMAAAPNPSLLVVGRVFVGLGVGMASMTAPLYISEASPAKIRGALVSTNGFLITGGQFLSYLINLAFTDVTGTWRWMLGIAGIPALLQFVLMFTLPESPRWLYRKGREEEAKAILRRIYSAEDVEQEIRALKDSVETEILEEGSSEKINMIKLCKAKTVRRGLIAGVGLQVFQQFVGINTVMYYSPTIVQLAGFASNRTALLLSLVTAGLNAFGSIISIYFIDRIGRKKLLIISLFGVIISLGILTGVFYEAATHAPAISSLETQRFNNISCPDYKSAMNTNAWDCMTCLKASSPSCGYCSSPIGKEHPGACWISDDSVKDLCHNENRLWYTRGCPSNFGWFALLGLGLYIIFFSPGMGTVPWIVNSEIYPLRFRGICGGIAATANWISNLIVAQSFLSLTEAIGTSWTFLIFGVISVIALLFVMVCVPETKGMPMEEIEKMLERRSMEFKFWKKKSKLVEKQNQSA

SEQ ID NO: 83289 - protein, 509 aa, Arabidopsis thaliana
  peptide (1)..(509): Ceres Seq. ID no. 12669555
  misc_feature (1)..(485): Pfam Name: Sugar (and other) transporter Pfam Description: Sugar (and other) transporter
  misc_feature (1)..(509): Homolog of NCBI NO: 15220697 NR Description: hypothetical protein; protein id: At1g30220.1, by cDNA: gi_18377758 [Arabidopsis thaliana]
  misc_feature (1)..(498): Homolog of NCBI NO: 33146705 NR Description: putative proton myo-inositol transporter [Oryza
  misc_feature (1)..(486): Homolog of NCBI NO: 9652186 NR Description: putative Na+/myo-inositol symporter
  misc_feature (1)..(487): Homolog of NCBI NO: 9652184 NR Description: putative Na+/myo-inositol symporter
  misc_feature (1)..(486): Homolog of NCBI NO: 15235767 NR Description: membrane transporter like protein; protein id:
  misc_feature (1)..(486): Homolog of NCBI NO: 15227479 NR Description: putative sugar transporter; protein id: [Arabidopsis thaliana] >gi|25309025|pir||D84772 probable sugar
  misc_feature (1)..(293): Homolog of NCBI NO: 30689342 NR Description: sugar transporter family [Arabidopsis thaliana] putative membrane transporter protein [Arabidopsis thaliana]
  misc_feature (381)..(489): Homolog of NCBI NO: 30689342 NR Description: sugar transporter family [Arabidopsis thaliana] putative membrane transporter protein [Arabidopsis thaliana]
  misc_feature (1)..(291): Homolog of NCBI NO: 38347452 NR Description: OSJNBa0076N16.21 [Oryza sativa (japonica
  misc_feature (360)..(489): Homolog of NCBI NO: 38347452 NR Description: OSJNBa0076N16.21 [Oryza sativa (japonica
MIVSMAVAGAIVGAAIGGWANDKLGRRSAILMADFLFLLGAIIMAAAPNPSLLVVGRVFVGLGVGMASMTAPLYISEASPAKIRGALVSTNGFLITGGQFLSYLINLAFTDVTGTWRWMLGIAGIPALLQFVLMFTLPESPRWLYRKGREEEAKAILRRIYSAEDVEQEIRALKDSVETEILEEGSSEKINMIKLCKAKTVRRGLIAGVGLQVFQQFVGINTVMYYSPTIVQLAGFASNRTALLLSLVTAGLNAFGSIISIYFIDRIGRKKLLIISLFGVIISLGILTGVFYEAATHAPAISSLETQRFNNISCPDYKSAMNTNAWDCMTCLKASSPSCGYCSSPIGKEHPGACWISDDSVKDLCHNENRLWYTRGCPSNFGWFALLGLGLYIIFFSPGMGTVPWIVNSEIYPLRFRGICGGIAATANWISNLIVAQSFLSLTEAIGTSWTFLIFGVISVIALLFVMVCVPETKGMPMEEIEKMLERRSMEFKFWKKKSKLVEKQNQSA

SEQ ID NO: 83290 - DNA, 1654 bp, Arabidopsis thaliana
  misc_feature (1)..(1654): Ceres Seq. ID no. 12669566
  misc_feature: MA Experiment ID: 20000173 Result: Down-regulated in Transcription
  misc_feature: MA Experiment 20000173 PARAMETER Experiment Name: At_42deg_Heat_P Parameter: Age (day) Value: 14
  misc_feature: MA Experiment 20000173 PARAMETER Experiment Name: At_42deg_Heat_P Parameter: Organism Value: A. thaliana
  misc_feature: MA Experiment 20000173 PARAMETER Experiment Name: At_42deg_Heat_P Parameter: Plant Line Value: WS
  misc_feature: MA Experiment 20000173 PARAMETER Experiment Name: At_42deg_Heat_P Parameter: Temperature (deg C) Value: 42 vs. 22
  misc_feature: MA Experiment 20000173 PARAMETER Experiment Name: At_42deg_Heat_P Parameter: Timepoint (hr) Value: 6
  misc_feature: MA Experiment 20000173 PARAMETER Experiment Name: At_42deg_Heat_P Parameter: Tissue Value: Aerial
  misc_feature: MA Experiment ID: 20000184 Result: Down-regulated in Transcription
  misc_feature: MA Experiment 20000184 PARAMETER Experiment Name: At_Shoots__P Parameter: Age (day) Value: 7
  misc_feature: MA Experiment 20000184 PARAMETER Experiment Name: At_Shoots__P Parameter: Tissue Value: Shoots vs. Whole Plant
  misc_feature: MA Experiment ID: 20000185 Result: Down-regulated in Transcription
  misc_feature: MA Experiment 20000185 PARAMETER Experiment Name: At_Roots__P Parameter: Age (day) Value: 7 vs. 21
  misc_feature: MA Experiment 20000185 PARAMETER Experiment Name: At_Roots__P Parameter: Organism Value: A. thaliana
  misc_feature: MA Experiment 20000185 PARAMETER Experiment Name: At_Roots__P Parameter: Tissue Value: Roots vs. Whole Plant
  misc_feature: MA Experiment ID: 20000213 Result: Up-regulated in Transcription
  misc_feature: MA Experiment 20000213 PARAMETER Experiment Name: At_4deg_Cold_P Parameter: Timepoint (hr) Value: 2
  misc_feature: MA Experiment ID: 20000438 Result: Down-regulated in Transcription
  misc_feature: MA Experiment 20000438 PARAMETER Experiment Name: At_Shoots__P Parameter: Age (day) Value: 14
  misc_feature: MA Experiment 20000438 PARAMETER Experiment Name: At_Shoots__P Parameter: Tissue Value: Shoots vs. Whole Plant
  misc_feature: MA Experiment ID: 20000439 Result: Down-regulated in Transcription
  misc_feature: MA Experiment 20000439 PARAMETER Experiment Name: At_Roots__P Parameter: Age (day) Value: 14 vs. 21
  misc_feature: MA Experiment 20000439 PARAMETER Experiment Name: At_Roots__P Parameter: Organism Value: A. thaliana
  misc_feature: MA Experiment 20000439 PARAMETER Experiment Name: At_Roots__P Parameter: Tissue Value: Roots vs. Whole Plant
  misc_feature: MA Experiment ID: 20000573 Result: Up-regulated in Transcription
  misc_feature: MA Experiment 20000573 PARAMETER Experiment Name: At_100uM_ABA_Mutants__P Parameter: Organism Value: A. thaliana
  misc_feature: MA Experiment 20000573 PARAMETER Experiment Name: At_100uM_ABA_Mutants__P Parameter: Plant Line Value: CS22 vs. Ler wt
  misc_feature: MA Experiment 20000573 PARAMETER Experiment Name: At_100uM_ABA_Mutants__P Parameter: Timepoint (hr) Value: N/A
  misc_feature: MA Experiment 20000573 PARAMETER Experiment Name: At_100uM_ABA_Mutants__P Parameter: Tissue Value: Whole Plant
  misc_feature: MA Experiment 20000573 PARAMETER Experiment Name: At_100uM_ABA_Mutants__P Parameter: Treatment Value: None
  misc_feature: MA Experiment ID: 20000575 Result: Down-regulated in Transcription
  misc_feature: MA Experiment 20000575 PARAMETER Experiment Name: At_100uM_ABA_Mutants__P Parameter: Organism Value: A. thaliana
  misc_feature: MA Experiment 20000575 PARAMETER Experiment Name: At_100uM_ABA_Mutants__P Parameter: Plant Line Value: CS22
  misc_feature: MA Experiment 20000575 PARAMETER Experiment Name: At_100uM_ABA_Mutants__P Parameter: Timepoint (hr) Value: 6
  misc_feature: MA Experiment 20000575 PARAMETER Experiment Name: At_100uM_ABA_Mutants__P Parameter: Tissue Value: Whole Plant
  misc_feature: MA Experiment 20000575 PARAMETER Experiment Name: At_100uM_ABA_Mutants__P Parameter: Treatment Value: 1uM ABA vs. No Treatment
  misc_feature: MA Experiment ID: 20001247 Result: Up-regulated in Transcription
  misc_feature: MA Experiment 20001247 PARAMETER Experiment Name: At_Far-red-induction_P Parameter: Age (day) Value: 7
  misc_feature: MA Experiment 20001247 PARAMETER Experiment Name: At_Far-red-induction_P Parameter: Light Value: Far-red vs. White
  misc_feature: MA Experiment 20001247 PARAMETER Experiment Name: At_Far-red-induction_P Parameter: Organism Value: A. thaliana
  misc_feature: MA Experiment 20001247 PARAMETER Experiment Name: At_Far-red-induction_P Parameter: Plant Line Value: Columbia
  misc_feature: MA Experiment 20001247 PARAMETER Experiment Name: At_Far-red-induction_P Parameter: Timepoint (hr) Value: 1
  misc_feature: MA Experiment 20001247 PARAMETER Experiment Name: At_Far-red-induction_P Parameter: Tissue Value: Whole Plant
  misc_feature: MA Experiment ID: 20001248 Result: Up-regulated in Transcription
  misc_feature: MA Experiment 20001248 PARAMETER Experiment Name: At_Far-red-induction_P Parameter: Age (day) Value: 7
  misc_feature: MA Experiment 20001248 PARAMETER Experiment Name: At_Far-red-induction_P Parameter: Light Value: Far-red vs. White
  misc_feature: MA Experiment 20001248 PARAMETER Experiment Name: At_Far-red-induction_P Parameter: Organism Value: A. thaliana
  misc_feature: MA Experiment 20001248 PARAMETER Experiment Name: At_Far-red-induction_P Parameter: Plant Line Value: Columbia
  misc_feature: MA Experiment 20001248 PARAMETER Experiment Name: At_Far-red-induction_P Parameter: Timepoint (hr) Value: 4
  misc_feature: MA Experiment 20001248 PARAMETER Experiment Name: At_Far-red-induction_P Parameter: Tissue Value: Whole Plant
  misc_feature: MA Experiment ID: 20001555 Result: Down-regulated in Transcription
  misc_feature: MA Experiment 20001555 PARAMETER Experiment Name: At_Drought_Soil_Dry_P Parameter: Age (day) Value: 24
  misc_feature: MA Experiment 20001555 PARAMETER Experiment Name: At_Drought_Soil_Dry_P Parameter: Organism Value: A. thaliana
  misc_feature: MA Experiment 20001555 PARAMETER Experiment Name: At_Drought_Soil_Dry_P Parameter: Plant Line Value: WS
  misc_feature: MA Experiment 20001555 PARAMETER Experiment Name: At_Drought_Soil_Dry_P Parameter: Post Timepoint (hr) Value: None
  misc_feature: MA Experiment 20001555 PARAMETER Experiment Name: At_Drought_Soil_Dry_P Parameter: Post-Treatment Value: None
  misc_feature: MA Experiment 20001555 PARAMETER Experiment Name: At_Drought_Soil_Dry_P Parameter: Timepoint (day) Value: 10
  misc_feature: MA Experiment 20001555 PARAMETER Experiment Name: At_Drought_Soil_Dry_P Parameter: Treatment Value: Drought vs. No Drought
  misc_feature: MA Experiment ID: 20001556 Result: Down-regulated in Transcription
  misc_feature: MA Experiment 20001556 PARAMETER Experiment Name: At_Drought_Soil_Dry_P Parameter: Age (day) Value: 26
  misc_feature: MA Experiment 20001556 PARAMETER Experiment Name: At_Drought_Soil_Dry_P Parameter: Organism Value: A. thaliana
  misc_feature: MA Experiment 20001556 PARAMETER Experiment Name: At_Drought_Soil_Dry_P Parameter: Plant Line Value: WS
  misc_feature: MA Experiment 20001556 PARAMETER Experiment Name: At_Drought_Soil_Dry_P Parameter: Post Timepoint (hr) Value: None
  misc_feature: MA Experiment 20001556 PARAMETER Experiment Name: At_Drought_Soil_Dry_P Parameter: Post-Treatment Value: None
  misc_feature: MA Experiment 20001556 PARAMETER Experiment Name: At_Drought_Soil_Dry_P Parameter: Timepoint (day) Value: 12
  misc_feature: MA Experiment 20001556 PARAMETER Experiment Name: At_Drought_Soil_Dry_P Parameter: Treatment Value: Drought vs. No Drought
  misc_feature: MA Experiment ID: 20001557 Result: Down-regulated in Transcription
  misc_feature: MA Experiment 20001557 PARAMETER Experiment Name: At_Drought_Soil_Dry_P Parameter: Age (day) Value: 27
  misc_feature: MA Experiment 20001557 PARAMETER Experiment Name: At_Drought_Soil_Dry_P Parameter: Organism Value: A. thaliana
  misc_feature: MA Experiment 20001557 PARAMETER Experiment Name: At_Drought_Soil_Dry_P Parameter: Plant Line Value: WS
  misc_feature: MA Experiment 20001557 PARAMETER Experiment Name: At_Drought_Soil_Dry_P Parameter: Post Timepoint (hr) Value: 3
  misc_feature: MA Experiment 20001557 PARAMETER Experiment Name: At_Drought_Soil_Dry_P Parameter: Post-Treatment Value: Re-Water vs. No Drought
  misc_feature: MA Experiment 20001557 PARAMETER Experiment Name: At_Drought_Soil_Dry_P Parameter: Timepoint (day) Value: 13
  misc_feature: MA Experiment 20001557 PARAMETER Experiment Name: At_Drought_Soil_Dry_P Parameter: Treatment Value: Drought vs. No Drought
  misc_feature: MA Experiment ID: 20001904 Result: Down-regulated in Transcription
  misc_feature: MA Experiment 20001904 PARAMETER Experiment Name: At_Drought_Reproduction_P Parameter: Age (day) Value: 37
  misc_feature: MA Experiment 20001904 PARAMETER Experiment Name: At_Drought_Reproduction_P Parameter: Organism Value: A. thaliana
  misc_feature: MA Experiment 20001904 PARAMETER Experiment Name: At_Drought_Reproduction_P Parameter: Plant Line Value: WS
  misc_feature: MA Experiment 20001904 PARAMETER Experiment Name: At_Drought_Reproduction_P Parameter: Timepoint (day) Value: 7
  misc_feature: MA Experiment 20001904 PARAMETER Experiment Name: At_Drought_Reproduction_P Parameter: Tissue Value: Rosettes
  misc_feature: MA Experiment 20001904 PARAMETER Experiment Name: At_Drought_Reproduction_P Parameter: Treatment Value: Drought vs. No Drought
  misc_feature: MA Experiment ID: 20001911 Result: Down-regulated in Transcription
  misc_feature: MA Experiment 20001911 PARAMETER Experiment Name: At_Drought_Reproduction_P Parameter: Age (day) Value: 40
  misc_feature: MA Experiment 20001911 PARAMETER Experiment Name: At_Drought_Reproduction_P Parameter: Organism Value: A. thaliana
  misc_feature: MA Experiment 20001911 PARAMETER Experiment Name: At_Drought_Reproduction_P Parameter: Plant Line Value: WS
  misc_feature: MA Experiment 20001911 PARAMETER Experiment Name: At_Drought_Reproduction_P Parameter: Timepoint (day) Value: 10
  misc_feature: MA Experiment 20001911 PARAMETER Experiment Name: At_Drought_Reproduction_P Parameter: Tissue Value: Flowers
  misc_feature: MA Experiment 20001911 PARAMETER Experiment Name: At_Drought_Reproduction_P Parameter: Treatment Value: Drought vs. No Drought
atacaaaacacatatcacactctctttacttcgtcgctttttttttctttagactttccggtgatcggagccaaaaaaaggaaagattcaccggcgaaatggacgaatcttggcgtatgaagatgggtttaagcgttgatccattcttctccattgctcgtaaatcaatggatgctcgtatcgacgcggaagacttcgctgatgttttcggcggtccgccgcgaagcgttctcacccgaaaattttccggcgacttctctcgttccgactgtttctacgacgagatttttcagcctccgggaactttctcctccggcggctctcttgcgtcttctaaatctcacggaagaaacttaccggcattcagaattccgtccggcggggaaggattttacgacggcgtgtttggtggtcgcggcggttctgcgaaggaaggatcgaaaaaacagagctcgatgacgaaaccaagatcgaattcatcgtcgatgctctcttccgaggaggccagtcctcactatcctccaccagcggcagcttccggcgacgactccggattctcttctttcacttctagacttagaccgttaaacgtcccgtcgagaagtcataaacgagagtcaaagaaacagagtttctcggcggttccaaaagcaaaagattcattttccggccaaaataacacaccggaaaaagctgatttctactacaaaaaaacacatttcggcggatcaagaagagcctcgccagaaaccataagcttggatccgaattccttcagaagaatggatgactacggaccaagctcccctgcatcttcccctgtttcttccttcatctgcgaagaagaagacgacaacactcatgctaaacagagaacaaacagagactgtaaagtcgaagaggtagtagtagaagatgaagaagacgaagaagaagaagagatgagctcttacgtcatcgagataaactcagatcgattcgaccgatacagagaagaaggaggaggaggaggaggaaattcagattcaaacgacatggatgaagcaatagcttgggctaaagaaagatctcaaagaccagaagcaaagcaaacagaagaagatgtaatcgattcgagaagaagtgaagaagaacccaaatcagaagaagagatggagatggagatgaaagatgaagagataagaatctggttaaccggaaaagagacaaacattagacttctcctctcaactttacatcatgttctttggtcaaatagcaattgggattcgattcctttagcaaatcttcgagatggatcacaagtgaagaaagcttatcaaagagctcggctttgtttacatccagataagctacaacaaagaggaggaacttcaccgattcaaaaatctgtcgcgagtagagttttcgccattcttcaggaagcatgggctgtgtacgtaacaaatgaaggactctcgagctaaaccggaatccgcaaactacattcttttggtttatattaaaccagaagaatcggtttataatcatgtaagaagaataagagcaaagttaaaggaaaagtttgtttgtttttttgtaaaagactaaaagtcatatgaacattcccatgtgttgcctttgtatattccattgtcaatgttcttatatacag

SEQ ID NO: 83291 - protein, 487 aa, Arabidopsis thaliana
  peptide (1)..(487): Ceres Seq. ID no. 12669567
  misc_feature (410)..(483): Pfam Name: DnaJ domain Pfam Description: DnaJ domain
  misc_feature (33)..(487): Homolog of NCBI NO: 15220709 NR Description: hypothetical protein; protein id: At1g30280.1, by cDNA: gi_17979180 [Arabidopsis thaliana]
  misc_feature (93)..(486): Homolog of NCBI NO: 15219059 NR Description: auxilin-like protein; protein id: At1g21660.1, by cDNA: gi_20466222 [Arabidopsis thaliana]
  misc_feature (366)..(476): Homolog of NCBI NO: 18410769 NR Description: expressed protein; protein id: At1g75100.1, by cDNA: gi_15982794 [Arabidopsis thaliana]
  misc_feature (282)..(483): Homolog of NCBI NO: 5091607 NR Description: Contains similarity to gb|CAB16841 trichohyalin
  misc_feature (332)..(483): Homolog of NCBI NO: 15221008 NR Description: unknown protein; protein id: At1g75310.1
  misc_feature (332)..(483): Homolog of NCBI NO: 11357186 NR Description: auxilin-like protein [imported] - Arabidopsis
  misc_feature (299)..(483): Homolog of NCBI NO: 22328585 NR Description: auxilin-like protein; protein id: At4g12780.1,
  misc_feature (332)..(483): Homolog of NCBI NO: 10120451 NR Description: Unknown protein - partial protein [Arabidopsis
  misc_feature (361)..(483): Homolog of NCBI NO: 15235483 NR Description: auxilin-like protein; protein id: At4g12770.1
  misc_feature (354)..(473): Homolog of NCBI NO: 34912998 NR Description: P0663E10.13 [Oryza sativa (japonica
TKHISHSLYFVAFFFFRLSGDRSQKKERFTGEMDESWRMKMGLSVDPFFSIARKSMDARIDAEDFADVFGGPPRSVLTRKFSGDFSRSDCFYDEIFQPPGTFSSGGSLASSKSHGRNLPAFRIPSGGEGFYDGVFGGRGGSAKEGSKKQSSMTKPRSNSSSMLSSEEASPHYPPPAAASGDDSGFSSFTSRLRPLNVPSRSHKRESKKQSFSAVPKAKDSFSGQNNTPEKADFYYKKTHFGGSRRASPETISLDPNSFRRMDDYGPSSPASSPVSSFICEEEDDNTHAKQRTNRDCKVEEVVVEDEEDEEEEEMSSYVIEINSDRFDRYREEGGGGGGNSDSNDMDEAIAWAKERSQRPEAKQTEEDVIDSRRSEEEPKSEEEMEMEMKDEEIRIWLTGKETNIRLLLSTLHHVLWSNSNWDSIPLANLRDGSQVKKAYQRARLCLHPDKLQQRGGTSPIQKSVASRVFAILQEAWAVYVTNEGLSS

SEQ ID NO: 83292 - protein, 455 aa, Arabidopsis thaliana
  peptide (1)..(455): Ceres Seq. ID no. 12669568
  misc_feature (378)..(451): Pfam Name: DnaJ domain Pfam Description: DnaJ domain
  misc_feature (1)..(455): Homolog of NCBI NO: 15220709 NR Description: hypothetical protein; protein id: At1g30280.1, by cDNA: gi_17979180 [Arabidopsis thaliana]
  misc_feature (61)..(454): Homolog of NCBI NO: 15219059 NR Description: auxilin-like protein; protein id: At1g21660.1, by cDNA: gi_20466222 [Arabidopsis thaliana]
  misc_feature (334)..(444): Homolog of NCBI NO: 18410769 NR Description: expressed protein; protein id: At1g75100.1, by cDNA: gi_15982794 [Arabidopsis thaliana]
  misc_feature (250)..(451): Homolog of NCBI NO: 5091607 NR Description: Contains similarity to gb|CAB16841 trichohyalin
  misc_feature (300)..(451): Homolog of NCBI NO: 15221008 NR Description: unknown protein; protein id: At1g75310.1
  misc_feature (300)..(451): Homolog of NCBI NO: 11357186 NR Description: auxilin-like protein [imported] - Arabidopsis
  misc_feature (267)..(451): Homolog of NCBI NO: 22328585 NR Description: auxilin-like protein; protein id: At4g12780.1,
  misc_feature (300)..(451): Homolog of NCBI NO: 10120451 NR Description: Unknown protein - partial protein [Arabidopsis
  misc_feature (329)..(451): Homolog of NCBI NO: 15235483 NR Description: auxilin-like protein; protein id: At4g12770.1
  misc_feature (322)..(441): Homolog of NCBI NO: 34912998 NR Description: P0663E10.13 [Oryza sativa (japonica
MDESWRMKMGLSVDPFFSIARKSMDARIDAEDFADVFGGPPRSVLTRKFSGDFSRSDCFYDEIFQPPGTFSSGGSLASSKSHGRNLPAFRIPSGGEGFYDGVFGGRGGSAKEGSKKQSSMTKPRSNSSSMLSSEEASPHYPPPAAASGDDSGFSSFTSRLRPLNVPSRSHKRESKKQSFSAVPKAKDSFSGQNNTPEKADFYYKKTHFGGSRRASPETISLDPNSFRRMDDYGPSSPASSPVSSFICEEEDDNTHAKQRTNRDCKVEEVVVEDEEDEEEEEMSSYVIEINSDRFDRYREEGGGGGGNSDSNDMDEAIAWAKERSQRPEAKQTEEDVIDSRRSEEEPKSEEEMEMEMKDEEIRIWLTGKETNIRLLLSTLHHVLWSNSNWDSIPLANLRDGSQVKKAYQRARLCLHPDKLQQRGGTSPIQKSVASRVFAILQEAWAVYVTNEGLSS

SEQ ID NO: 83293 - protein, 449 aa, Arabidopsis thaliana
  peptide (1)..(449): Ceres Seq. ID no. 12669569
  misc_feature (372)..(445): Pfam Name: DnaJ domain Pfam Description: DnaJ domain
  misc_feature (1)..(449): Homolog of NCBI NO: 15220709 NR Description: hypothetical protein; protein id: At1g30280.1, by cDNA: gi_17979180 [Arabidopsis thaliana]
  misc_feature (55)..(448): Homolog of NCBI NO: 15219059 NR Description: auxilin-like protein; protein id: At1g21660.1, by cDNA: gi_20466222 [Arabidopsis thaliana]
  misc_feature (328)..(438): Homolog of NCBI NO: 18410769 NR Description: expressed protein; protein id: At1g75100.1, by cDNA: gi_15982794 [Arabidopsis thaliana]
  misc_feature (244)..(445): Homolog of NCBI NO: 5091607 NR Description: Contains similarity to gb|CAB16841 trichohyalin
  misc_feature (294)..(445): Homolog of NCBI NO: 15221008 NR Description: unknown protein; protein id: At1g75310.1
  misc_feature (294)..(445): Homolog of NCBI NO: 11357186 NR Description: auxilin-like protein [imported] - Arabidopsis
  misc_feature (261)..(445): Homolog of NCBI NO: 22328585 NR Description: auxilin-like protein; protein id: At4g12780.1,
  misc_feature (294)..(445): Homolog of NCBI NO: 10120451 NR Description: Unknown protein - partial protein [Arabidopsis
  misc_feature (323)..(445): Homolog of NCBI NO: 15235483 NR Description: auxilin-like protein; protein id: At4g12770.1
  misc_feature (316)..(435): Homolog of NCBI NO: 34912998 NR Description: P0663E10.13 [Oryza sativa (japonica
MKMGLSVDPFFSIARKSMDARIDAEDFADVFGGPPRSVLTRKFSGDFSRSDCFYDEIFQPPGTFSSGGSLASSKSHGRNLPAFRIPSGGEGFYDGVFGGRGGSAKEGSKKQSSMTKPRSNSSSMLSSEEASPHYPPPAAASGDDSGFSSFTSRLRPLNVPSRSHKRESKKQSFSAVPKAKDSFSGQNNTPEKADFYYKKTHFGGSRRASPETISLDPNSFRRMDDYGPSSPASSPVSSFICEEEDDNTHAKQRTNRDCKVEEVVVEDEEDEEEEEMSSYVIEINSDRFDRYREEGGGGGGNSDSNDMDEAIAWAKERSQRPEAKQTEEDVIDSRRSEEEPKSEEEMEMEMKDEEIRIWLTGKETNIRLLLSTLHHVLWSNSNWDSIPLANLRDGSQVKKAYQRARLCLHPDKLQQRGGTSPIQKSVASRVFAILQEAWAVYVTNEGLSS

SEQ ID NO: 83294 - DNA, 1590 bp, Arabidopsis thaliana
  misc_feature (1)..(1590): Ceres Seq. ID no. 12669574
  misc_feature: MA Experiment ID: 20000185 Result: Up-regulated in Transcription
  misc_feature: MA Experiment 20000185 PARAMETER Experiment Name: At_Roots__P Parameter: Age (day) Value: 7 vs. 21
  misc_feature: MA Experiment 20000185 PARAMETER Experiment Name: At_Roots__P Parameter: Organism Value: A. thaliana
  misc_feature: MA Experiment 20000185 PARAMETER Experiment Name: At_Roots__P Parameter: Tissue Value: Roots vs. Whole Plant
  misc_feature: MA Experiment ID: 20000460 Result: Up-regulated in Transcription
  misc_feature: MA Experiment 20000460 PARAMETER Experiment Name: At_10percent_PEG_P Parameter: Age (day) Value: 12
  misc_feature: MA Experiment 20000460 PARAMETER Experiment Name: At_10percent_PEG_P Parameter: Organism Value: A. thaliana
  misc_feature: MA Experiment 20000460 PARAMETER Experiment Name: At_10percent_PEG_P Parameter: Plant Line Value: WS
  misc_feature: MA Experiment 20000460 PARAMETER Experiment Name: At_10percent_PEG_P Parameter: Timepoint (day) Value: 12
  misc_feature: MA Experiment 20000460 PARAMETER Experiment Name: At_10percent_PEG_P Parameter: Tissue Value: Whole Plant
  misc_feature: MA Experiment 20000460 PARAMETER Experiment Name: At_10percent_PEG_P Parameter: Treatment Value: 10percent PEG vs. No Treatment
  misc_feature: MA Experiment ID: 20000527 Result: Up-regulated in Transcription
  misc_feature: MA Experiment 20000527 PARAMETER Experiment Name: At_10percent_PEG_P Parameter: Age (day) Value: 20
  misc_feature: MA Experiment 20000527 PARAMETER Experiment Name: At_10percent_PEG_P Parameter: Organism Value: A. thaliana
  misc_feature: MA Experiment 20000527 PARAMETER Experiment Name: At_10percent_PEG_P Parameter: Plant Line Value: WS
  misc_feature: MA Experiment 20000527 PARAMETER Experiment Name: At_10percent_PEG_P Parameter: Timepoint (day) Value: 20
  misc_feature: MA Experiment 20000527 PARAMETER Experiment Name: At_10percent_PEG_P Parameter: Tissue Value: Whole Plant
  misc_feature: MA Experiment 20000527 PARAMETER Experiment Name: At_10percent_PEG_P Parameter: Treatment Value: 10percent PEG vs. No Treatment
  misc_feature: MA Experiment ID: 20001904 Result: Down-regulated in Transcription
  misc_feature: MA Experiment 20001904 PARAMETER Experiment Name: At_Drought_Reproduction_P Parameter: Age (day) Value: 37
  misc_feature: MA Experiment 20001904 PARAMETER Experiment Name: At_Drought_Reproduction_P Parameter: Organism Value: A. thaliana
  misc_feature: MA Experiment 20001904 PARAMETER Experiment Name: At_Drought_Reproduction_P Parameter: Plant Line Value: WS
  misc_feature: MA Experiment 20001904 PARAMETER Experiment Name: At_Drought_Reproduction_P Parameter: Timepoint (day) Value: 7
  misc_feature: MA Experiment 20001904 PARAMETER Experiment Name: At_Drought_Reproduction_P Parameter: Tissue Value: Rosettes
  misc_feature: MA Experiment 20001904 PARAMETER Experiment Name: At_Drought_Reproduction_P Parameter: Treatment Value: Drought vs. No Drought
atggagaacgcattggtcaaaactccactgagaaagctaagaagaagaagaactaaacgggtctggagattgaagcagaagctaaagcttgcatggaaatctatcaagatccgggtcaagtcacatcttccgggtttcttgtcaaccaagaaacacctcttccacattaaatcacgaaaggaagaacaagatttgtctcaagtggcccagaggatctgcaaaatctccaatgactcgaccaaatcactggcgtttctacttcagcttccaaaatactcagccgacgattttcttgaccgcggcgatctgatgactccagctgcgtctccaagggaaaaaatatccaaaatgtggcgtgagcttcacggtagcaacaattgggagaatcttcttgatcctctgcatccatggcttaggagagaagtaaccaaatatggagaattcgtggaatccgtttatgattcacttgatttcgatcctttatccgaattctgtggaagctctagatacaacaggaacaaactctttgaagagcttggtttaaccagacatggttacaaggtaacgaaatacatctacgcgatgtctcgtgtcgacgttcctcagtggttcttaagctcggctttgggagagacatggagcaaagattccaactggatgggctttgtagctgtgagtggagacagagagtcgttgaggattggtcggagagacattgttgtggcgtggcgtggaacggtgactcccacggaatggttcatggatcttaggacgagtatggagccgttcgattgtgaaggaaaacatggcaagaccgtggttaaggtgcaaagtgggtttttaagtatctacaactcgaaaagcgaactcacacggtacaacaaagaaagtgcatctgagcagacgatggatgaagtgaagcggctagtgaatttttttaaggatagaggcgaagaggtaagcctaaccattaccgggcatagcctcggaggtgcgctggcgcttatgaacgcttacgaggcggctagagatgttccagcgttatctggtaacatttcagtgatctcgtttggtgcgccgagggtaggtaacttggcattcaaggaaaagctaaacagtttaggagttaaggtgttacgtgtggtgaacaagcaagacattgtacctaagctacctggtatcgtgttcaacaaggtacttaacaaacttaatccgataacttcaaggctcaattgggtctacaggcatgtcggaacgcagcttaaactcgatgtcttcagttcgccttacgtaaaacgtgattcagacttagggagggctcataatctagaggtgtatctccatgttttggatggcttccaccgcaagaaatctgggtttagggttaacgctaggagagacgttgcttcggtgaacaagagcacagatatgttgttggatcatctaagaatacctgagttttggtaccaagtggcacataagggtctgatccttaacaaacagactggccggtgggtgaagcctgtccgtgcacctgaagacattccctctccgttaccgaccggaccaaaacctatttatagcttatga

SEQ ID NO: 83295 - protein, 529 aa, Arabidopsis thaliana
  peptide (1)..(529): Ceres Seq. ID no. 12669575
  misc_feature (1)..(529): Homolog of NCBI NO: 15220732 NR Description: lipase, putative; protein id: At1g30370.1
  misc_feature (78)..(514): Homolog of NCBI NO: 30679836 NR Description: lipase (class 3) family [Arabidopsis thaliana]
  misc_feature (58)..(518): Homolog of NCBI NO: 18402385 NR Description: putative lipase; protein id: At2g30550.1, by cDNA: 207043., supported by cDNA: gi_20268777 [Arabidopsis >gi|20198327|gb|AAB63082.2| putative lipase [Arabidopsis
  misc_feature (93)..(518): Homolog of NCBI NO: 25408087 NR Description: probable lipase [imported] - Arabidopsis thaliana
  misc_feature (114)..(526): Homolog of NCBI NO: 18403524 NR Description: expressed protein; protein id: At1g51440.1, by cDNA: gi_15983395 [Arabidopsis thaliana]
  misc_feature (78)..(452): Homolog of NCBI NO: 18390691 NR Description: lipase, putative; protein id: At1g06800.1, by cDNA: gi_15529150 [Arabidopsis thaliana] At1g06800/F4H5_10 [Arabidopsis thaliana]
  misc_feature (58)..(453): Homolog of NCBI NO: 30684625 NR Description: lipase (class 3) family [Arabidopsis thaliana]
  misc_feature (109)..(509): Homolog of NCBI NO: 7488220 NR Description: probable triacylglycerol lipase - Arabidopsis >gi|2245036|emb|CAB10455.1| triacylglycerol lipase like protein thaliana] >gi|7268433|emb|CAB80953.1| triacylglycerol lipase like
  misc_feature (109)..(468): Homolog of NCBI NO: 18414755 NR Description: triacylglycerol lipase like protein; protein id:
  misc_feature (107)..(457): Homolog of NCBI NO: 34907690 NR Description: putative triacylglycerol lipase [Oryza sativa
MENALVKTPLRKLRRRRTKRVWRLKQKLKLAWKSIKIRVKSHLPGFLSTKKHLFHIKSRKEEQDLSQVAQRICKISNDSTKSLAFLLQLPKYSADDFLDRGDLMTPAASPREKISKMWRELHGSNNWENLLDPLHPWLRREVTKYGEFVESVYDSLDFDPLSEFCGSSRYNRNKLFEELGLTRHGYKVTKYIYAMSRVDVPQWFLSSALGETWSKDSNWMGFVAVSGDRESLRIGRRDIVVAWRGTVTPTEWFMDLRTSMEPFDCEGKHGKTVVKVQSGFLSIYNSKSELTRYNKESASEQTMDEVKRLVNFFKDRGEEVSLTITGHSLGGALALMNAYEAARDVPALSGNISVISFGAPRVGNLAFKEKLNSLGVKVLRVVNKQDIVPKLPGIVFNKVLNKLNPITSRLNWVYRHVGTQLKLDVFSSPYVKRDSDLGRAHNLEVYLHVLDGFHRKKSGFRVNARRDVASVNKSTDMLLDHLRIPEFWYQVAHKGLILNKQTGRWVKPVRAPEDIPSPLPTGPKPIYSL

SEQ ID NO: 83296 - protein, 426 aa, Arabidopsis thaliana
  peptide (1)..(426): Ceres Seq. ID no. 12669576
  misc_feature (1)..(426): Homolog of NCBI NO: 15220732 NR Description: lipase, putative; protein id: At1g30370.1
  misc_feature (1)..(411): Homolog of NCBI NO: 30679836 NR Description: lipase (class 3) family [Arabidopsis thaliana]
  misc_feature (1)..(415): Homolog of NCBI NO: 18402385 NR Description: putative lipase; protein id: At2g30550.1, by cDNA: 207043., supported by cDNA: gi_20268777 [Arabidopsis >gi|20198327|gb|AAB63082.2| putative lipase [Arabidopsis
  misc_feature (1)..(415): Homolog of NCBI NO: 25408087 NR Description: probable lipase [imported] - Arabidopsis thaliana
  misc_feature (11)..(423): Homolog of NCBI NO: 18403524 NR Description: expressed protein; protein id: At1g51440.1, by cDNA: gi_15983395 [Arabidopsis thaliana]
  misc_feature (1)..(349): Homolog of NCBI NO: 18390691 NR Description: lipase, putative; protein id: At1g06800.1, by cDNA: gi_15529150 [Arabidopsis thaliana] At1g06800/F4H5_10 [Arabidopsis thaliana]
  misc_feature (1)..(350): Homolog of NCBI NO: 30684625 NR Description: lipase (class 3) family [Arabidopsis thaliana]
  misc_feature (6)..(406): Homolog of NCBI NO: 7488220 NR Description: probable triacylglycerol lipase - Arabidopsis >gi|2245036|emb|CAB10455.1| triacylglycerol lipase like protein thaliana] >gi|7268433|emb|CAB80953.1| triacylglycerol lipase like
  misc_feature (6)..(365): Homolog of NCBI NO: 18414755 NR Description: triacylglycerol lipase like protein; protein id:
  misc_feature (4)..(354): Homolog of NCBI NO: 34907690 NR Description: putative triacylglycerol lipase [Oryza sativa
MTPAASPREKISKMWRELHGSNNWENLLDPLHPWLRREVTKYGEFVESVYDSLDFDPLSEFCGSSRYNRNKLFEELGLTRHGYKVTKYIYAMSRVDVPQWFLSSALGETWSKDSNWMGFVAVSGDRESLRIGRRDIVVAWRGTVTPTEWFMDLRTSMEPFDCEGKHGKTVVKVQSGFLSIYNSKSELTRYNKESASEQTMDEVKRLVNFFKDRGEEVSLTITGHSLGGALALMNAYEAARDVPALSGNISVISFGAPRVGNLAFKEKLNSLGVKVLRVVNKQDIVPKLPGIVFNKVLNKLNPITSRLNWVYRHVGTQLKLDVFSSPYVKRDSDLGRAHNLEVYLHVLDGFHRKKSGFRVNARRDVASVNKSTDMLLDHLRIPEFWYQVAHKGLILNKQTGRWVKPVRAPEDIPSPLPTGPKPIYSL

SEQ ID NO: 83297 - protein, 413 aa, Arabidopsis thaliana
  peptide (1)..(413): Ceres Seq. ID no. 12669577
  misc_feature (1)..(413): Homolog of NCBI NO: 15220732 NR Description: lipase, putative; protein id: At1g30370.1
  misc_feature (1)..(398): Homolog of NCBI NO: 30679836 NR Description: lipase (class 3) family [Arabidopsis thaliana]
  misc_feature (1)..(402): Homolog of NCBI NO: 18402385 NR Description: putative lipase; protein id: At2g30550.1, by cDNA: 207043., supported by cDNA: gi_20268777 [Arabidopsis >gi|20198327|gb|AAB63082.2| putative lipase [Arabidopsis
  misc_feature (1)..(402): Homolog of NCBI NO: 25408087 NR Description: probable lipase [imported] - Arabidopsis thaliana
  misc_feature (1)..(410): Homolog of NCBI NO: 18403524 NR Description: expressed protein; protein id: At1g51440.1, by cDNA: gi_15983395 [Arabidopsis thaliana]
  misc_feature (1)..(336): Homolog of NCBI NO: 18390691 NR Description: lipase, putative; protein id: At1g06800.1, by cDNA: gi_15529150 [Arabidopsis thaliana] At1g06800/F4H5_10 [Arabidopsis thaliana]
  misc_feature (1)..(337): Homolog of NCBI NO: 30684625 NR Description: lipase (class 3) family [Arabidopsis thaliana]
  misc_feature (1)..(393): Homolog of NCBI NO: 7488220 NR Description: probable triacylglycerol lipase - Arabidopsis >gi|2245036|emb|CAB10455.1| triacylglycerol lipase like protein thaliana] >gi|7268433|emb|CAB80953.1| triacylglycerol lipase like
  misc_feature (1)..(352): Homolog of NCBI NO: 18414755 NR Description: triacylglycerol lipase like protein; protein id:
  misc_feature (1)..(341): Homolog of NCBI NO: 34907690 NR Description: putative triacylglycerol lipase [Oryza sativa
MWRELHGSNNWENLLDPLHPWLRREVTKYGEFVESVYDSLDFDPLSEFCGSSRYNRNKLFEELGLTRHGYKVTKYIYAMSRVDVPQWFLSSALGETWSKDSNWMGFVAVSGDRESLRIGRRDIVVAWRGTVTPTEWFMDLRTSMEPFDCEGKHGKTVVKVQSGFLSIYNSKSELTRYNKESASEQTMDEVKRLVNFFKDRGEEVSLTITGHSLGGALALMNAYEAARDVPALSGNISVISFGAPRVGNLAFKEKLNSLGVKVLRVVNKQDIVPKLPGIVFNKVLNKLNPITSRLNWVYRHVGTQLKLDVFSSPYVKRDSDLGRAHNLEVYLHVLDGFHRKKSGFRVNARRDVASVNKSTDMLLDHLRIPEFWYQVAHKGLILNKQTGRWVKPVRAPEDIPSPLPTGPKPIYSL

SEQ ID NO: 83298 - DNA, 1813 bp, Arabidopsis thaliana
  misc_feature (1)..(1813): Ceres Seq. ID no. 12669585
  misc_feature: MA Experiment ID: 20000180 Result: Up-regulated in Transcription
  misc_feature: MA Experiment 20000180 PARAMETER Experiment Name: At_Germinating_Seeds_P Parameter: Age (hr) Value: 24 vs. 0
  misc_feature: MA Experiment 20000180 PARAMETER Experiment Name: At_Germinating_Seeds_P Parameter: Tissue Value: Germinating Seeds
  misc_feature: MA Experiment ID: 20000182 Result: Down-regulated in Transcription
  misc_feature: MA Experiment 20000182 PARAMETER Experiment Name: At_2mM_SA_P Parameter: Age (day) Value: 14
  misc_feature: MA Experiment 20000182 PARAMETER Experiment Name: At_2mM_SA_P Parameter: Organism Value: A. thaliana
  misc_feature: MA Experiment 20000182 PARAMETER Experiment Name: At_2mM_SA_P Parameter: Plant Line Value: WS
  misc_feature: MA Experiment 20000182 PARAMETER Experiment Name: At_2mM_SA_P Parameter: Timepoint (hr) Value: 6
  misc_feature: MA Experiment 20000182 PARAMETER Experiment Name: At_2mM_SA_P Parameter: Tissue Value: Aerial
  misc_feature: MA Experiment 20000182 PARAMETER Experiment Name: At_2mM_SA_P Parameter: Treatment Value: 2mM SA vs. No Treatment
  misc_feature: MA Experiment ID: 20000185 Result: Down-regulated in Transcription
  misc_feature: MA Experiment 20000185 PARAMETER Experiment Name: At_Roots__P Parameter: Age (day) Value: 7 vs. 21
  misc_feature: MA Experiment 20000185 PARAMETER Experiment Name: At_Roots__P Parameter: Organism Value: A. thaliana
  misc_feature: MA Experiment 20000185 PARAMETER Experiment Name: At_Roots__P Parameter: Tissue Value: Roots vs. Whole Plant
  misc_feature: MA Experiment ID: 20000234 Result: Up-regulated in Transcription
  misc_feature: MA Experiment 20000234 PARAMETER Experiment Name: At_Siliques_P Parameter: Age (day) Value: 21
  misc_feature: MA Experiment 20000234 PARAMETER Experiment Name: At_Siliques_P Parameter: Organism Value: A. thaliana
  misc_feature: MA Experiment 20000234 PARAMETER Experiment Name: At_Siliques_P Parameter: Plant Line Value: WS
  misc_feature: MA Experiment 20000234 PARAMETER Experiment Name: At_Siliques_P Parameter: Tissue Value: Less Than 5mm Siliques vs. Whole Plant
  misc_feature: MA Experiment ID: 20000436 Result: Down-regulated in Transcription
  misc_feature: MA Experiment 20000436 PARAMETER Experiment Name: At_Drought_P Parameter: Age (day) Value: 7
  misc_feature: MA Experiment 20000436 PARAMETER Experiment Name: At_Drought_P Parameter: Organism Value: A. thaliana
  misc_feature: MA Experiment 20000436 PARAMETER Experiment Name: At_Drought_P Parameter: Plant Line Value: WS
  misc_feature: MA Experiment 20000436 PARAMETER Experiment Name: At_Drought_P Parameter: Timepoint (hr) Value: 12
  misc_feature: MA Experiment 20000436 PARAMETER Experiment Name: At_Drought_P Parameter: Tissue Value: Whole Plant
  misc_feature: MA Experiment 20000436 PARAMETER Experiment Name: At_Drought_P Parameter: Treatment Value: Drought vs. No Drought
  misc_feature: MA Experiment ID: 20000437 Result: Down-regulated in Transcription
  misc_feature: MA Experiment 20000437 PARAMETER Experiment Name: At_Drought_P Parameter: Age (day) Value: 8
  misc_feature: MA Experiment 20000437 PARAMETER Experiment Name: At_Drought_P Parameter: Organism Value: A. thaliana
  misc_feature: MA Experiment 20000437 PARAMETER Experiment Name: At_Drought_P Parameter: Plant Line Value: WS
  misc_feature: MA Experiment 20000437 PARAMETER Experiment Name: At_Drought_P Parameter: Timepoint (hr) Value: 24
  misc_feature: MA Experiment 20000437 PARAMETER Experiment Name: At_Drought_P Parameter: Tissue Value: Whole Plant
  misc_feature: MA Experiment 20000437 PARAMETER Experiment Name: At_Drought_P Parameter: Treatment Value: Drought vs. No Drought
  misc_feature: MA Experiment ID: 20000438 Result: Up-regulated in Transcription
  misc_feature: MA Experiment 20000438 PARAMETER Experiment Name: At_Shoots__P Parameter: Age (day) Value: 14
  misc_feature: MA Experiment 20000438 PARAMETER Experiment Name: At_Shoots__P Parameter: Tissue Value: Shoots vs. Whole Plant
  misc_feature: MA Experiment ID: 20000439 Result: Down-regulated in Transcription
  misc_feature: MA Experiment 20000439 PARAMETER Experiment Name: At_Roots__P Parameter: Age (day) Value: 14 vs. 21
  misc_feature: MA Experiment 20000439 PARAMETER Experiment Name: At_Roots__P Parameter: Organism Value: A. thaliana
  misc_feature: MA Experiment 20000439 PARAMETER Experiment Name: At_Roots__P Parameter: Tissue Value: Roots vs. Whole Plant
  misc_feature: MA Experiment ID: 20001248 Result: Down-regulated in Transcription
  misc_feature: MA Experiment 20001248 PARAMETER Experiment Name: At_Far-red-induction_P Parameter: Age (day) Value: 7
  misc_feature: MA Experiment 20001248 PARAMETER Experiment Name: At_Far-red-induction_P Parameter: Light Value: Far-red vs. White
  misc_feature: MA Experiment 20001248 PARAMETER Experiment Name: At_Far-red-induction_P Parameter: Organism Value: A. thaliana
  misc_feature: MA Experiment 20001248 PARAMETER Experiment Name: At_Far-red-induction_P Parameter: Plant Line Value: Columbia
  misc_feature: MA Experiment 20001248 PARAMETER Experiment Name: At_Far-red-induction_P Parameter: Timepoint (hr) Value: 4
  misc_feature: MA Experiment 20001248 PARAMETER Experiment Name: At_Far-red-induction_P Parameter: Tissue Value: Whole Plant
  misc_feature: MA Experiment ID: 20001757 Result: Up-regulated in Transcription
  misc_feature: MA Experiment 20001757 PARAMETER Experiment Name: At_50mM_NH4NO3_L-to-H_P Parameter: Timepoint (hr) Value: 6
  misc_feature: MA Experiment 20001757 PARAMETER Experiment Name: At_50mM_NH4NO3_L-to-H_P Parameter: Tissue Value: Leaf
  misc_feature: MA Experiment 20001757 PARAMETER Experiment Name: At_50mM_NH4NO3_L-to-H_P Parameter: Treatment Value: 50mM NH4NO3 vs 100mM Mannitol
  misc_feature: MA Experiment ID: 20001906 Result: Down-regulated in Transcription
  misc_feature: MA Experiment 20001906 PARAMETER Experiment Name: At_Drought_Reproduction_P Parameter: Age (day) Value: 35
  misc_feature: MA Experiment 20001906 PARAMETER Experiment Name: At_Drought_Reproduction_P Parameter: Organism Value: A. thaliana
  misc_feature: MA Experiment 20001906 PARAMETER Experiment Name: At_Drought_Reproduction_P Parameter: Plant Line Value: WS
  misc_feature: MA Experiment 20001906 PARAMETER Experiment Name: At_Drought_Reproduction_P Parameter: Timepoint (day) Value: 5
  misc_feature: MA Experiment 20001906 PARAMETER Experiment Name: At_Drought_Reproduction_P Parameter: Tissue Value: Siliques
  misc_feature: MA Experiment 20001906 PARAMETER Experiment Name: At_Drought_Reproduction_P Parameter: Treatment Value: Drought vs. No Drought
ttcttccagtaaacttggatgacactgtgaatttcataatttgcccttctccggaatggctaatcactctcggcctcacatctgccagtgtttgactcggctagcctccgtcaaacggaacgccgtcgtcacagtctacggaaaccggaagcgcaccggcagggagttcgttgacggcgtactgagccttgccgccggactgattcgtctcggcctccgaaacggtgatgtcgtctctattgctgcttttaacagtgatttgttcttggagtggttattagctgttgcattggttggaggagtagttgctcctttgaattacagatggagcttgaaagaagcaaaaatggcaatgctgctagtagaacctgtgcttttggttactgatgagacatgtgtctcgtggtgcattgatgttcaaaatggagatataccttccttgaaatggcgtgtgttgatggagtctacttcaacagattttgcaaatgaacttaaccagtttttgacaaccgagatgcttaaacagcgtacactggtgccttccttagcaacgtatgcttgggcttctgatgatgctgttgttatatgtttcacttctggtacaacgggaagacccaagggtgtgacgataagccacttggctttcataacacagtctctagctaagattgctattgctggctacggtgaggatgatgtgtatttgcacacgtctccattagttcatatcggcggtctgtcatcagctatggccatgctaatggttggagcttgccatgttctgctgcccaagtttgatgccaaaacagctcttcaagttatggaacaaaaccatataacttgcttcatcaccgtcccagctatgatggctgatcttattcgtgtcaacaggacaacgaaaaatggagctgaaaaccgcggtgtgagaaagatactaaacggaggtggatctttatcaagcgaactccttaaagaagctgtgaacatcttcccatgtgcgaggatactttcagcatatgggatgacagaggcgtgctcttcgctgaccttcatgactctccatgatccaacacaagagtcttttaaggtgacttatcctttgcttaaccaaccaaagcaaggcacatgtgttggcaagcctgcccctcatatcgaactgatggttaaactcgacgaagattcatcgagggtcgggaaaattctaacgcgcggaccacacactatgcttagatattggggtcatcaagtagctcaagaaaatgttgaaacatcagaatccagaagcaatgaagcttggcttgacacaggtgatatcggggcctttgatgagtttggtaacttatggcttataggccggtccaatggccgaatcaagactggaggcgagaatgtttaccccgaagaggtggaagctgttctagtagagcatccagggattgtttctgctgtggtgataggcgtcattgatactcgtcttggagagatggtcgttgcttgtgttcgtttacaggagaaatggatatggtctgatgttgaaaaccgtaaaggaagtttccaactgtcaagtgagacactcaaacatcattgcagaacacagaacctaaccgggtttaagataccgaagaggtttgtccgatgggagaagcagtttccgttgacaacaactgggaaagtgaaaagagatgaagttcgaagacaagttttgtctcatttccaaatcatgactagctctctctgatcattacaattttaaaccgttaaaacattctttatttgtttgatgatacaaatttttagttagttttagtttgat

SEQ ID NO: 83299 - protein, 560 aa, Arabidopsis thaliana
  peptide (1)..(560): Ceres Seq. ID no. 12669586
  misc_feature (215)..(466): Pfam Name: AMP-binding enzyme Pfam Description: AMP-binding enzyme
  misc_feature (1)..(560): Homolog of NCBI NO: 22329863 NR Description: hypothetical protein; protein id: At1g30520.1, by cDNA: gi_17979486 [Arabidopsis thaliana]
  misc_feature (215)..(560): Homolog of NCBI NO: 25518447 NR Description: hypothetical protein F26G16.14 - Arabidopsis >gi|6634775|gb|AAF19755.1|AC009917_14 Contains similarity to
  misc_feature (1)..(230): Homolog of NCBI NO: 25518447 NR Description: hypothetical protein F26G16.14 - Arabidopsis >gi|6634775|gb|AAF19755.1|AC009917_14 Contains similarity to
  misc_feature (4)..(555): Homolog of NCBI NO: 29467533 NR Description: P0582D05.26 [Oryza sativa (japonica
  misc_feature (8)..(482): Homolog of NCBI NO: 22965208 NR Description: hypothetical protein [Rhodopseudomonas palustris]
  misc_feature (8)..(482): Homolog of NCBI NO: 39936362 NR Description: putative long-chain-fatty-acid CoA ligase
  misc_feature (8)..(482): Homolog of NCBI NO: 22979187 NR Description: hypothetical protein [Ralstonia metallidurans]
  misc_feature (8)..(486): Homolog of NCBI NO: 22977075 NR Description: hypothetical protein [Ralstonia metallidurans]
  misc_feature (171)..(482): Homolog of NCBI NO: 39934486 NR Description: putative fatty-acid--CoA ligase [Rhodopseudomonas
  misc_feature (13)..(113): Homolog of NCBI NO: 39934486 NR Description: putative fatty-acid--CoA ligase [Rhodopseudomonas
MANHSRPHICQCLTRLASVKRNAVVTVYGNRKRTGREFVDGVLSLAAGLIRLGLRNGDVVSIAAFNSDLFLEWLLAVALVGGVVAPLNYRWSLKEAKMAMLLVEPVLLVTDETCVSWCIDVQNGDIPSLKWRVLMESTSTDFANELNQFLTTEMLKQRTLVPSLATYAWASDDAVVICFTSGTTGRPKGVTISHLAFITQSLAKIAIAGYGEDDVYLHTSPLVHIGGLSSAMAMLMVGACHVLLPKFDAKTALQVMEQNHITCFITVPAMMADLIRVNRTTKNGAENRGVRKILNGGGSLSSELLKEAVNIFPCARILSAYGMTEACSSLTFMTLHDPTQESFKVTYPLLNQPKQGTCVGKPAPHIELMVKLDEDSSRVGKILTRGPHTMLRYWGHQVAQENVETSESRSNEAWLDTGDIGAFDEFGNLWLIGRSNGRIKTGGENVYPEEVEAVLVEHPGIVSAVVIGVIDTRLGEMVVACVRLQEKWIWSDVENRKGSFQLSSETLKHHCRTQNLTGFKIPKRFVRWEKQFPLTTTGKVKRDEVRRQVLSHFQIMTSSL

SEQ ID NO: 83300 - protein, 463 aa, Arabidopsis thaliana
  peptide (1)..(463): Ceres Seq. ID no. 12669587
  misc_feature (118)..(369): Pfam Name: AMP-binding enzyme Pfam Description: AMP-binding enzyme
  misc_feature (1)..(463): Homolog of NCBI NO: 22329863 NR Description: hypothetical protein; protein id: At1g30520.1, by cDNA: gi_17979486 [Arabidopsis thaliana]
  misc_feature (118)..(463): Homolog of NCBI NO: 25518447 NR Description: hypothetical protein F26G16.14 - Arabidopsis >gi|6634775|gb|AAF19755.1|AC009917_14 Contains similarity to
  misc_feature (1)..(133): Homolog of NCBI NO: 25518447 NR Description: hypothetical protein F26G16.14 - Arabidopsis >gi|6634775|gb|AAF19755.1|AC009917_14 Contains similarity to
  misc_feature (1)..(458): Homolog of NCBI NO: 29467533 NR Description: P0582D05.26 [Oryza sativa (japonica
  misc_feature (1)..(385): Homolog of NCBI NO: 22965208 NR Description: hypothetical protein [Rhodopseudomonas palustris]
  misc_feature (1)..(385): Homolog of NCBI NO: 39936362 NR Description: putative long-chain-fatty-acid CoA ligase
  misc_feature (1)..(385): Homolog of NCBI NO: 22979187 NR Description: hypothetical protein [Ralstonia metallidurans]
  misc_feature (1)..(389): Homolog of NCBI NO: 22977075 NR Description: hypothetical protein [Ralstonia metallidurans]
  misc_feature (74)..(385): Homolog of NCBI NO: 39934486 NR Description: putative fatty-acid--CoA ligase [Rhodopseudomonas
  misc_feature (1)..(16): Homolog of NCBI NO: 39934486 NR Description: putative fatty-acid--CoA ligase [Rhodopseudomonas
MAMLLVEPVLLVTDETCVSWCIDVQNGDIPSLKWRVLMESTSTDFANELNQFLTTEMLKQRTLVPSLATYAWASDDAVVICFTSGTTGRPKGVTISHLAFITQSLAKIAIAGYGEDDVYLHTSPLVHIGGLSSAMAMLMVGACHVLLPKFDAKTALQVMEQNHITCFITVPAMMADLIRVNRTTKNGAENRGVRKILNGGGSLSSELLKEAVNIFPCARILSAYGMTEACSSLTFMTLHDPTQESFKVTYPLLNQPKQGTCVGKPAPHIELMVKLDEDSSRVGKILTRGPHTMLRYWGHQVAQENVETSESRSNEAWLDTGDIGAFDEFGNLWLIGRSNGRIKTGGENVYPEEVEAVLVEHPGIVSAVVIGVIDTRLGEMVVACVRLQEKWIWSDVENRKGSFQLSSETLKHHCRTQNLTGFKIPKRFVRWEKQFPLTTTGKVKRDEVRRQVLSHFQIMTSSL

SEQ ID NO: 83301 - protein, 461 aa, Arabidopsis thaliana
  peptide (1)..(461): Ceres Seq. ID no. 12669588
  misc_feature (116)..(367): Pfam Name: AMP-binding enzyme Pfam Description: AMP-binding enzyme
  misc_feature (1)..(461): Homolog of NCBI NO: 22329863 NR Description: hypothetical protein; protein id: At1g30520.1, by cDNA: gi_17979486 [Arabidopsis thaliana]
  misc_feature (116)..(461): Homolog of NCBI NO: 25518447 NR Description: hypothetical protein F26G16.14 - Arabidopsis >gi|6634775|gb|AAF19755.1|AC009917_14 Contains similarity to
  misc_feature (1)..(131): Homolog of NCBI NO: 25518447 NR Description: hypothetical protein F26G16.14 - Arabidopsis >gi|6634775|gb|AAF19755.1|AC009917_14 Contains similarity to
  misc_feature (1)..(456): Homolog of NCBI NO: 29467533 NR Description: P0582D05.26 [Oryza sativa (japonica
  misc_feature (1)..(383): Homolog of NCBI NO: 22965208 NR Description: hypothetical protein [Rhodopseudomonas palustris]
  misc_feature (1)..(383): Homolog of NCBI NO: 39936362 NR Description: putative long-chain-fatty-acid CoA ligase
  misc_feature (1)..(383): Homolog of NCBI NO: 22979187 NR Description: hypothetical protein [Ralstonia metallidurans]
  misc_feature (1)..(387): Homolog of NCBI NO: 22977075 NR Description: hypothetical protein [Ralstonia metallidurans]
  misc_feature (72)..(383): Homolog of NCBI NO: 39934486 NR Description: putative fatty-acid--CoA ligase [Rhodopseudomonas
  misc_feature (1)..(14): Homolog of NCBI NO: 39934486 NR Description: putative fatty-acid--CoA ligase [Rhodopseudomonas
MLLVEPVLLVTDETCVSWCIDVQNGDIPSLKWRVLMESTSTDFANELNQFLTTEMLKQRTLVPSLATYAWASDDAVVICFTSGTTGRPKGVTISHLAFITQSLAKIAIAGYGEDDVYLHTSPLVHIGGLSSAMAMLMVGACHVLLPKFDAKTALQVMEQNHITCFITVPAMMADLIRVNRTTKNGAENRGVRKILNGGGSLSSELLKEAVNIFPCARILSAYGMTEACSSLTFMTLHDPTQESFKVTYPLLNQPKQGTCVGKPAPHIELMVKLDEDSSRVGKILTRGPHTMLRYWGHQVAQENVETSESRSNEAWLDTGDIGAFDEFGNLWLIGRSNGRIKTGGENVYPEEVEAVLVEHPGIVSAVVIGVIDTRLGEMVVACVRLQEKWIWSDVENRKGSFQLSSETLKHHCRTQNLTGFKIPKRFVRWEKQFPLTTTGKVKRDEVRRQVLSHFQIMTSSL

SEQ ID NO: 83302 - DNA, 2550 bp, Arabidopsis thaliana
  misc_feature (1)..(2550): Ceres Seq. ID no. 12669593
  misc_feature: MA Experiment ID: 20000171 Result: Down-regulated in Transcription
  misc_feature: MA Experiment 20000171 PARAMETER Experiment Name: At_42deg_Heat_P Parameter: Age (day) Value: 14
  misc_feature: MA Experiment 20000171 PARAMETER Experiment Name: At_42deg_Heat_P Parameter: Organism Value: A. thaliana
  misc_feature: MA Experiment 20000171 PARAMETER Experiment Name: At_42deg_Heat_P Parameter: Plant Line Value: WS
  misc_feature: MA Experiment 20000171 PARAMETER Experiment Name: At_42deg_Heat_P Parameter: Temperature (deg C) Value: 42 vs. 22
  misc_feature: MA Experiment 20000171 PARAMETER Experiment Name: At_42deg_Heat_P Parameter: Timepoint (hr) Value: 1
  misc_feature: MA Experiment 20000171 PARAMETER Experiment Name: At_42deg_Heat_P Parameter: Tissue Value: Aerial
  misc_feature: MA Experiment ID: 20000180 Result: Up-regulated in Transcription
  misc_feature: MA Experiment 20000180 PARAMETER Experiment Name: At_Germinating_Seeds_P Parameter: Age (hr) Value: 24 vs. 0
  misc_feature: MA Experiment 20000180 PARAMETER Experiment Name: At_Germinating_Seeds_P Parameter: Tissue Value: Germinating Seeds
  misc_feature: MA Experiment ID: 20000182 Result: Down-regulated in Transcription
  misc_feature: MA Experiment 20000182 PARAMETER Experiment Name: At_2mM_SA_P Parameter: Age (day) Value: 14
  misc_feature: MA Experiment 20000182 PARAMETER Experiment Name: At_2mM_SA_P Parameter: Organism Value: A. thaliana
  misc_feature: MA Experiment 20000182 PARAMETER Experiment Name: At_2mM_SA_P Parameter: Plant Line Value: WS
  misc_feature: MA Experiment 20000182 PARAMETER Experiment Name: At_2mM_SA_P Parameter: Timepoint (hr) Value: 6
  misc_feature: MA Experiment 20000182 PARAMETER Experiment Name: At_2mM_SA_P Parameter: Tissue Value: Aerial
  misc_feature: MA Experiment 20000182 PARAMETER Experiment Name: At_2mM_SA_P Parameter: Treatment Value: 2mM SA vs. No Treatment
  misc_feature: MA Experiment ID: 20000184 Result: Up-regulated in Transcription
  misc_feature: MA Experiment 20000184 PARAMETER Experiment Name: At_Shoots__P Parameter: Age (day) Value: 7
  misc_feature: MA Experiment 20000184 PARAMETER Experiment Name: At_Shoots__P Parameter: Tissue Value: Shoots vs. Whole Plant
  misc_feature: MA Experiment ID: 20000227 Result: Up-regulated in Transcription
  misc_feature: MA Experiment 20000227 PARAMETER Experiment Name: At_Root-Tips-vs-Tops_P Parameter: Tissue Value: Root Tips vs. Root Tops
  misc_feature: MA Experiment ID: 20000438 Result: Up-regulated in Transcription
  misc_feature: MA Experiment 20000438 PARAMETER Experiment Name: At_Shoots__P Parameter: Age (day) Value: 14
  misc_feature: MA Experiment 20000438 PARAMETER Experiment Name: At_Shoots__P Parameter: Tissue Value: Shoots vs. Whole Plant
  misc_feature: MA Experiment ID: 20001560 Result: Up-regulated in Transcription
  misc_feature: MA Experiment 20001560 PARAMETER Experiment Name: At_Drought_Soil_Dry_P Parameter: Age (day) Value: 28
  misc_feature: MA Experiment 20001560 PARAMETER Experiment Name: At_Drought_Soil_Dry_P Parameter: Organism Value: A. thaliana
  misc_feature: MA Experiment 20001560 PARAMETER Experiment Name: At_Drought_Soil_Dry_P Parameter: Plant Line Value: WS
  misc_feature: MA Experiment 20001560 PARAMETER Experiment Name: At_Drought_Soil_Dry_P Parameter: Post Timepoint (hr) Value: None
  misc_feature: MA Experiment 20001560 PARAMETER Experiment Name: At_Drought_Soil_Dry_P Parameter: Post-Treatment Value: None
  misc_feature: MA Experiment 20001560 PARAMETER Experiment Name: At_Drought_Soil_Dry_P Parameter: Timepoint (day) Value: 14
  misc_feature: MA Experiment 20001560 PARAMETER Experiment Name: At_Drought_Soil_Dry_P Parameter: Treatment Value: Drought vs. No Drought
atgtcgaagctgaggaaaaagtatctggaacatcttctatgtgtgttgattttctttacttatgttattggctatggagaagctcagtccaagagcttccttgtagattgtggctcaaatgctacaaccgaagtagatggaagaacatgggttggtgatttatctcccaacaagagtgtgaccctgcaaggatttgatgccattactgcttcgacatcgaaaggaagttctgtttacgctgagatatataagactgctcgtgttttcgacgctgtgttgaactatacatttgaaggtataactcaagggaattactttgttaggctccatttcagccctttcgctattgaaaaccacaatgtgaatgagtcttctttcagcgtctttgcggatggtctgagactgatgcttgacatcaacatcgcgggagaaatcgcgcataagaatctcatcttggaaagcactggtcacaatgctactgcctcttctttggttaaagagtttctgttacctactggaccaggaaaactggttttaagtttcatcccggagaaagggtctttcgggtttgtcaatgctattgagatagtctctgttgatgataagctttttaaggaatcagttactaaagttggtggaagtgaagtggagcttggtttgggtggacgagggattgaaactatgtataggctaaacgttggtggtcccaagctaggtccaagcaaagatcttaagctttatagaacatgggaaacagatttaagctacatggtgattgagaacgctggtgtagaagtcaagaacagctcaaatatcacatatgctttggctgatgattctcctgtggctcctcttcttgtttatgaaactgctaggatgatgtcaaacactgaagtcttggagaaacggttcaacatttcttggaagtttgaagttgatcctaatttcgactacttggttaggcttcatttctgtgagcttcttgttgataagcaaaaccagaggattttcaggatatacataaacaaccagacggctgctggtaatttcgatatatttgctcacgcgggcgggaagaacaaaggtatatatcaagattacttggatccggtctcctctaagaacgacgttctctggattcaacttggacctgactcatctgttggtgcttctggagacgctcttctgagtggtcttgagattttcaagctcagcaaaaatgggaatcttgctcatctcatcaggtttgattcgactggtcactcggtaagtgactcgaagatgcggattatttggatcagtgttggtgctggtatagcaattatcatttttttcgtgttcttgggaatcttggtagtatgtttatgcaagaaaaggcgaagcaaatcagatgagtcgaaaaacaatcctcccgggtggcgtccgttgtttttgcatgtcaataacagtactgcaaacgccaaagcaacgggaggctcgctgagactgaacactcttgcagcatctacaatgggaaggaagtttacactagccgagattcgtgcagcaactaagaactttgatgatggtttagctattggagttggagggtttggtaaggtttacagaggagagcttgaagatggaacactcatagctataaaacgagccaccccacattctcagcaagggcttgctgaattcgaaaccgagatcgtgatgctctcaagacttaggcataggcatcttgtgtctttgatcgggttctgcgatgagcacaatgagatgatcttggtttatgaatacatggcaaatggaactctcaggagtcatctctttggaagcaaccttccgccattatcatggaagcaacggcttgaagcttgtataggctctgcgagaggattgcattaccttcacacagggtcagagagaggaatcattcacagagatgtcaaaacaacaaacatactattagacgagaactttgtggcaaagatgtctgattttgggctgtcgaaagctggaccgtccatggaccatactcatgtgagtacagctgtgaaaggaagttttggttatcttgatcctgaatactttagaaggcaacagttaacagagaagtcagatgtttactcttttggtgttgtgttgttcgaagctgtttgtgctcgagctgttataaacccaactttgcctaaagaccagatcaaccttgcggaatgggctttaagctggcaaaaacagagaaacctcgagtccatcatcgactcaaatctgaggggaaactacagtcctgaatcgttggagaagtatggggagatagcagagaagtgcttagcggatgaagggaagaacaggccaatgatgggagaagtgttatggagcttggagtatgttttgcagattcatgaagcttggcttcgcaaacagaatggagaaaactcgttttcgagcagccaagcggtagaagaagcaccagagagctttactcttccagcttgttccaatcaagattcctcagaaactgagcagagccaaacaggatctgctcttcacaattcggcttag

SEQ ID NO: 83303 - protein, 849 aa, Arabidopsis thaliana
  peptide (1)..(849): Ceres Seq. ID no. 12669594
  misc_feature (12)..(808): Homolog of NCBI NO: 34393641 NR Description: putative PTH-2, resistance gene (PTO kinase)
  misc_feature (31)..(843): Homolog of NCBI NO: 5679841 NR Description: contains eukaryotic protein kinase domain
  misc_feature (160)..(844): Homolog of NCBI NO: 15231393 NR Description: receptor protein kinase -like; protein id:
  misc_feature (6)..(173): Homolog of NCBI NO: 15231393 NR Description: receptor protein kinase -like; protein id:
  misc_feature (32)..(823): Homolog of NCBI NO: 15239630 NR Description: receptor-protein kinase-like protein; protein id:
  misc_feature (161)..(823): Homolog of NCBI NO: 15238498 NR Description: receptor-like protein kinase precursor - like;
  misc_feature (25)..(157): Homolog of NCBI NO: 15238498 NR Description: receptor-like protein kinase precursor - like;
  misc_feature (34)..(841): Homolog of NCBI NO: 34909896 NR Description: putative receptor-protein kinase [Oryza sativa
  misc_feature (157)..(799): Homolog of NCBI NO: 25553554 NR Description: OSJNBa0038F22.1 [Oryza sativa (japonica
  misc_feature (32)..(155): Homolog of NCBI NO: 25553554 NR Description: OSJNBa0038F22.1 [Oryza sativa (japonica
MSKLRKKYLEHLLCVLIFFTYVIGYGEAQSKSFLVDCGSNATTEVDGRTWVGDLSPNKSVTLQGFDAITASTSKGSSVYAEIYKTARVFDAVLNYTFEGITQGNYFVRLHFSPFAIENHNVNESSFSVFADGLRLMLDINIAGEIAHKNLILESTGHNATASSLVKEFLLPTGPGKLVLSFIPEKGSFGFVNAIEIVSVDDKLFKESVTKVGGSEVELGLGGRGIETMYRLNVGGPKLGPSKDLKLYRTWETDLSYMVIENAGVEVKNSSNITYALADDSPVAPLLVYETARMMSNTEVLEKRFNISWKFEVDPNFDYLVRLHFCELLVDKQNQRIFRIYINNQTAAGNFDIFAHAGGKNKGIYQDYLDPVSSKNDVLWIQLGPDSSVGASGDALLSGLEIFKLSKNGNLAHLIRFDSTGHSVSDSKMRIIWISVGAGIAIIIFFVFLGILVVCLCKKRRSKSDESKNNPPGWRPLFLHVNNSTANAKATGGSLRLNTLAASTMGRKFTLAEIRAATKNFDDGLAIGVGGFGKVYRGELEDGTLIAIKRATPHSQQGLAEFETEIVMLSRLRHRHLVSLIGFCDEHNEMILVYEYMANGTLRSHLFGSNLPPLSWKQRLEACIGSARGLHYLHTGSERGIIHRDVKTTNILLDENFVAKMSDFGLSKAGPSMDHTHVSTAVKGSFGYLDPEYFRRQQLTEKSDVYSFGVVLFEAVCARAVINPTLPKDQINLAEWALSWQKQRNLESIIDSNLRGNYSPESLEKYGEIAEKCLADEGKNRPMMGEVLWSLEYVLQIHEAWLRKQNGENSFSSSQAVEEAPESFTLPACSNQDSSETEQSQTGSALHNSA

SEQ ID NO: 83304 - protein, 714 aa, Arabidopsis thaliana
  peptide (1)..(714): Ceres Seq. ID no. 12669595
  misc_feature (1)..(673): Homolog of NCBI NO: 34393641 NR Description: putative PTH-2, resistance gene (PTO kinase)
  misc_feature (1)..(708): Homolog of NCBI NO: 5679841 NR Description: contains eukaryotic protein kinase domain
  misc_feature (25)..(709): Homolog of NCBI NO: 15231393 NR Description: receptor protein kinase -like; protein id:
  misc_feature (1)..(38): Homolog of NCBI NO: 15231393 NR Description: receptor protein kinase -like; protein id:
  misc_feature (1)..(688): Homolog of NCBI NO: 15239630 NR Description: receptor-protein kinase-like protein; protein id:
  misc_feature (26)..(688): Homolog of NCBI NO: 15238498 NR Description: receptor-like protein kinase precursor - like;
  misc_feature (1)..(22): Homolog of NCBI NO: 15238498 NR Description: receptor-like protein kinase precursor - like;
  misc_feature (1)..(706): Homolog of NCBI NO: 34909896 NR Description: putative receptor-protein kinase [Oryza sativa
  misc_feature (22)..(664): Homolog of NCBI NO: 25553554 NR Description: OSJNBa0038F22.1 [Oryza sativa (japonica
  misc_feature (1)..(20): Homolog of NCBI NO: 25553554 NR Description: OSJNBa0038F22.1 [Oryza sativa (japonica
MLDINIAGEIAHKNLILESTGHNATASSLVKEFLLPTGPGKLVLSFIPEKGSFGFVNAIEIVSVDDKLFKESVTKVGGSEVELGLGGRGIETMYRLNVGGPKLGPSKDLKLYRTWETDLSYMVIENAGVEVKNSSNITYALADDSPVAPLLVYETARMMSNTEVLEKRFNISWKFEVDPNFDYLVRLHFCELLVDKQNQRIFRIYINNQTAAGNFDIFAHAGGKNKGIYQDYLDPVSSKNDVLWIQLGPDSSVGASGDALLSGLEIFKLSKNGNLAHLIRFDSTGHSVSDSKMRIIWISVGAGIAIIIFFVFLGILVVCLCKKRRSKSDESKNNPPGWRPLFLHVNNSTANAKATGGSLRLNTLAASTMGRKFTLAEIRAATKNFDDGLAIGVGGFGKVYRGELEDGTLIAIKRATPHSQQGLAEFETEIVMLSRLRHRHLVSLIGFCDEHNEMILVYEYMANGTLRSHLFGSNLPPLSWKQRLEACIGSARGLHYLHTGSERGIIHRDVKTTNILLDENFVAKMSDFGLSKAGPSMDHTHVSTAVKGSFGYLDPEYFRRQQLTEKSDVYSFGVVLFEAVCARAVINPTLPKDQINLAEWALSWQKQRNLESIIDSNLRGNYSPESLEKYGEIAEKCLADEGKNRPMMGEVLWSLEYVLQIHEAWLRKQNGENSFSSSQAVEEAPESFTLPACSNQDSSETEQSQTGSALHNSA

SEQ ID NO: 83305 - protein, 622 aa, Arabidopsis thaliana
  peptide (1)..(622): Ceres Seq. ID no. 12669596
  misc_feature (1)..(581): Homolog of NCBI NO: 34393641 NR Description: putative PTH-2, resistance gene (PTO kinase)
  misc_feature (1)..(616): Homolog of NCBI NO: 5679841 NR Description: contains eukaryotic protein kinase domain
  misc_feature (1)..(617): Homolog of NCBI NO: 15231393 NR Description: receptor protein kinase -like; protein id:
  misc_feature (1)..(596): Homolog of NCBI NO: 15239630 NR Description: receptor-protein kinase-like protein; protein id:
  misc_feature (1)..(596): Homolog of NCBI NO: 15238498 NR Description: receptor-like protein kinase precursor - like;
  misc_feature (1)..(614): Homolog of NCBI NO: 34909896 NR Description: putative receptor-protein kinase [Oryza sativa
  misc_feature (1)..(572): Homolog of NCBI NO: 25553554 NR Description: OSJNBa0038F22.1 [Oryza sativa (japonica
  misc_feature (1)..(571): Homolog of NCBI NO: 14488367 NR Description: putative protein kinase [Oryza sativa (japonica
  misc_feature (1)..(614): Homolog of NCBI NO: 15226565 NR Description: putative protein kinase; protein id: At2g21480.1
  misc_feature (1)..(582): Homolog of NCBI NO: 15234944 NR Description: putative receptor-like protein kinase; protein At4g39110.1 [Arabidopsis thaliana] >gi|7488247|pir||T08559
MYRLNVGGPKLGPSKDLKLYRTWETDLSYMVIENAGVEVKNSSNITYALADDSPVAPLLVYETARMMSNTEVLEKRFNISWKFEVDPNFDYLVRLHFCELLVDKQNQRIFRIYINNQTAAGNFDIFAHAGGKNKGIYQDYLDPVSSKNDVLWIQLGPDSSVGASGDALLSGLEIFKLSKNGNLAHLIRFDSTGHSVSDSKMRIIWISVGAGIAIIIFFVFLGILVVCLCKKRRSKSDESKNNPPGWRPLFLHVNNSTANAKATGGSLRLNTLAASTMGRKFTLAEIRAATKNFDDGLAIGVGGFGKVYRGELEDGTLIAIKRATPHSQQGLAEFETEIVMLSRLRHRHLVSLIGFCDEHNEMILVYEYMANGTLRSHLFGSNLPPLSWKQRLEACIGSARGLHYLHTGSERGIIHRDVKTTNILLDENFVAKMSDFGLSKAGPSMDHTHVSTAVKGSFGYLDPEYFRRQQLTEKSDVYSFGVVLFEAVCARAVINPTLPKDQINLAEWALSWQKQRNLESIIDSNLRGNYSPESLEKYGEIAEKCLADEGKNRPMMGEVLWSLEYVLQIHEAWLRKQNGENSFSSSQAVEEAPESFTLPACSNQDSSETEQSQTGSALHNSA

SEQ ID NO: 83306 - DNA, 1893 bp, Arabidopsis thaliana
  misc_feature (1)..(1893): Ceres Seq. ID no. 12669611
  misc_feature: MA Experiment ID: 20000166 Result: Up-regulated in Transcription
  misc_feature: MA Experiment 20000166 PARAMETER Experiment Name: At_100uM_ABA_P Parameter: Age (day) Value: 14
  misc_feature: MA Experiment 20000166 PARAMETER Experiment Name: At_100uM_ABA_P Parameter: Organism Value: A. thaliana
  misc_feature: MA Experiment 20000166 PARAMETER Experiment Name: At_100uM_ABA_P Parameter: Plant Line Value: WS
  misc_feature: MA Experiment 20000166 PARAMETER Experiment Name: At_100uM_ABA_P Parameter: Timepoint (hr) Value: 1
  misc_feature: MA Experiment 20000166 PARAMETER Experiment Name: At_100uM_ABA_P Parameter: Tissue Value: Aerial
  misc_feature: MA Experiment 20000166 PARAMETER Experiment Name: At_100uM_ABA_P Parameter: Treatment Value: 100uM ABA vs. No Treatment
  misc_feature: MA Experiment ID: 20000169 Result: Up-regulated in Transcription
  misc_feature: MA Experiment 20000169 PARAMETER Experiment Name: At_100uM_ABA_P Parameter: Age (day) Value: 14
  misc_feature: MA Experiment 20000169 PARAMETER Experiment Name: At_100uM_ABA_P Parameter: Organism Value: A. thaliana
  misc_feature: MA Experiment 20000169 PARAMETER Experiment Name: At_100uM_ABA_P Parameter: Plant Line Value: WS
  misc_feature: MA Experiment 20000169 PARAMETER Experiment Name: At_100uM_ABA_P Parameter: Timepoint (hr) Value: 6
  misc_feature: MA Experiment 20000169 PARAMETER Experiment Name: At_100uM_ABA_P Parameter: Tissue Value: Aerial
  misc_feature: MA Experiment 20000169 PARAMETER Experiment Name: At_100uM_ABA_P Parameter: Treatment Value: 100uM ABA vs. No Treatment
  misc_feature: MA Experiment ID: 20000173 Result: Down-regulated in Transcription
  misc_feature: MA Experiment 20000173 PARAMETER Experiment Name: At_42deg_Heat_P Parameter: Age (day) Value: 14
  misc_feature: MA Experiment 20000173 PARAMETER Experiment Name: At_42deg_Heat_P Parameter: Organism Value: A. thaliana
  misc_feature: MA Experiment 20000173 PARAMETER Experiment Name: At_42deg_Heat_P Parameter: Plant Line Value: WS
  misc_feature: MA Experiment 20000173 PARAMETER Experiment Name: At_42deg_Heat_P Parameter: Temperature (deg C) Value: 42 vs. 22
  misc_feature: MA Experiment 20000173 PARAMETER Experiment Name: At_42deg_Heat_P Parameter: Timepoint (hr) Value: 6
  misc_feature: MA Experiment 20000173 PARAMETER Experiment Name: At_42deg_Heat_P Parameter: Tissue Value: Aerial
  misc_feature: MA Experiment ID: 20000180 Result: Down-regulated in Transcription
  misc_feature: MA Experiment 20000180 PARAMETER Experiment Name: At_Germinating_Seeds_P Parameter: Age (hr) Value: 24 vs. 0
  misc_feature: MA Experiment 20000180 PARAMETER Experiment Name: At_Germinating_Seeds_P Parameter: Tissue Value: Germinating Seeds
  misc_feature: MA Experiment ID: 20000227 Result: Up-regulated in Transcription
  misc_feature: MA Experiment 20000227 PARAMETER Experiment Name: At_Root-Tips-vs-Tops_P Parameter: Tissue Value: Root Tips vs. Root Tops
  misc_feature: MA Experiment ID: 20000234 Result: Up-regulated in Transcription
  misc_feature: MA Experiment 20000234 PARAMETER Experiment Name: At_Siliques_P Parameter: Age (day) Value: 21
  misc_feature: MA Experiment 20000234 PARAMETER Experiment Name: At_Siliques_P Parameter: Organism Value: A. thaliana
  misc_feature: MA Experiment 20000234 PARAMETER Experiment Name: At_Siliques_P Parameter: Plant Line Value: WS
  misc_feature: MA Experiment 20000234 PARAMETER Experiment Name: At_Siliques_P Parameter: Tissue Value: Less Than 5mm Siliques vs. Whole Plant
  misc_feature: MA Experiment ID: 20000794 Result: Down-regulated in Transcription
  misc_feature: MA Experiment 20000794 PARAMETER Experiment Name: At_Petals_P Parameter: Age (day) Value: 23-25 days
  misc_feature: MA Experiment 20000794 PARAMETER Experiment Name: At_Petals_P Parameter: Plant Line Value: WS
  misc_feature: MA Experiment 20000794 PARAMETER Experiment Name: At_Petals_P Parameter: Tissue Value: Petals vs. Whole plant
  misc_feature: MA Experiment ID: 20001556 Result: Down-regulated in Transcription
  misc_feature: MA Experiment 20001556 PARAMETER Experiment Name: At_Drought_Soil_Dry_P Parameter: Age (day) Value: 26
  misc_feature: MA Experiment 20001556 PARAMETER Experiment Name: At_Drought_Soil_Dry_P Parameter: Organism Value: A. thaliana
  misc_feature: MA Experiment 20001556 PARAMETER Experiment Name: At_Drought_Soil_Dry_P Parameter: Plant Line Value: WS
  misc_feature: MA Experiment 20001556 PARAMETER Experiment Name: At_Drought_Soil_Dry_P Parameter: Post Timepoint (hr) Value: None
  misc_feature: MA Experiment 20001556 PARAMETER Experiment Name: At_Drought_Soil_Dry_P Parameter: Post-Treatment Value: None
  misc_feature: MA Experiment 20001556 PARAMETER Experiment Name: At_Drought_Soil_Dry_P Parameter: Timepoint (day) Value: 12
  misc_feature: MA Experiment 20001556 PARAMETER Experiment Name: At_Drought_Soil_Dry_P Parameter: Treatment Value: Drought vs. No Drought
  misc_feature: MA Experiment ID: 20001557 Result: Up-regulated in Transcription
  misc_feature: MA Experiment 20001557 PARAMETER Experiment Name: At_Drought_Soil_Dry_P Parameter: Age (day) Value: 27
  misc_feature: MA Experiment 20001557 PARAMETER Experiment Name: At_Drought_Soil_Dry_P Parameter: Organism Value: A. thaliana
  misc_feature: MA Experiment 20001557 PARAMETER Experiment Name: At_Drought_Soil_Dry_P Parameter: Plant Line Value: WS
  misc_feature: MA Experiment 20001557 PARAMETER Experiment Name: At_Drought_Soil_Dry_P Parameter: Post Timepoint (hr) Value: 3
  misc_feature: MA Experiment 20001557 PARAMETER Experiment Name: At_Drought_Soil_Dry_P Parameter: Post-Treatment Value: Re-Water vs. No Drought
  misc_feature: MA Experiment 20001557 PARAMETER Experiment Name: At_Drought_Soil_Dry_P Parameter: Timepoint (day) Value: 13
  misc_feature: MA Experiment 20001557 PARAMETER Experiment Name: At_Drought_Soil_Dry_P Parameter: Treatment Value: Drought vs. No Drought
  misc_feature: MA Experiment ID: 20001558 Result: Up-regulated in Transcription
  misc_feature: MA Experiment 20001558 PARAMETER Experiment Name: At_Drought_Soil_Dry_P Parameter: Age (day) Value: 27
  misc_feature: MA Experiment 20001558 PARAMETER Experiment Name: At_Drought_Soil_Dry_P Parameter: Organism Value: A. thaliana
  misc_feature: MA Experiment 20001558 PARAMETER Experiment Name: At_Drought_Soil_Dry_P Parameter: Plant Line Value: WS
  misc_feature: MA Experiment 20001558 PARAMETER Experiment Name: At_Drought_Soil_Dry_P Parameter: Post Timepoint (hr) Value: 6
  misc_feature: MA Experiment 20001558 PARAMETER Experiment Name: At_Drought_Soil_Dry_P Parameter: Post-Treatment Value: Re-Water vs. No Drought
  misc_feature: MA Experiment 20001558 PARAMETER Experiment Name: At_Drought_Soil_Dry_P Parameter: Timepoint (day) Value: 13
  misc_feature: MA Experiment 20001558 PARAMETER Experiment Name: At_Drought_Soil_Dry_P Parameter: Treatment Value: Drought vs. No Drought
  misc_feature: MA Experiment ID: 20001560 Result: Up-regulated in Transcription
  misc_feature: MA Experiment 20001560 PARAMETER Experiment Name: At_Drought_Soil_Dry_P Parameter: Age (day) Value: 28
  misc_feature: MA Experiment 20001560 PARAMETER Experiment Name: At_Drought_Soil_Dry_P Parameter: Organism Value: A. thaliana
  misc_feature: MA Experiment 20001560 PARAMETER Experiment Name: At_Drought_Soil_Dry_P Parameter: Plant Line Value: WS
  misc_feature: MA Experiment 20001560 PARAMETER Experiment Name: At_Drought_Soil_Dry_P Parameter: Post Timepoint (hr) Value: None
  misc_feature: MA Experiment 20001560 PARAMETER Experiment Name: At_Drought_Soil_Dry_P Parameter: Post-Treatment Value: None
  misc_feature: MA Experiment 20001560 PARAMETER Experiment Name: At_Drought_Soil_Dry_P Parameter: Timepoint (day) Value: 14
  misc_feature: MA Experiment 20001560 PARAMETER Experiment Name: At_Drought_Soil_Dry_P Parameter: Treatment Value: Drought vs. No Drought
  misc_feature: MA Experiment ID: 20001911 Result: Down-regulated in Transcription
  misc_feature: MA Experiment 20001911 PARAMETER Experiment Name: At_Drought_Reproduction_P Parameter: Age (day) Value: 40
  misc_feature: MA Experiment 20001911 PARAMETER Experiment Name: At_Drought_Reproduction_P Parameter: Organism Value: A. thaliana
  misc_feature: MA Experiment 20001911 PARAMETER Experiment Name: At_Drought_Reproduction_P Parameter: Plant Line Value: WS
  misc_feature: MA Experiment 20001911 PARAMETER Experiment Name: At_Drought_Reproduction_P Parameter: Timepoint (day) Value: 10
  misc_feature: MA Experiment 20001911 PARAMETER Experiment Name: At_Drought_Reproduction_P Parameter: Tissue Value: Flowers
  misc_feature: MA Experiment 20001911 PARAMETER Experiment Name: At_Drought_Reproduction_P Parameter: Treatment Value: Drought vs. No Drought
tttattcacaaccccccattaatctctttctctgctgcagcttaaactttaaaaaacactacaagaacaacttcttcaggttctataaagagattccgaagaagaatcttttccagaaacagtgctttaagatgactgctgaagttaaggttgaggagaaacaggtggagtcagaggttgttattgctcctgctgttgttcctgaggagactactgttaaggctgttgtggaagagactaaggttgaagaagatgagagcaagcctgagggtgtggagaagagtgcttccttcaaagaagagagtgatttctttgctgatttgaaagaatctgagaaaaaggcactgagtgatctcaagtctaagcttgaggaagctattgttgacaacactctcttaaagacgaagaagaaggagagctctcctatgaaggagaagaaggaagaggttgtgaaacctgaagctgaggttgagaagaagaaggaagaagcagcagaggagaaggttgaagaagagaagaaatctgaggctgttgttaccgaagaagcaccgaaagctgagactgttgaggctgttgttacagaggagataatccccaaggaagaagtgactactgttgttgagaaggtagaagaagaaaccaaggaagaagagaagaaaaccgaggatgttgttactgaagaagtgaaagctgagactattgaggtggaggatgaagatgagtcggtggataaggatatcgagctttggggagtgccattgcttccaagcaaaggagctgaaagcacggatgttatcctcttgaagttcttgagagcaagagactttaaagtcaacgaagcctttgagatgctgaagaaaaccctcaaatggagaaagcaaaacaagattgattcgatccttggagaggagtttggggaggatcttgccactgcagcttacatgaacggtgtggaccgcgagtcccacccagtttgttacaatgtccacagcgaggagctttaccagacgattgggtcggagaagaacagagagaagttcttgagatggaggtttcagctgatggagaagggaatccagaagcttaatcttaaaccaggaggtgttacttctcttctccagatccacgatctcaaaaacgctcctggagtgtcaagaacagagatttgggtcggaatcaagaaagtaatcgagactttgcaggacaactatccggaattcgtgtccagaaacatattcatcaacgttccattctggttctacgccatgagagctgtcctctcgccattcttaactcaacgaaccaagagcaagtttgttgtggctcgtcccgctaaggtcagagagactcttctcaagtacattccagctgatgagctcccagttcagtacggtgggttcaaaacagtagacgataccgaattctccaacgaaactgtctctgaagttgttgttaagcctggatcatctgaaaccatcgaaatcccagctcctgagactgaaggtacattggtatgggacatagcggttttgggatgggaagtgaattacaaggaagagtttgtgccaacagaagaaggagcttacacggtaatagtccaaaaggtgaagaagatgggagcaaatgaaggaccaatcaggaacagtttcaagaacagtcaggctggtaagattgttcttaccgttgacaatgtctctggcaagaagaagaaagttctgtacaggtacagaaccaagactgaatcctcttcctgaagtggaggatttcatgtagtctctggatatataatattcttttctaaatttaaacgtttggtgttattatttatttttgagtgatatgtaagagaaagagatactcccattatttcattgatattcaatcttttgcttc

SEQ ID NO: 83307 - protein, 583 aa, Arabidopsis thaliana
  peptide (1)..(583): Ceres Seq. ID no. 12669612
  misc_feature (311)..(465): Pfam Name: CRAL/TRIO domain Pfam Description: CRAL/TRIO domain
  misc_feature (44)..(583): Homolog of NCBI NO: 18397616 NR Description: expressed protein; protein id: At1g30690.1, by cDNA: gi_14334977 [Arabidopsis thaliana]
  misc_feature (44)..(583): Homolog of NCBI NO: 14334978 NR Description: unknown protein [Arabidopsis thaliana]
  misc_feature (106)..(577): Homolog of NCBI NO: 8894548 NR Description: hypothetical protein [Cicer arietinum]
  misc_feature (105)..(583): Homolog of NCBI NO: 34907288 NR Description: contains ESTs
  misc_feature (212)..(578): Homolog of NCBI NO: 15081614 NR Description: At1g72160/T9N14_8 [Arabidopsis thaliana]
  misc_feature (96)..(129): Homolog of NCBI NO: 15081614 NR Description: At1g72160/T9N14_8 [Arabidopsis thaliana]
  misc_feature (43)..(578): Homolog of NCBI NO: 30680992 NR Description: expressed protein [Arabidopsis thaliana]
  misc_feature (116)..(578): Homolog of NCBI NO: 15218383 NR Description: cytosolic factor, putative; protein id: supported by cDNA: gi_15081613 [Arabidopsis thaliana]
  misc_feature (43)..(494): Homolog of NCBI NO: 25407487 NR Description: hypothetical protein AT4g09160 [imported] - thaliana >gi|7267559|emb|CAB78040.1| putative protein
  misc_feature (502)..(578): Homolog of NCBI NO: 25407487 NR Description: hypothetical protein AT4g09160 [imported] - thaliana >gi|7267559|emb|CAB78040.1| putative protein
YSQPPINLFLCCSLNFKKHYKNNFFRFYKEIPKKNLFQKQCFKMTAEVKVEEKQVESEVVIAPAVVPEETTVKAVVEETKVEEDESKPEGVEKSASFKEESDFFADLKESEKKALSDLKSKLEEAIVDNTLLKTKKKESSPMKEKKEEVVKPEAEVEKKKEEAAEEKVEEEKKSEAVVTEEAPKAETVEAVVTEEIIPKEEVTTVVEKVEEETKEEEKKTEDVVTEEVKAETIEVEDEDESVDKDIELWGVPLLPSKGAESTDVILLKFLRARDFKVNEAFEMLKKTLKWRKQNKIDSILGEEFGEDLATAAYMNGVDRESHPVCYNVHSEELYQTIGSEKNREKFLRWRFQLMEKGIQKLNLKPGGVTSLLQIHDLKNAPGVSRTEIWVGIKKVIETLQDNYPEFVSRNIFINVPFWFYAMRAVLSPFLTQRTKSKFVVARPAKVRETLLKYIPADELPVQYGGFKTVDDTEFSNETVSEVVVKPGSSETIEIPAPETEGTLVWDIAVLGWEVNYKEEFVPTEEGAYTVIVQKVKKMGANEGPIRNSFKNSQAGKIVLTVDNVSGKKKKVLYRYRTKTESSS

SEQ ID NO: 83308 - protein, 540 aa, Arabidopsis thaliana
  peptide (1)..(540): Ceres Seq. ID no. 12669613
  misc_feature (268)..(422): Pfam Name: CRAL/TRIO domain Pfam Description: CRAL/TRIO domain
  misc_feature (1)..(540): Homolog of NCBI NO: 18397616 NR Description: expressed protein; protein id: At1g30690.1, by cDNA: gi_14334977 [Arabidopsis thaliana]
  misc_feature (1)..(540): Homolog of NCBI NO: 14334978 NR Description: unknown protein [Arabidopsis thaliana]
  misc_feature (63)..(534): Homolog of NCBI NO: 8894548 NR Description: hypothetical protein [Cicer arietinum]
  misc_feature (62)..(540): Homolog of NCBI NO: 34907288 NR Description: contains ESTs
  misc_feature (169)..(535): Homolog of NCBI NO: 15081614 NR Description: At1g72160/T9N14_8 [Arabidopsis thaliana]
  misc_feature (53)..(86): Homolog of NCBI NO: 15081614 NR Description: At1g72160/T9N14_8 [Arabidopsis thaliana]
  misc_feature (1)..(535): Homolog of NCBI NO: 30680992 NR Description: expressed protein [Arabidopsis thaliana]
  misc_feature (73)..(535): Homolog of NCBI NO: 15218383 NR Description: cytosolic factor, putative; protein id: supported by cDNA: gi_15081613 [Arabidopsis thaliana]
  misc_feature (1)..(451): Homolog of NCBI NO: 25407487 NR Description: hypothetical protein AT4g09160 [imported] - thaliana >gi|7267559|emb|CAB78040.1| putative protein
  misc_feature (459)..(535): Homolog of NCBI NO: 25407487 NR Description: hypothetical protein AT4g09160 [imported] - thaliana >gi|7267559|emb|CAB78040.1| putative protein
MTAEVKVEEKQVESEVVIAPAVVPEETTVKAVVEETKVEEDESKPEGVEKSASFKEESDFFADLKESEKKALSDLKSKLEEAIVDNTLLKTKKKESSPMKEKKEEVVKPEAEVEKKKEEAAEEKVEEEKKSEAVVTEEAPKAETVEAVVTEEIIPKEEVTTVVEKVEEETKEEEKKTEDVVTEEVKAETIEVEDEDESVDKDIELWGVPLLPSKGAESTDVILLKFLRARDFKVNEAFEMLKKTLKWRKQNKIDSILGEEFGEDLATAAYMNGVDRESHPVCYNVHSEELYQTIGSEKNREKFLRWRFQLMEKGIQKLNLKPGGVTSLLQIHDLKNAPGVSRTEIWVGIKKVIETLQDNYPEFVSRNIFINVPFWFYAMRAVLSPFLTQRTKSKFVVARPAKVRETLLKYIPADELPVQYGGFKTVDDTEFSNETVSEVVVKPGSSETIEIPAPETEGTLVWDIAVLGWEVNYKEEFVPTEEGAYTVIVQKVKKMGANEGPIRNSFKNSQAGKIVLTVDNVSGKKKKVLYRYRTKTESSS

SEQ ID NO: 83309 - protein, 442 aa, Arabidopsis thaliana
  peptide (1)..(442): Ceres Seq. ID no. 12669614
  misc_feature (170)..(324): Pfam Name: CRAL/TRIO domain Pfam Description: CRAL/TRIO domain
  misc_feature (1)..(442): Homolog of NCBI NO: 18397616 NR Description: expressed protein; protein id: At1g30690.1, by cDNA: gi_14334977 [Arabidopsis thaliana]
  misc_feature (1)..(442): Homolog of NCBI NO: 14334978 NR Description: unknown protein [Arabidopsis thaliana]
  misc_feature (1)..(436): Homolog of NCBI NO: 8894548 NR Description: hypothetical protein [Cicer arietinum]
  misc_feature (1)..(442): Homolog of NCBI NO: 34907288 NR Description: contains ESTs
  misc_feature (71)..(437): Homolog of NCBI NO: 15081614 NR Description: At1g72160/T9N14_8 [Arabidopsis thaliana]
  misc_feature (1)..(437): Homolog of NCBI NO: 30680992 NR Description: expressed protein [Arabidopsis thaliana]
  misc_feature (1)..(437): Homolog of NCBI NO: 15218383 NR Description: cytosolic factor, putative; protein id: supported by cDNA: gi_15081613 [Arabidopsis thaliana]
  misc_feature (1)..(353): Homolog of NCBI NO: 25407487 NR Description: hypothetical protein AT4g09160 [imported] - thaliana >gi|7267559|emb|CAB78040.1| putative protein
  misc_feature (361)..(437): Homolog of NCBI NO: 25407487 NR Description: hypothetical protein AT4g09160 [imported] - thaliana >gi|7267559|emb|CAB78040.1| putative protein
  misc_feature (1)..(437): Homolog of NCBI NO: 15218382 NR Description: cytosolic factor, putative; protein id: supported by cDNA: gi_15028180, supported by cDNA: gi_21280860 thaliana] >gi|25406149|pir||H96744 probable cytosolic factor
MKEKKEEVVKPEAEVEKKKEEAAEEKVEEEKKSEAVVTEEAPKAETVEAVVTEEIIPKEEVTTVVEKVEEETKEEEKKTEDVVTEEVKAETIEVEDEDESVDKDIELWGVPLLPSKGAESTDVILLKFLRARDFKVNEAFEMLKKTLKWRKQNKIDSILGEEFGEDLATAAYMNGVDRESHPVCYNVHSEELYQTIGSEKNREKFLRWRFQLMEKGIQKLNLKPGGVTSLLQIHDLKNAPGVSRTEIWVGIKKVIETLQDNYPEFVSRNIFINVPFWFYAMRAVLSPFLTQRTKSKFVVARPAKVRETLLKYIPADELPVQYGGFKTVDDTEFSNETVSEVVVKPGSSETIEIPAPETEGTLVWDIAVLGWEVNYKEEFVPTEEGAYTVIVQKVKKMGANEGPIRNSFKNSQAGKIVLTVDNVSGKKKKVLYRYRTKTESSS

SEQ ID NO: 83310 - DNA, 1385 bp, Arabidopsis thaliana
  misc_feature (1)..(1385): Ceres Seq. ID no. 12669701
  misc_feature: MA Experiment ID: 20000235 Result: Up-regulated in Transcription
  misc_feature: MA Experiment 20000235 PARAMETER Experiment Name: At_Siliques_P Parameter: Age (day) Value: 21
  misc_feature: MA Experiment 20000235 PARAMETER Experiment Name: At_Siliques_P Parameter: Organism Value: A. thaliana
  misc_feature: MA Experiment 20000235 PARAMETER Experiment Name: At_Siliques_P Parameter: Plant Line Value: WS
  misc_feature: MA Experiment 20000235 PARAMETER Experiment Name: At_Siliques_P Parameter: Tissue Value: 5-10mm Siliques vs. Whole Plant
  misc_feature: MA Experiment ID: 20001560 Result: Up-regulated in Transcription
  misc_feature: MA Experiment 20001560 PARAMETER Experiment Name: At_Drought_Soil_Dry_P Parameter: Age (day) Value: 28
  misc_feature: MA Experiment 20001560 PARAMETER Experiment Name: At_Drought_Soil_Dry_P Parameter: Organism Value: A. thaliana
  misc_feature: MA Experiment 20001560 PARAMETER Experiment Name: At_Drought_Soil_Dry_P Parameter: Plant Line Value: WS
  misc_feature: MA Experiment 20001560 PARAMETER Experiment Name: At_Drought_Soil_Dry_P Parameter: Post Timepoint (hr) Value: None
  misc_feature: MA Experiment 20001560 PARAMETER Experiment Name: At_Drought_Soil_Dry_P Parameter: Post-Treatment Value: None
  misc_feature: MA Experiment 20001560 PARAMETER Experiment Name: At_Drought_Soil_Dry_P Parameter: Timepoint (day) Value: 14
  misc_feature: MA Experiment 20001560 PARAMETER Experiment Name: At_Drought_Soil_Dry_P Parameter: Treatment Value: Drought vs. No Drought
gatgctacttctgatttaccctttctctgcttttttctctcactctctcagttttctcctccttgattcctaaagtcttctcctttgcgtgcatttcttcaattttcagattcttcctaaggtggtagaatgatgaaatgagaatcgatagataagagtttaaagagcaccagaatctttgttatcttgcaatgtcgacgacgtctttgcaaacgattggtgctattaagtcttatcatcatcaagctcagcatttggttaagaattatctcttagctgatccttttattccttacacttctgtcctcaccggcattttcctttgcaaagtggtttatgatctttgtcattttatcagcaactcacattctaagacttatatcatcctcacgaaaattcaaagaatcgaatggaataaccgtggtatctcgacagttcatgctatttttatttcggctatgtcgctgtactttgtgttctggtccgacctcttttccgataggtggcataatgatcttgttgttttccggagctcacgactttcttctcttggtttagggatatctattggttacttccttgctgatcttgggatgatcttctggaaatatccttctttgggtggaattgagtatattgtgcatcactcgctatcgggggttgcagttgcctactctttattttccggggaaggacagttatatacctacatggtcctcatctccgagattacaaccccagagatcaacttgagatggtacctggacacggctggtatgaaaaaatcattggcatacgttgttaatggcgttttcatcttcttggcttggctggttgctagaattctactgttcatatacatgttttatcatgtttatctccactacaaccaggtcatgaggatgcacatctttggttacgttctggtattcggcgtaccagctgcgctcggtgtcatgaacttgatatggttcgggaagattgtgagaggggtaaagaaaacattagcaaagagatgtgaatgttgagattggtgagtcttcctcacaccgtttcttcacttcatcatctccttacttcttcgtccctctgacatatgcctgtctctctagtgtaagtagtttttgtctgatgaagaaagaaaaacgaaaaaacaaaaatgataatgatacgatcctctgactctgtaaatgatcaaaattcaagtctcttctttacgttttctcattatacaatgtaattctgttttcattctaatagttttggttctagggttttgattcaatttctgctacatttcgtttaaccggagttcgatacagtactaccaaaatgatgaacaactgtttggtgttcaagttctatggaagagaaaacatttggtc

SEQ ID NO: 83311 - protein, 278 aa, Arabidopsis thaliana
  peptide (1)..(278): Ceres Seq. ID no. 12669702
  misc_feature (34)..(278): Pfam Name: Eukaryotic protein of unknown function (DUF887) Pfam Description: Eukaryotic protein of unknown function (DUF887)
  misc_feature (1)..(278): Homolog of NCBI NO: 18397885 NR Description: expressed protein; protein id: At1g31300.1, by cDNA: gi_16604307, supported by cDNA: gi_20466068 [Arabidopsis >gi|16604308|gb|AAL24160.1| At1g31300/T19E23_12 [Arabidopsis
  misc_feature (1)..(215): Homolog of NCBI NO: 25403400 NR Description: protein T19E23.9 [imported] - Arabidopsis >gi|6692122|gb|AAF24587.1|AC007654_3 T19E23.9 [Arabidopsis
  misc_feature (207)..(278): Homolog of NCBI NO: 25403400 NR Description: protein T19E23.9 [imported] - Arabidopsis >gi|6692122|gb|AAF24587.1|AC007654_3 T19E23.9 [Arabidopsis
  misc_feature (12)..(275): Homolog of NCBI NO: 22328807 NR Description: unknown protein; protein id: At4g19645.1 thaliana] >gi|26452622|dbj|BAC43394.1| unknown protein thaliana] >gi|27311621|gb|AAO00776.1| Unknown protein
  misc_feature (11)..(274): Homolog of NCBI NO: 40538924 NR Description: expressed protein [Oryza sativa (japonica
  misc_feature (37)..(274): Homolog of NCBI NO: 18413327 NR Description: expressed protein; protein id: At4g10360.1, by cDNA: 1354., supported by cDNA: gi_16323148 [Arabidopsis >gi|16323149|gb|AAL15309.1| AT4g10360/F24G24_160 [Arabidopsis
  misc_feature (37)..(274): Homolog of NCBI NO: 21537382 NR Description: unknown [Arabidopsis thaliana]
  misc_feature (37)..(275): Homolog of NCBI NO: 34909246 NR Description: B1148D12.11 [Oryza sativa (japonica
  misc_feature (37)..(274): Homolog of NCBI NO: 7486070 NR Description: hypothetical protein F24G24.160 - Arabidopsis >gi|4538965|emb|CAB39789.1| hypothetical protein [Arabidopsis >gi|7267733|emb|CAB78159.1| hypothetical protein [Arabidopsis
  misc_feature (36)..(273): Homolog of NCBI NO: 34860211 NR Description: similar to RIKEN cDNA C730036B01 [Rattus
MSTTSLQTIGAIKSYHHQAQHLVKNYLLADPFIPYTSVLTGIFLCKVVYDLCHFISNSHSKTYIILTKIQRIEWNNRGISTVHAIFISAMSLYFVFWSDLFSDRWHNDLVVFRSSRLSSLGLGISIGYFLADLGMIFWKYPSLGGIEYIVHHSLSGVAVAYSLFSGEGQLYTYMVLISEITTPEINLRWYLDTAGMKKSLAYVVNGVFIFLAWLVARILLFIYMFYHVYLHYNQVMRMHIFGYVLVFGVPAALGVMNLIWFGKIVRGVKKTLAKRCEC

SEQ ID NO: 83312 - protein, 189 aa, Arabidopsis thaliana
  peptide (1)..(189): Ceres Seq. ID no. 12669703
  misc_feature (1)..(189): Pfam Name: Eukaryotic protein of unknown function (DUF887) Pfam Description: Eukaryotic protein of unknown function (DUF887)
  misc_feature (1)..(189): Homolog of NCBI NO: 18397885 NR Description: expressed protein; protein id: At1g31300.1, by cDNA: gi_16604307, supported by cDNA: gi_20466068 [Arabidopsis >gi|16604308|gb|AAL24160.1| At1g31300/T19E23_12 [Arabidopsis
  misc_feature (1)..(126): Homolog of NCBI NO: 25403400 NR Description: protein T19E23.9 [imported] - Arabidopsis >gi|6692122|gb|AAF24587.1|AC007654_3 T19E23.9 [Arabidopsis
  misc_feature (118)..(189): Homolog of NCBI NO: 25403400 NR Description: protein T19E23.9 [imported] - Arabidopsis >gi|6692122|gb|AAF24587.1|AC007654_3 T19E23.9 [Arabidopsis
  misc_feature (1)..(186): Homolog of NCBI NO: 22328807 NR Description: unknown protein; protein id: At4g19645.1 thaliana] >gi|26452622|dbj|BAC43394.1| unknown protein thaliana] >gi|27311621|gb|AAO00776.1| Unknown protein
  misc_feature (1)..(185): Homolog of NCBI NO: 40538924 NR Description: expressed protein [Oryza sativa (japonica
  misc_feature (1)..(185): Homolog of NCBI NO: 18413327 NR Description: expressed protein; protein id: At4g10360.1, by cDNA: 1354., supported by cDNA: gi_16323148 [Arabidopsis >gi|16323149|gb|AAL15309.1| AT4g10360/F24G24_160 [Arabidopsis
  misc_feature (1)..(185): Homolog of NCBI NO: 21537382 NR Description: unknown [Arabidopsis thaliana]
  misc_feature (1)..(186): Homolog of NCBI NO: 34909246 NR Description: B1148D12.11 [Oryza sativa (japonica
  misc_feature (1)..(185): Homolog of NCBI NO: 7486070 NR Description: hypothetical protein F24G24.160 - Arabidopsis >gi|4538965|emb|CAB39789.1| hypothetical protein [Arabidopsis >gi|7267733|emb|CAB78159.1| hypothetical protein [Arabidopsis
  misc_feature (1)..(184): Homolog of NCBI NO: 34860211 NR Description: similar to RIKEN cDNA C730036B01 [Rattus
MSLYFVFWSDLFSDRWHNDLVVFRSSRLSSLGLGISIGYFLADLGMIFWKYPSLGGIEYIVHHSLSGVAVAYSLFSGEGQLYTYMVLISEITTPEINLRWYLDTAGMKKSLAYVVNGVFIFLAWLVARILLFIYMFYHVYLHYNQVMRMHIFGYVLVFGVPAALGVMNLIWFGKIVRGVKKTLAKRCEC

SEQ ID NO: 83313 - protein, 144 aa, Arabidopsis thaliana
  peptide (1)..(144): Ceres Seq. ID no. 12669704
  misc_feature (1)..(144): Pfam Name: Eukaryotic protein of unknown function (DUF887) Pfam Description: Eukaryotic protein of unknown function (DUF887)
  misc_feature (1)..(144): Homolog of NCBI NO: 18397885 NR Description: expressed protein; protein id: At1g31300.1, by cDNA: gi_16604307, supported by cDNA: gi_20466068 [Arabidopsis >gi|16604308|gb|AAL24160.1| At1g31300/T19E23_12 [Arabidopsis
  misc_feature (1)..(81): Homolog of NCBI NO: 25403400 NR Description: protein T19E23.9 [imported] - Arabidopsis >gi|6692122|gb|AAF24587.1|AC007654_3 T19E23.9 [Arabidopsis
  misc_feature (73)..(144): Homolog of NCBI NO: 25403400 NR Description: protein T19E23.9 [imported] - Arabidopsis >gi|6692122|gb|AAF24587.1|AC007654_3 T19E23.9 [Arabidopsis
  misc_feature (1)..(141): Homolog of NCBI NO: 22328807 NR Description: unknown protein; protein id: At4g19645.1 thaliana] >gi|26452622|dbj|BAC43394.1| unknown protein thaliana] >gi|27311621|gb|AAO00776.1| Unknown protein
  misc_feature (1)..(140): Homolog of NCBI NO: 40538924 NR Description: expressed protein [Oryza sativa (japonica
  misc_feature (1)..(140): Homolog of NCBI NO: 18413327 NR Description: expressed protein; protein id: At4g10360.1, by cDNA: 1354., supported by cDNA: gi_16323148 [Arabidopsis >gi|16323149|gb|AAL15309.1| AT4g10360/F24G24_160 [Arabidopsis
  misc_feature (1)..(140): Homolog of NCBI NO: 21537382 NR Description: unknown [Arabidopsis thaliana]
  misc_feature (1)..(141): Homolog of NCBI NO: 34909246 NR Description: B1148D12.11 [Oryza sativa (japonica
  misc_feature (1)..(140): Homolog of NCBI NO: 7486070 NR Description: hypothetical protein F24G24.160 - Arabidopsis >gi|4538965|emb|CAB39789.1| hypothetical protein [Arabidopsis >gi|7267733|emb|CAB78159.1| hypothetical protein [Arabidopsis
  misc_feature (1)..(139): Homolog of NCBI NO: 34860211 NR Description: similar to RIKEN cDNA C730036B01 [Rattus
MIFWKYPSLGGIEYIVHHSLSGVAVAYSLFSGEGQLYTYMVLISEITTPEINLRWYLDTAGMKKSLAYVVNGVFIFLAWLVARILLFIYMFYHVYLHYNQVMRMHIFGYVLVFGVPAALGVMNLIWFGKIVRGVKKTLAKRCEC

SEQ ID NO: 83314 - DNA, 1773 bp, Arabidopsis thaliana
  misc_feature (1)..(1773): Ceres Seq. ID no. 12669712
  misc_feature: MA Experiment ID: 20000173 Result: Down-regulated in Transcription
  misc_feature: MA Experiment 20000173 PARAMETER Experiment Name: At_42deg_Heat_P Parameter: Age (day) Value: 14
  misc_feature: MA Experiment 20000173 PARAMETER Experiment Name: At_42deg_Heat_P Parameter: Organism Value: A. thaliana
  misc_feature: MA Experiment 20000173 PARAMETER Experiment Name: At_42deg_Heat_P Parameter: Plant Line Value: WS
  misc_feature: MA Experiment 20000173 PARAMETER Experiment Name: At_42deg_Heat_P Parameter: Temperature (deg C) Value: 42 vs. 22
  misc_feature: MA Experiment 20000173 PARAMETER Experiment Name: At_42deg_Heat_P Parameter: Timepoint (hr) Value: 6
  misc_feature: MA Experiment 20000173 PARAMETER Experiment Name: At_42deg_Heat_P Parameter: Tissue Value: Aerial
  misc_feature: MA Experiment ID: 20000437 Result: Down-regulated in Transcription
  misc_feature: MA Experiment 20000437 PARAMETER Experiment Name: At_Drought_P Parameter: Age (day) Value: 8
  misc_feature: MA Experiment 20000437 PARAMETER Experiment Name: At_Drought_P Parameter: Organism Value: A. thaliana
  misc_feature: MA Experiment 20000437 PARAMETER Experiment Name: At_Drought_P Parameter: Plant Line Value: WS
  misc_feature: MA Experiment 20000437 PARAMETER Experiment Name: At_Drought_P Parameter: Timepoint (hr) Value: 24
  misc_feature: MA Experiment 20000437 PARAMETER Experiment Name: At_Drought_P Parameter: Tissue Value: Whole Plant
  misc_feature: MA Experiment 20000437 PARAMETER Experiment Name: At_Drought_P Parameter: Treatment Value: Drought vs. No Drought
  misc_feature: MA Experiment ID: 20000455 Result: Up-regulated in Transcription
  misc_feature: MA Experiment 20000455 PARAMETER Experiment Name: At_100uM_ABA_P Parameter: Age (day) Value: 16
  misc_feature: MA Experiment 20000455 PARAMETER Experiment Name: At_100uM_ABA_P Parameter: Organism Value: A. thaliana
  misc_feature: MA Experiment 20000455 PARAMETER Experiment Name: At_100uM_ABA_P Parameter: Plant Line Value: WS
  misc_feature: MA Experiment 20000455 PARAMETER Experiment Name: At_100uM_ABA_P Parameter: Timepoint (hr) Value: 48
  misc_feature: MA Experiment 20000455 PARAMETER Experiment Name: At_100uM_ABA_P Parameter: Tissue Value: Aerial
  misc_feature: MA Experiment 20000455 PARAMETER Experiment Name: At_100uM_ABA_P Parameter: Treatment Value: 100uM ABA vs. No Treatment
  misc_feature: MA Experiment ID: 20001451 Result: Down-regulated in Transcription
  misc_feature: MA Experiment 20001451 PARAMETER Experiment Name: At_Far-red-induction_P Parameter: Age (day) Value: 7
  misc_feature: MA Experiment 20001451 PARAMETER Experiment Name: At_Far-red-induction_P Parameter: Light Value: Far-red vs. White
  misc_feature: MA Experiment 20001451 PARAMETER Experiment Name: At_Far-red-induction_P Parameter: Organism Value: A. thaliana
  misc_feature: MA Experiment 20001451 PARAMETER Experiment Name: At_Far-red-induction_P Parameter: Plant Line Value: Columbia
  misc_feature: MA Experiment 20001451 PARAMETER Experiment Name: At_Far-red-induction_P Parameter: Timepoint (hr) Value: 24
  misc_feature: MA Experiment 20001451 PARAMETER Experiment Name: At_Far-red-induction_P Parameter: Tissue Value: Whole Plant
  misc_feature: MA Experiment ID: 20001556 Result: Down-regulated in Transcription
  misc_feature: MA Experiment 20001556 PARAMETER Experiment Name: At_Drought_Soil_Dry_P Parameter: Age (day) Value: 26
  misc_feature: MA Experiment 20001556 PARAMETER Experiment Name: At_Drought_Soil_Dry_P Parameter: Organism Value: A. thaliana
  misc_feature: MA Experiment 20001556 PARAMETER Experiment Name: At_Drought_Soil_Dry_P Parameter: Plant Line Value: WS
  misc_feature: MA Experiment 20001556 PARAMETER Experiment Name: At_Drought_Soil_Dry_P Parameter: Post Timepoint (hr) Value: None
  misc_feature: MA Experiment 20001556 PARAMETER Experiment Name: At_Drought_Soil_Dry_P Parameter: Post-Treatment Value: None
  misc_feature: MA Experiment 20001556 PARAMETER Experiment Name: At_Drought_Soil_Dry_P Parameter: Timepoint (day) Value: 12
  misc_feature: MA Experiment 20001556 PARAMETER Experiment Name: At_Drought_Soil_Dry_P Parameter: Treatment Value: Drought vs. No Drought
  misc_feature: MA Experiment ID: 20001905 Result: Down-regulated in Transcription
  misc_feature: MA Experiment 20001905 PARAMETER Experiment Name: At_Drought_Reproduction_P Parameter: Age (day) Value: 40
  misc_feature: MA Experiment 20001905 PARAMETER Experiment Name: At_Drought_Reproduction_P Parameter: Organism Value: A. thaliana
  misc_feature: MA Experiment 20001905 PARAMETER Experiment Name: At_Drought_Reproduction_P Parameter: Plant Line Value: WS
  misc_feature: MA Experiment 20001905 PARAMETER Experiment Name: At_Drought_Reproduction_P Parameter: Timepoint (day) Value: 10
  misc_feature: MA Experiment 20001905 PARAMETER Experiment Name: At_Drought_Reproduction_P Parameter: Tissue Value: Rosettes
  misc_feature: MA Experiment 20001905 PARAMETER Experiment Name: At_Drought_Reproduction_P Parameter: Treatment Value: Drought vs. No Drought
  misc_feature: MA Experiment ID: 20001911 Result: Down-regulated in Transcription
  misc_feature: MA Experiment 20001911 PARAMETER Experiment Name: At_Drought_Reproduction_P Parameter: Age (day) Value: 40
  misc_feature: MA Experiment 20001911 PARAMETER Experiment Name: At_Drought_Reproduction_P Parameter: Organism Value: A. thaliana
  misc_feature: MA Experiment 20001911 PARAMETER Experiment Name: At_Drought_Reproduction_P Parameter: Plant Line Value: WS
  misc_feature: MA Experiment 20001911 PARAMETER Experiment Name: At_Drought_Reproduction_P Parameter: Timepoint (day) Value: 10
  misc_feature: MA Experiment 20001911 PARAMETER Experiment Name: At_Drought_Reproduction_P Parameter: Tissue Value: Flowers
  misc_feature: MA Experiment 20001911 PARAMETER Experiment Name: At_Drought_Reproduction_P Parameter: Treatment Value: Drought vs. No Drought
atgggcatctgtgagatgaaaagctgctgctcatggcttcttttgatctcgttgctttgctcactatctaatgaaagtcaagcgattagtcctgacggcgaggcgcttctgagcttcagaaatgcagttactagatcagatagtttcatccatcagtggagaccggaagatccagatccatgtaactggaacggagtgacatgtgatgcaaaaacgaaaagagttataaccttgaatcttacttatcacaaaataatgggacctttacctcctgatattggaaagttggaccatttaaggcttttaatgcttcacaacaatgctttatatggagcaatacctacagcattgggaaattgcacagcattggaggaaattcacttgcagagtaactacttcactggaccaatcccagctgaaatgggagacctgcctggccttcaaaagctggacatgtcaagcaacactctcagtggacctatccctgcttcgcttgggcagttaaaaaagcttagtaacttcaatgtctcgaacaacttcctggtggggcaaataccttcagacggagtgctctctggattttctaagaactccttcattggaaatcttaacttgtgtggaaagcatgttgatgtcgtgtgccaagatgatagtggaaacccttcatcacattctcaatcaggtcaaaatcaaaagaaaaactctggtaagctgctgattagcgcatcagcaactgtaggtgcgctactcctagttgcactcatgtgtttctggggatgctttctatataaaaagctcggtaaagtcgagattaaaagccttgcaaaggatgttggtggaggtgcgtctattgtgatgttccacggagatttaccttactcttccaaagatatcattaagaagctggaaatgttgaatgaagagcacataattggatgtggaggctttggaacggtgtataagctggccatggatgatggcaaagtctttgcattgaagagaattctaaagttaaacgaagggtttgatcggttttttgagcgggagcttgagattcttgggagcatcaaacaccgatacctcgtgaatctacgtggatattgcaattcaccaacatcaaagctactgttatatgattacttgcccggtggtagccttgatgaagcacttcatgagagaggcgagcaattggactgggattcacgcgtaaatatcatcataggagctgcgaaagggttatcatatttgcatcatgattgttctcctcggattatacatcgtgatataaagtcgagcaacattttgcttgatggcaatctcgaggcacgggtatcggattttggtctagccaagttgttggaagacgaagaatctcatatcacaaccattgttgcaggcacatttgggtacctagctccagaatatatgcaaagtggtagagcaactgagaaaaccgatgtatacagttttggggttttggttcttgaagtcttgagtgggaaaagaccaaccgatgcttccttcatcgagaaaggccttaacgttgttggttggctaaagttcttaatcagcgaaaaacggccaagggatattgttgatccaaactgtgaaggaatgcagatggagagccttgacgctctactatcaatagcaacacagtgtgtgtctccgagtccagaagagcgtccaacgatgcatcgggttgtccagttacttgaatcagaggtcatgactccttgtcccagcgaattttatgattccagctctgattaa

SEQ ID NO: 83315 - protein, 590 aa, Arabidopsis thaliana
  peptide (1)..(590): Ceres Seq. ID no. 12669713
  misc_feature (30)..(590): Homolog of NCBI NO: 15227455 NR Description: putative receptor-like protein kinase; protein id:
  misc_feature (11)..(590): Homolog of NCBI NO: 30697726 NR Description: leucine rich repeat protein family [Arabidopsis >gi|26451750|dbj|BAC42970.1| putative receptor like protein
  misc_feature (33)..(590): Homolog of NCBI NO: 10177448 NR Description: receptor-like protein kinase [Arabidopsis
  misc_feature (32)..(575): Homolog of NCBI NO: 13897308 NR Description: SERK1 protein [Zea mays]
  misc_feature (12)..(575): Homolog of NCBI NO: 40253600 NR Description: putative somatic embryogenesis receptor kinase 1
  misc_feature (12)..(575): Homolog of NCBI NO: 13897310 NR Description: SERK2 protein [Zea mays]
  misc_feature (4)..(575): Homolog of NCBI NO: 24935324 NR Description: somatic embryogenesis receptor kinase 1 [Medicago >gi|24935326|gb|AAN64294.1| somatic embryogenesis receptor kinase
  misc_feature (12)..(575): Homolog of NCBI NO: 13897320 NR Description: somatic embryogenesis receptor-like kinase 2 [Zea
  misc_feature (12)..(575): Homolog of NCBI NO: 38679443 NR Description: benzothiadiazole-induced somatic embryogenesis
  misc_feature (6)..(575): Homolog of NCBI NO: 15081616 NR Description: At1g71830/F14O23_24 [Arabidopsis thaliana]
MGICEMKSCCSWLLLISLLCSLSNESQAISPDGEALLSFRNAVTRSDSFIHQWRPEDPDPCNWNGVTCDAKTKRVITLNLTYHKIMGPLPPDIGKLDHLRLLMLHNNALYGAIPTALGNCTALEEIHLQSNYFTGPIPAEMGDLPGLQKLDMSSNTLSGPIPASLGQLKKLSNFNVSNNFLVGQIPSDGVLSGFSKNSFIGNLNLCGKHVDVVCQDDSGNPSSHSQSGQNQKKNSGKLLISASATVGALLLVALMCFWGCFLYKKLGKVEIKSLAKDVGGGASIVMFHGDLPYSSKDIIKKLEMLNEEHIIGCGGFGTVYKLAMDDGKVFALKRILKLNEGFDRFFERELEILGSIKHRYLVNLRGYCNSPTSKLLLYDYLPGGSLDEALHERGEQLDWDSRVNIIIGAAKGLSYLHHDCSPRIIHRDIKSSNILLDGNLEARVSDFGLAKLLEDEESHITTIVAGTFGYLAPEYMQSGRATEKTDVYSFGVLVLEVLSGKRPTDASFIEKGLNVVGWLKFLISEKRPRDIVDPNCEGMQMESLDALLSIATQCVSPSPEERPTMHRVVQLLESEVMTPCPSEFYDSSSD

SEQ ID NO: 83316 - protein, 585 aa, Arabidopsis thaliana
  peptide (1)..(585): Ceres Seq. ID no. 12669714
  misc_feature (25)..(585): Homolog of NCBI NO: 15227455 NR Description: putative receptor-like protein kinase; protein id:
  misc_feature (6)..(585): Homolog of NCBI NO: 30697726 NR Description: leucine rich repeat protein family [Arabidopsis >gi|26451750|dbj|BAC42970.1| putative receptor like protein
  misc_feature (28)..(585): Homolog of NCBI NO: 10177448 NR Description: receptor-like protein kinase [Arabidopsis
  misc_feature (27)..(570): Homolog of NCBI NO: 13897308 NR Description: SERK1 protein [Zea mays]
  misc_feature (7)..(570): Homolog of NCBI NO: 40253600 NR Description: putative somatic embryogenesis receptor kinase 1
  misc_feature (7)..(570): Homolog of NCBI NO: 13897310 NR Description: SERK2 protein [Zea mays]
  misc_feature (1)..(570): Homolog of NCBI NO: 24935324 NR Description: somatic embryogenesis receptor kinase 1 [Medicago >gi|24935326|gb|AAN64294.1| somatic embryogenesis receptor kinase
  misc_feature (7)..(570): Homolog of NCBI NO: 13897320 NR Description: somatic embryogenesis receptor-like kinase 2 [Zea
  misc_feature (7)..(570): Homolog of NCBI NO: 38679443 NR Description: benzothiadiazole-induced somatic embryogenesis
  misc_feature (1)..(570): Homolog of NCBI NO: 15081616 NR Description: At1g71830/F14O23_24 [Arabidopsis thaliana]
MKSCCSWLLLISLLCSLSNESQAISPDGEALLSFRNAVTRSDSFIHQWRPEDPDPCNWNGVTCDAKTKRVITLNLTYHKIMGPLPPDIGKLDHLRLLMLHNNALYGAIPTALGNCTALEEIHLQSNYFTGPIPAEMGDLPGLQKLDMSSNTLSGPIPASLGQLKKLSNFNVSNNFLVGQIPSDGVLSGFSKNSFIGNLNLCGKHVDVVCQDDSGNPSSHSQSGQNQKKNSGKLLISASATVGALLLVALMCFWGCFLYKKLGKVEIKSLAKDVGGGASIVMFHGDLPYSSKDIIKKLEMLNEEHIIGCGGFGTVYKLAMDDGKVFALKRILKLNEGFDRFFERELEILGSIKHRYLVNLRGYCNSPTSKLLLYDYLPGGSLDEALHERGEQLDWDSRVNIIIGAAKGLSYLHHDCSPRIIHRDIKSSNILLDGNLEARVSDFGLAKLLEDEESHITTIVAGTFGYLAPEYMQSGRATEKTDVYSFGVLVLEVLSGKRPTDASFIEKGLNVVGWLKFLISEKRPRDIVDPNCEGMQMESLDALLSIATQCVSPSPEERPTMHRVVQLLESEVMTPCPSEFYDSSSD

SEQ ID NO: 83317 - protein, 505 aa, Arabidopsis thaliana
  peptide (1)..(505): Ceres Seq. ID no. 12669715
  misc_feature (1)..(505): Homolog of NCBI NO: 15227455 NR Description: putative receptor-like protein kinase; protein id:
  misc_feature (1)..(505): Homolog of NCBI NO: 30697726 NR Description: leucine rich repeat protein family [Arabidopsis >gi|26451750|dbj|BAC42970.1| putative receptor like protein
  misc_feature (1)..(505): Homolog of NCBI NO: 10177448 NR Description: receptor-like protein kinase [Arabidopsis
  misc_feature (1)..(490): Homolog of NCBI NO: 13897308 NR Description: SERK1 protein [Zea mays]
  misc_feature (1)..(490): Homolog of NCBI NO: 40253600 NR Description: putative somatic embryogenesis receptor kinase 1
  misc_feature (1)..(490): Homolog of NCBI NO: 13897310 NR Description: SERK2 protein [Zea mays]
  misc_feature (1)..(490): Homolog of NCBI NO: 24935324 NR Description: somatic embryogenesis receptor kinase 1 [Medicago >gi|24935326|gb|AAN64294.1| somatic embryogenesis receptor kinase
  misc_feature (1)..(490): Homolog of NCBI NO: 13897320 NR Description: somatic embryogenesis receptor-like kinase 2 [Zea
  misc_feature (1)..(490): Homolog of NCBI NO: 38679443 NR Description: benzothiadiazole-induced somatic embryogenesis
  misc_feature (1)..(490): Homolog of NCBI NO: 15081616 NR Description: At1g71830/F14O23_24 [Arabidopsis thaliana]
MGPLPPDIGKLDHLRLLMLHNNALYGAIPTALGNCTALEEIHLQSNYFTGPIPAEMGDLPGLQKLDMSSNTLSGPIPASLGQLKKLSNFNVSNNFLVGQIPSDGVLSGFSKNSFIGNLNLCGKHVDVVCQDDSGNPSSHSQSGQNQKKNSGKLLISASATVGALLLVALMCFWGCFLYKKLGKVEIKSLAKDVGGGASIVMFHGDLPYSSKDIIKKLEMLNEEHIIGCGGFGTVYKLAMDDGKVFALKRILKLNEGFDRFFERELEILGSIKHRYLVNLRGYCNSPTSKLLLYDYLPGGSLDEALHERGEQLDWDSRVNIIIGAAKGLSYLHHDCSPRIIHRDIKSSNILLDGNLEARVSDFGLAKLLEDEESHITTIVAGTFGYLAPEYMQSGRATEKTDVYSFGVLVLEVLSGKRPTDASFIEKGLNVVGWLKFLISEKRPRDIVDPNCEGMQMESLDALLSIATQCVSPSPEERPTMHRVVQLLESEVMTPCPSEFYDSSSD

SEQ ID NO: 83318 - DNA, 1335 bp, Arabidopsis thaliana
  misc_feature (1)..(1335): Ceres Seq. ID no. 12669723
  misc_feature: MA Experiment ID: 20000264 Result: Up-regulated in Transcription
  misc_feature: MA Experiment 20000264 PARAMETER Experiment Name: At_Open_Flower_P Parameter: Age (day) Value: 21
  misc_feature: MA Experiment 20000264 PARAMETER Experiment Name: At_Open_Flower_P Parameter: Plant Line Value: WS
  misc_feature: MA Experiment 20000264 PARAMETER Experiment Name: At_Open_Flower_P Parameter: Tissue Value: Open Flower vs. Whole Plant
  misc_feature: MA Experiment ID: 20000286 Result: Up-regulated in Transcription
  misc_feature: MA Experiment 20000286 PARAMETER Experiment Name: At_Open_Flower_P Parameter: Age (day) Value: 21
  misc_feature: MA Experiment 20000286 PARAMETER Experiment Name: At_Open_Flower_P Parameter: Plant Line Value: WS
  misc_feature: MA Experiment 20000286 PARAMETER Experiment Name: At_Open_Flower_P Parameter: Tissue Value: Half Open vs. Whole Plant
  misc_feature: MA Experiment ID: 20000443 Result: Down-regulated in Transcription
  misc_feature: MA Experiment 20000443 PARAMETER Experiment Name: At_1uM_BR-BRZ__P Parameter: Tissue Value: Shoot Apices
  misc_feature: MA Experiment 20000443 PARAMETER Experiment Name: At_1uM_BR-BRZ__P Parameter: Treatment Value: 1uM BRZ vs. No Treatment
  misc_feature: MA Experiment ID: 20001558 Result: Down-regulated in Transcription
  misc_feature: MA Experiment 20001558 PARAMETER Experiment Name: At_Drought_Soil_Dry_P Parameter: Age (day) Value: 27
  misc_feature: MA Experiment 20001558 PARAMETER Experiment Name: At_Drought_Soil_Dry_P Parameter: Organism Value: A. thaliana
  misc_feature: MA Experiment 20001558 PARAMETER Experiment Name: At_Drought_Soil_Dry_P Parameter: Plant Line Value: WS
  misc_feature: MA Experiment 20001558 PARAMETER Experiment Name: At_Drought_Soil_Dry_P Parameter: Post Timepoint (hr) Value: 6
  misc_feature: MA Experiment 20001558 PARAMETER Experiment Name: At_Drought_Soil_Dry_P Parameter: Post-Treatment Value: Re-Water vs. No Drought
  misc_feature: MA Experiment 20001558 PARAMETER Experiment Name: At_Drought_Soil_Dry_P Parameter: Timepoint (day) Value: 13
  misc_feature: MA Experiment 20001558 PARAMETER Experiment Name: At_Drought_Soil_Dry_P Parameter: Treatment Value: Drought vs. No Drought
  misc_feature: MA Experiment ID: 20001911 Result: Down-regulated in Transcription
  misc_feature: MA Experiment 20001911 PARAMETER Experiment Name: At_Drought_Reproduction_P Parameter: Age (day) Value: 40
  misc_feature: MA Experiment 20001911 PARAMETER Experiment Name: At_Drought_Reproduction_P Parameter: Organism Value: A. thaliana
  misc_feature: MA Experiment 20001911 PARAMETER Experiment Name: At_Drought_Reproduction_P Parameter: Plant Line Value: WS
  misc_feature: MA Experiment 20001911 PARAMETER Experiment Name: At_Drought_Reproduction_P Parameter: Timepoint (day) Value: 10
  misc_feature: MA Experiment 20001911 PARAMETER Experiment Name: At_Drought_Reproduction_P Parameter: Tissue Value: Flowers
  misc_feature: MA Experiment 20001911 PARAMETER Experiment Name: At_Drought_Reproduction_P Parameter: Treatment Value: Drought vs. No Drought
atgaaaatctttgatgttagtttcaccggagagttcatagtcaaagcttctggcgaccaaccggagaaagttaatagccttaatctctcaaattttgaccttctttccggccgttttccggtgacctacttttacttctaccccaagcaaccacaattatcctttgaaacaatcgtcaaatccctccaaagctctctctctcaaactctcagctacttctatcctttcgcgggtcagattgttcccaatgaaacatcacaagaagagcctatgatcatctgtaacaacaatggagctttgttcgttgaagcccgagctcatgtcgatctcaagagtttagatttttacaatcttgatgcgtttctccaatcaaagctggtacaggttaacccggatttctctttacagattcaagcgacagagttcgaatgtggaggcctcgctttaacattcacgtttgatcatgctttaggagacgcgagctccttcgggaaattcctcactttgtggtcagagatatcgagaaataagccggtttcttgtgtaccagatcacaggagaaacctcctccgggcacgctctcctccacgttatgaccctcacttggacaaaactttcataaaatgcagtgaggaagacattaagaacataccgatgtctaaaacgctcatcaagcgtctctaccacatcggtgcttcgagcctagacgcgttgcaagctctagctactgtaaacggagagagcaggacaaagattgaagctttctccgcttatgtgtggaagaaaatggtggattctatagagagcggtcataaaacctgcaagatgggatggcttgtcgacggtagaggaagacttgagaccgttacctcgagctacataggaaacgtattgtctatagctgtaggtgaagccagtatcgaaaatctgaagaaaaaccatgtgtcagatatagcaaacatagtgcataaatcgataacagaagtgacaaacgatactcatttcacagatttgatagattggatcgagagtcaccgacctggactgatgttggctcgggtggttctcggacaagaaggaccagctttggtcttgtcttcaggacgacggttccctgtggctgaattggattttggatttggtgctcctttcctaggaactgtatgttcaacggttgagaaaataggagttggttacctgaaccagcgacctagcgcctgcaatgatggctcgtggtcggtttctgctattgtgtggcctgaactcgctacagctttagagtctgactcggtgtttcagccaatgtctgctaaacatcttcaactccagacctga

SEQ ID NO: 83319 - protein, 444 aa, Arabidopsis thaliana
  peptide (1)..(444): Ceres Seq. ID no. 12669724
  misc_feature (4)..(435): Pfam Name: Transferase family Pfam Description: Transferase family
  misc_feature (1)..(444): Homolog of NCBI NO: 15222365 NR Description: hypothetical protein; protein id: At1g31490.1
  misc_feature (4)..(442): Homolog of NCBI NO: 7487911 NR Description: hypothetical protein YUP8H12R.39 - Arabidopsis
  misc_feature (4)..(442): Homolog of NCBI NO: 15219263 NR Description: hypothetical protein; protein id: At1g78990.1
  misc_feature (27)..(444): Homolog of NCBI NO: 15223333 NR Description: hypothetical protein; protein id: At1g32910.1
  misc_feature (4)..(442): Homolog of NCBI NO: 15237343 NR Description: putative protein; protein id: At5g16410.1
  misc_feature (21)..(440): Homolog of NCBI NO: 32488821 NR Description: OSJNBa0085I10.1 [Oryza sativa (japonica
  misc_feature (21)..(440): Homolog of NCBI NO: 38567901 NR Description: OSJNBa0060N03.21 [Oryza sativa (japonica
  misc_feature (13)..(443): Homolog of NCBI NO: 34903004 NR Description: unnamed protein product [Oryza sativa (japonica group)] >gi|34903012|ref|NP_912853.1| unnamed protein product
  misc_feature (157)..(366): Homolog of NCBI NO: 34393204 NR Description: anthranilate
  misc_feature (379)..(442): Homolog of NCBI NO: 34393204 NR Description: anthranilate
MKIFDVSFTGEFIVKASGDQPEKVNSLNLSNFDLLSGRFPVTYFYFYPKQPQLSFETIVKSLQSSLSQTLSYFYPFAGQIVPNETSQEEPMIICNNNGALFVEARAHVDLKSLDFYNLDAFLQSKLVQVNPDFSLQIQATEFECGGLALTFTFDHALGDASSFGKFLTLWSEISRNKPVSCVPDHRRNLLRARSPPRYDPHLDKTFIKCSEEDIKNIPMSKTLIKRLYHIGASSLDALQALATVNGESRTKIEAFSAYVWKKMVDSIESGHKTCKMGWLVDGRGRLETVTSSYIGNVLSIAVGEASIENLKKNHVSDIANIVHKSITEVTNDTHFTDLIDWIESHRPGLMLARVVLGQEGPALVLSSGRRFPVAELDFGFGAPFLGTVCSTVEKIGVGYLNQRPSACNDGSWSVSAIVWPELATALESDSVFQPMSAKHLQLQT

SEQ ID NO: 83320 - protein, 354 aa, Arabidopsis thaliana
  peptide (1)..(354): Ceres Seq. ID no. 12669725
  misc_feature (1)..(345): Pfam Name: Transferase family Pfam Description: Transferase family
  misc_feature (1)..(354): Homolog of NCBI NO: 15222365 NR Description: hypothetical protein; protein id: At1g31490.1
  misc_feature (1)..(352): Homolog of NCBI NO: 7487911 NR Description: hypothetical protein YUP8H12R.39 - Arabidopsis
  misc_feature (1)..(352): Homolog of NCBI NO: 15219263 NR Description: hypothetical protein; protein id: At1g78990.1
  misc_feature (1)..(354): Homolog of NCBI NO: 15223333 NR Description: hypothetical protein; protein id: At1g32910.1
  misc_feature (1)..(352): Homolog of NCBI NO: 15237343 NR Description: putative protein; protein id: At5g16410.1
  misc_feature (1)..(350): Homolog of NCBI NO: 32488821 NR Description: OSJNBa0085I10.1 [Oryza sativa (japonica
  misc_feature (1)..(350): Homolog of NCBI NO: 38567901 NR Description: OSJNBa0060N03.21 [Oryza sativa (japonica
  misc_feature (1)..(353): Homolog of NCBI NO: 34903004 NR Description: unnamed protein product [Oryza sativa (japonica group)] >gi|34903012|ref|NP_912853.1| unnamed protein product
  misc_feature (67)..(276): Homolog of NCBI NO: 34393204 NR Description: anthranilate
  misc_feature (289)..(352): Homolog of NCBI NO: 34393204 NR Description: anthranilate
MIICNNNGALFVEARAHVDLKSLDFYNLDAFLQSKLVQVNPDFSLQIQATEFECGGLALTFTFDHALGDASSFGKFLTLWSEISRNKPVSCVPDHRRNLLRARSPPRYDPHLDKTFIKCSEEDIKNIPMSKTLIKRLYHIGASSLDALQALATVNGESRTKIEAFSAYVWKKMVDSIESGHKTCKMGWLVDGRGRLETVTSSYIGNVLSIAVGEASIENLKKNHVSDIANIVHKSITEVTNDTHFTDLIDWIESHRPGLMLARVVLGQEGPALVLSSGRRFPVAELDFGFGAPFLGTVCSTVEKIGVGYLNQRPSACNDGSWSVSAIVWPELATALESDSVFQPMSAKHLQLQT

SEQ ID NO: 83321 - protein, 226 aa, Arabidopsis thaliana
  peptide (1)..(226): Ceres Seq. ID no. 12669726
  misc_feature (1)..(217): Pfam Name: Transferase family Pfam Description: Transferase family
  misc_feature (1)..(226): Homolog of NCBI NO: 15222365 NR Description: hypothetical protein; protein id: At1g31490.1
  misc_feature (1)..(224): Homolog of NCBI NO: 7487911 NR Description: hypothetical protein YUP8H12R.39 - Arabidopsis
  misc_feature (1)..(224): Homolog of NCBI NO: 15219263 NR Description: hypothetical protein; protein id: At1g78990.1
  misc_feature (1)..(226): Homolog of NCBI NO: 15223333 NR Description: hypothetical protein; protein id: At1g32910.1
  misc_feature (1)..(224): Homolog of NCBI NO: 15237343 NR Description: putative protein; protein id: At5g16410.1
  misc_feature (1)..(222): Homolog of NCBI NO: 32488821 NR Description: OSJNBa0085I10.1 [Oryza sativa (japonica
  misc_feature (1)..(222): Homolog of NCBI NO: 38567901 NR Description: OSJNBa0060N03.21 [Oryza sativa (japonica
  misc_feature (1)..(225): Homolog of NCBI NO: 34903004 NR Description: unnamed protein product [Oryza sativa (japonica group)] >gi|34903012|ref|NP_912853.1| unnamed protein product
  misc_feature (1)..(148): Homolog of NCBI NO: 34393204 NR Description: anthranilate
  misc_feature (161)..(224): Homolog of NCBI NO: 34393204 NR Description: anthranilate
MSKTLIKRLYHIGASSLDALQALATVNGESRTKIEAFSAYVWKKMVDSIESGHKTCKMGWLVDGRGRLETVTSSYIGNVLSIAVGEASIENLKKNHVSDIANIVHKSITEVTNDTHFTDLIDWIESHRPGLMLARVVLGQEGPALVLSSGRRFPVAELDFGFGAPFLGTVCSTVEKIGVGYLNQRPSACNDGSWSVSAIVWPELATALESDSVFQPMSAKHLQLQT

SEQ ID NO: 83322 - DNA, 1618 bp, Arabidopsis thaliana
  misc_feature (1)..(1618): Ceres Seq. ID no. 12669772
  misc_feature: MA Experiment ID: 20000227 Result: Up-regulated in Transcription
  misc_feature: MA Experiment 20000227 PARAMETER Experiment Name: At_Root-Tips-vs-Tops_P Parameter: Tissue Value: Root Tips vs. Root Tops
  misc_feature: MA Experiment ID: 20000439 Result: Up-regulated in Transcription
  misc_feature: MA Experiment 20000439 PARAMETER Experiment Name: At_Roots__P Parameter: Age (day) Value: 14 vs. 21
  misc_feature: MA Experiment 20000439 PARAMETER Experiment Name: At_Roots__P Parameter: Organism Value: A. thaliana
  misc_feature: MA Experiment 20000439 PARAMETER Experiment Name: At_Roots__P Parameter: Tissue Value: Roots vs. Whole Plant
aaaaataaaccaaaatttaataacagagattatttgccttttaatacatatacacacacgcacatatctacctgcatcttcttcataatcattcctaagaaattctctctctcacacactcaagaacaagacaagagtcaagaaaaatcagatgagtctctatagcttcattagcttgttgttactgtttctcatcacgatttcaatggagtttaaagagacatcatccttaagaagagacatgaccaagcttttaaagctccaagagaagattcaagaaagactcgcagtcactcccactctctcaccagtgtcttctccttcttctcactctcccaaaatggttgggaaggtgatatacccgattggttacggagctgaccctacaggtggacaagacagtagtgacgcaatacttgaagctttaactgatgcttttcagttacaaactggacttgagatgctgccacgtgtcgctgatttaggtggtctagttattgatctccaaggtggcagttacatgatcggaaaacctctcaggttcccttcctccggtggcggaaatcttgtggtgaaaggtgggactttccgggcatcagaactgtttcctggtgataggcatttagttgagcttgtagcatcaaacgctaagaaaccaatgaaaatgtcgccagaggagtctttctccgatcagaaagaccagagctctgggatcttctatgaggatgtgaccttccaagatgttctcttcgactcaagattccgaggaggtggtattttggtgattgactcagctcgtatccgtataaccaattgttatttcctccatttcacaacgcaagggattaaagtccaaggaggtcatgagacatacatttcaaactccttcttggggcaacattcaacggtaggaggagacagagaagaaagaggatttactgggacaggaatcgatatctcgagtaacgacaatgccattacggatgtagtgattttctcggctggtatcggtatctctttgaatggtggtgcaaatatggttacgggtgtgcattgctacaataaagctacatggtttggtggcattggcattctagtgaaatcacatttaacgaggatagataattgttaccttgattacacaggtatagtcatagaagaccctgtccatgttcatgtcaccaatgctttgttcttaggagatgcaaacatcgtcttgagatcggtacacgggaagatttccggtgtaaacatcgtcaacaacatgtttagcggtaccgccaaaaacaacttcccgattgtcaagctagaaggagagtttcatgatattaatcaagttgtgattgatcaaaacaatgcagaagggatgatgctgaaatcaacaaccggaaaggccatggtttccgcaaatggaacacgatggatcgctgatttttcccctgttttggtattccctaaccggataaaccattaccagcattcgtttttcgctcaatccggacagatccctgcaaatgcagtgaccaatgtctccaacaatatggtggttgtagaaaccgatagagctgtaactggaaccgtgtcaataattgcttatcagtaaaacaacattcttcac

SEQ ID NO: 83323 - protein, 483 aa, Arabidopsis thaliana
  peptide (1)..(483): Ceres Seq. ID no. 12669773
  misc_feature (1)..(483): Homolog of NCBI NO: 18415427 NR Description: putative protein; protein id: At4g20040.1, by cDNA: gi_16226215 [Arabidopsis thaliana] AT4g20040/F18F4_140 [Arabidopsis thaliana]
  misc_feature (31)..(483): Homolog of NCBI NO: 7485728 NR Description: hypothetical protein F18F4.140 - Arabidopsis >gi|2827658|emb|CAA16612.1| putative protein [Arabidopsis >gi|7268799|emb|CAB79004.1| putative protein [Arabidopsis
  misc_feature (28)..(483): Homolog of NCBI NO: 38347355 NR Description: OSJNBa0070C17.16 [Oryza sativa (japonica
  misc_feature (135)..(483): Homolog of NCBI NO: 15235269 NR Description: putative protein; protein id: At4g20050.1
MSLYSFISLLLLFLITISMEFKETSSLRRDMTKLLKLQEKIQERLAVTPTLSPVSSPSSHSPKMVGKVIYPIGYGADPTGGQDSSDAILEALTDAFQLQTGLEMLPRVADLGGLVIDLQGGSYMIGKPLRFPSSGGGNLVVKGGTFRASELFPGDRHLVELVASNAKKPMKMSPEESFSDQKDQSSGIFYEDVTFQDVLFDSRFRGGGILVIDSARIRITNCYFLHFTTQGIKVQGGHETYISNSFLGQHSTVGGDREERGFTGTGIDISSNDNAITDVVIFSAGIGISLNGGANMVTGVHCYNKATWFGGIGILVKSHLTRIDNCYLDYTGIVIEDPVHVHVTNALFLGDANIVLRSVHGKISGVNIVNNMFSGTAKNNFPIVKLEGEFHDINQVVIDQNNAEGMMLKSTTGKAMVSANGTRWIADFSPVLVFPNRINHYQHSFFAQSGQIPANAVTNVSNNMVVVETDRAVTGTVSIIAYQ

SEQ ID NO: 83324 - protein, 465 aa, Arabidopsis thaliana
  peptide (1)..(465): Ceres Seq. ID no. 12669774
  misc_feature (1)..(465): Homolog of NCBI NO: 18415427 NR Description: putative protein; protein id: At4g20040.1, by cDNA: gi_16226215 [Arabidopsis thaliana] AT4g20040/F18F4_140 [Arabidopsis thaliana]
  misc_feature (13)..(465): Homolog of NCBI NO: 7485728 NR Description: hypothetical protein F18F4.140 - Arabidopsis >gi|2827658|emb|CAA16612.1| putative protein [Arabidopsis >gi|7268799|emb|CAB79004.1| putative protein [Arabidopsis
  misc_feature (10)..(465): Homolog of NCBI NO: 38347355 NR Description: OSJNBa0070C17.16 [Oryza sativa (japonica
  misc_feature (117)..(465): Homolog of NCBI NO: 15235269 NR Description: putative protein; protein id: At4g20050.1
MEFKETSSLRRDMTKLLKLQEKIQERLAVTPTLSPVSSPSSHSPKMVGKVIYPIGYGADPTGGQDSSDAILEALTDAFQLQTGLEMLPRVADLGGLVIDLQGGSYMIGKPLRFPSSGGGNLVVKGGTFRASELFPGDRHLVELVASNAKKPMKMSPEESFSDQKDQSSGIFYEDVTFQDVLFDSRFRGGGILVIDSARIRITNCYFLHFTTQGIKVQGGHETYISNSFLGQHSTVGGDREERGFTGTGIDISSNDNAITDVVIFSAGIGISLNGGANMVTGVHCYNKATWFGGIGILVKSHLTRIDNCYLDYTGIVIEDPVHVHVTNALFLGDANIVLRSVHGKISGVNIVNNMFSGTAKNNFPIVKLEGEFHDINQVVIDQNNAEGMMLKSTTGKAMVSANGTRWIADFSPVLVFPNRINHYQHSFFAQSGQIPANAVTNVSNNMVVVETDRAVTGTVSIIAYQ

SEQ ID NO: 83325 - protein, 453 aa, Arabidopsis thaliana
  peptide (1)..(453): Ceres Seq. ID no. 12669775
  misc_feature (1)..(453): Homolog of NCBI NO: 18415427 NR Description: putative protein; protein id: At4g20040.1, by cDNA: gi_16226215 [Arabidopsis thaliana] AT4g20040/F18F4_140 [Arabidopsis thaliana]
  misc_feature (1)..(453): Homolog of NCBI NO: 7485728 NR Description: hypothetical protein F18F4.140 - Arabidopsis >gi|2827658|emb|CAA16612.1| putative protein [Arabidopsis >gi|7268799|emb|CAB79004.1| putative protein [Arabidopsis
  misc_feature (1)..(453): Homolog of NCBI NO: 38347355 NR Description: OSJNBa0070C17.16 [Oryza sativa (japonica
  misc_feature (105)..(453): Homolog of NCBI NO: 15235269 NR Description: putative protein; protein id: At4g20050.1
MTKLLKLQEKIQERLAVTPTLSPVSSPSSHSPKMVGKVIYPIGYGADPTGGQDSSDAILEALTDAFQLQTGLEMLPRVADLGGLVIDLQGGSYMIGKPLRFPSSGGGNLVVKGGTFRASELFPGDRHLVELVASNAKKPMKMSPEESFSDQKDQSSGIFYEDVTFQDVLFDSRFRGGGILVIDSARIRITNCYFLHFTTQGIKVQGGHETYISNSFLGQHSTVGGDREERGFTGTGIDISSNDNAITDVVIFSAGIGISLNGGANMVTGVHCYNKATWFGGIGILVKSHLTRIDNCYLDYTGIVIEDPVHVHVTNALFLGDANIVLRSVHGKISGVNIVNNMFSGTAKNNFPIVKLEGEFHDINQVVIDQNNAEGMMLKSTTGKAMVSANGTRWIADFSPVLVFPNRINHYQHSFFAQSGQIPANAVTNVSNNMVVVETDRAVTGTVSIIAYQ

SEQ ID NO: 83326 - DNA, 2598 bp, Arabidopsis thaliana
  misc_feature (1)..(2598): Ceres Seq. ID no. 12669816
  misc_feature: MA Experiment ID: 20000227 Result: Down-regulated in Transcription
  misc_feature: MA Experiment 20000227 PARAMETER Experiment Name: At_Root-Tips-vs-Tops_P Parameter: Tissue Value: Root Tips vs. Root Tops
  misc_feature: MA Experiment ID: 20000439 Result: Up-regulated in Transcription
  misc_feature: MA Experiment 20000439 PARAMETER Experiment Name: At_Roots__P Parameter: Age (day) Value: 14 vs. 21
  misc_feature: MA Experiment 20000439 PARAMETER Experiment Name: At_Roots__P Parameter: Organism Value: A. thaliana
  misc_feature: MA Experiment 20000439 PARAMETER Experiment Name: At_Roots__P Parameter: Tissue Value: Roots vs. Whole Plant
  misc_feature: MA Experiment ID: 20000451 Result: Down-regulated in Transcription
  misc_feature: MA Experiment 20000451 PARAMETER Experiment Name: At_CS6879_Shoots-Roots_P Parameter: Age (day) Value: 14
  misc_feature: MA Experiment 20000451 PARAMETER Experiment Name: At_CS6879_Shoots-Roots_P Parameter: Organism Value: A. thaliana
  misc_feature: MA Experiment 20000451 PARAMETER Experiment Name: At_CS6879_Shoots-Roots_P Parameter: Plant Line Value: CS6879 vs. WS
  misc_feature: MA Experiment 20000451 PARAMETER Experiment Name: At_CS6879_Shoots-Roots_P Parameter: Tissue Value: Roots
  misc_feature: Pfam Name: p450 Pfam Description: Cytochrome P450
atggagatgatattaatctctttgtgcttaaccaccttattagcatttctcttcctaaaaccactcctcaaacgaatcaccaccaccaaacctaagttaccaccgtctccatggcggcttccggtgattggaaacctccaccagctcggtcccaaccctcaccgctatctccattccctcagcctccggtatgggccactcatgctccttcatttcggccgtgtacctgtgcttgtggtttcttgtcctgacgtgactaatgacatcatgaaaacacacgaccttaagttcgcaaaccgcccgaaatcaaaagctattaatatatttatggaaggtggccgtgatataatctttggcccctacggagaagattggaagagtatgaagagtctgggtgtggtacatctgctcaataacaaaatggttaggtcctttgagaacctaagagaagaagagatcaaagtaatgacagagaagctggaagaagcatcttcatcttcttcatcagtaaatctaagcaaactccttatgactcttaccaacgatatcatatgcagaatcaccttgggaagaaaatataacgaagaggaaggtggaatcgatatcaagaacttagtgatgacatcctctgagttttttggcaaattcttttttggagattttattcctagtttggcatggatagactggatcagtggcatagatgataaaatgaaggacataaataacaagttagattgttttttagacagcatggtgcaagaacatgttgatgccgatcacaaagagccatcagattttattgatatgttgctactgattcaaaaggataaaaccaaacggtttaagtttgacagaagtgacttaatactcatactcaaggatatgtttttctctggaacagcaacaactgcctcacaattagaatggacaatgacagagcttatgagacatccagagtgtatgaaaaaacttcaagatgagattaattcattttcgacacataatttgaatgtaacggagaaagaagttgagaaaatgaactatttacattgcgtgattaaggaggggctacggttgcatccctctggtccactattgttcagactaccaagtgaagatgtccaattaaagggatatgacatttctgcagggacacatgtcataatcaatgcttgggcactccaacgaaaccctgcgatatgggggcttgatgccaatgaatatagaccggagagacattttgggagaagactttgccctggaatcggattttctttggttttgtccaaattggcactagccaaccttgtgaaacgattcaactggagactcaaggtcggaccagtaggagatgataagcctgatctagctgaagcatctggtattgatgtttgtccctttctcttcctaaacccactcctcaaacgaaccaccaccaccaaacctaaccaaccaccctctccctggcggcttccggttatcggatacctccaccagctcagcctccaccctcaccgctcctttcgttccctcagcctccgcctatggtccgctcatgctccttcacttcggtcgtgtccctaccctcgattctcgaagtatatatcatcctctgacgtagctcatgacgtcatgaaaacacacgatcttaagtttgccaaccgtcccaaaaccaaagctgtcgatataattattaatggtgggagagatgtggctttctcctcctacggcgaatattggagacagatgaagagaagaagagataacatcagtgatatggggaagcttgagaaacaaagttcttcttctttgccggtaaatctaagtgatttactccttaacatgtcaaacgatgtgatatgtagaattgctgtgggaagaaaatatagccgggaggaaaacactagcgattttgaaaatcaactgagaaaagtcatggagcttctaggcgcatttcctgtcggagattacataccgggtttggcgtggatagataaagtccgcggcttggatcgtaaaatggaggaaattcaactagagaagacaaacgaatttgagcttgaaagaagcgacatcaggctcatcattttggaattcttcctaggaggaacgacaacaactttcacggccatcgattgggcaatgacacttgtcgtaagacatccagaatctatgaaaaaactccaagaagagatccaaacatattccaggaataagttatatgtaccagaagaagaagttgagaacatgaaatacttaaaagctgtgattaaagaagtctttcgtctacatcctccaggcccattgtcaattcccagacagcttagtgaagatgtattcatcaacgcttgggccatccatcgagataccgaaaaatggggaccatatgcagaagagtttaagccagagaggcatttggatctaccactgaatttccaaggacaagatttcaacttcattccattcggatcgggaagaaggttatgtcctgacatagattttgcaacaatgttaattgaggtgggattggcaaacttcgtgtaccgcttcaactggagagttgagactagaccacttggagatgatgatggttga

SEQ ID NO: 83327 - protein, 865 aa, Arabidopsis thaliana
  peptide (1)..(865): Ceres Seq. ID no. 12669817
  misc_feature: Pfam Name: p450 Pfam Description: Cytochrome P450
  misc_feature (1)..(415): Homolog of NCBI NO: 21542394 NR Description: Cytochrome P450 71A27
  misc_feature (416)..(466): Homolog of NCBI NO: 21542394 NR Description: Cytochrome P450 71A27
  misc_feature (678)..(865): Homolog of NCBI NO: 13878368 NR Description: CYTOCHROME P450 71A28
  misc_feature (468)..(585): Homolog of NCBI NO: 13878368 NR Description: CYTOCHROME P450 71A28
  misc_feature (585)..(690): Homolog of NCBI NO: 13878368 NR Description: CYTOCHROME P450 71A28
  misc_feature (1)..(453): Homolog of NCBI NO: 7430654 NR Description: probable cytochrome P450 F1C12.160 - Arabidopsis >gi|2982441|emb|CAA18249.1| cytochrome p450 like protein thaliana] >gi|7268819|emb|CAB79024.1| cytochrome p450 like
  misc_feature (3)..(419): Homolog of NCBI NO: 13878406 NR Description: Cytochrome P450 71A20 >gi|7430641|pir||T06288
  misc_feature (416)..(465): Homolog of NCBI NO: 13878406 NR Description: Cytochrome P450 71A20 >gi|7430641|pir||T06288
  misc_feature (1)..(414): Homolog of NCBI NO: 15224570 NR Description: cytochrome p450 family; protein id: At2g30770.1
  misc_feature (416)..(466): Homolog of NCBI NO: 15224570 NR Description: cytochrome p450 family; protein id: At2g30770.1
MEMILISLCLTTLLAFLFLKPLLKRITTTKPKLPPSPWRLPVIGNLHQLGPNPHRYLHSLSLRYGPLMLLHFGRVPVLVVSCPDVTNDIMKTHDLKFANRPKSKAINIFMEGGRDIIFGPYGEDWKSMKSLGVVHLLNNKMVRSFENLREEEIKVMTEKLEEASSSSSSVNLSKLLMTLTNDIICRITLGRKYNEEEGGIDIKNLVMTSSEFFGKFFFGDFIPSLAWIDWISGIDDKMKDINNKLDCFLDSMVQEHVDADHKEPSDFIDMLLLIQKDKTKRFKFDRSDLILILKDMFFSGTATTASQLEWTMTELMRHPECMKKLQDEINSFSTHNLNVTEKEVEKMNYLHCVIKEGLRLHPSGPLLFRLPSEDVQLKGYDISAGTHVIINAWALQRNPAIWGLDANEYRPERHFGRRLCPGIGFSLVLSKLALANLVKRFNWRLKVGPVGDDKPDLAEASGIDVCPFLFLNPLLKRTTTTKPNQPPSPWRLPVIGYLHQLSLHPHRSFRSLSLRLWSAHAPSLRSCPYPRFSKYISSSDVAHDVMKTHDLKFANRPKTKAVDIIINGGRDVAFSSYGEYWRQMKRRRDNISDMGKLEKQSSSSLPVNLSDLLLNMSNDVICRIAVGRKYSREENTSDFENQLRKVMELLGAFPVGDYIPGLAWIDKVRGLDRKMEEIQLEKTNEFELERSDIRLIILEFFLGGTTTTFTAIDWAMTLVVRHPESMKKLQEEIQTYSRNKLYVPEEEVENMKYLKAVIKEVFRLHPPGPLSIPRQLSEDVFINAWAIHRDTEKWGPYAEEFKPERHLDLPLNFQGQDFNFIPFGSGRRLCPDIDFATMLIEVGLANFVYRFNWRVETRPLGDDDG

SEQ ID NO: 83328 - protein, 863 aa, Arabidopsis thaliana
  peptide (1)..(863): Ceres Seq. ID no. 12669818
  misc_feature: Pfam Name: p450 Pfam Description: Cytochrome P450
  misc_feature (1)..(413): Homolog of NCBI NO: 21542394 NR Description: Cytochrome P450 71A27
  misc_feature (414)..(464): Homolog of NCBI NO: 21542394 NR Description: Cytochrome P450 71A27
  misc_feature (676)..(863): Homolog of NCBI NO: 13878368 NR Description: CYTOCHROME P450 71A28
  misc_feature (466)..(583): Homolog of NCBI NO: 13878368 NR Description: CYTOCHROME P450 71A28
  misc_feature (583)..(688): Homolog of NCBI NO: 13878368 NR Description: CYTOCHROME P450 71A28
  misc_feature (1)..(451): Homolog of NCBI NO: 7430654 NR Description: probable cytochrome P450 F1C12.160 - Arabidopsis >gi|2982441|emb|CAA18249.1| cytochrome p450 like protein thaliana] >gi|7268819|emb|CAB79024.1| cytochrome p450 like
  misc_feature (1)..(417): Homolog of NCBI NO: 13878406 NR Description: Cytochrome P450 71A20 >gi|7430641|pir||T06288
  misc_feature (414)..(463): Homolog of NCBI NO: 13878406 NR Description: Cytochrome P450 71A20 >gi|7430641|pir||T06288
  misc_feature (1)..(412): Homolog of NCBI NO: 15224570 NR Description: cytochrome p450 family; protein id: At2g30770.1
  misc_feature (414)..(464): Homolog of NCBI NO: 15224570 NR Description: cytochrome p450 family; protein id: At2g30770.1
MILISLCLTTLLAFLFLKPLLKRITTTKPKLPPSPWRLPVIGNLHQLGPNPHRYLHSLSLRYGPLMLLHFGRVPVLVVSCPDVTNDIMKTHDLKFANRPKSKAINIFMEGGRDIIFGPYGEDWKSMKSLGVVHLLNNKMVRSFENLREEEIKVMTEKLEEASSSSSSVNLSKLLMTLTNDIICRITLGRKYNEEEGGIDIKNLVMTSSEFFGKFFFGDFIPSLAWIDWISGIDDKMKDINNKLDCFLDSMVQEHVDADHKEPSDFIDMLLLIQKDKTKRFKFDRSDLILILKDMFFSGTATTASQLEWTMTELMRHPECMKKLQDEINSFSTHNLNVTEKEVEKMNYLHCVIKEGLRLHPSGPLLFRLPSEDVQLKGYDISAGTHVIINAWALQRNPAIWGLDANEYRPERHFGRRLCPGIGFSLVLSKLALANLVKRFNWRLKVGPVGDDKPDLAEASGIDVCPFLFLNPLLKRTTTTKPNQPPSPWRLPVIGYLHQLSLHPHRSFRSLSLRLWSAHAPSLRSCPYPRFSKYISSSDVAHDVMKTHDLKFANRPKTKAVDIIINGGRDVAFSSYGEYWRQMKRRRDNISDMGKLEKQSSSSLPVNLSDLLLNMSNDVICRIAVGRKYSREENTSDFENQLRKVMELLGAFPVGDYIPGLAWIDKVRGLDRKMEEIQLEKTNEFELERSDIRLIILEFFLGGTTTTFTAIDWAMTLVVRHPESMKKLQEEIQTYSRNKLYVPEEEVENMKYLKAVIKEVFRLHPPGPLSIPRQLSEDVFINAWAIHRDTEKWGPYAEEFKPERHLDLPLNFQGQDFNFIPFGSGRRLCPDIDFATMLIEVGLANFVYRFNWRVETRPLGDDDG

SEQ ID NO: 83329 - protein, 798 aa, Arabidopsis thaliana
  peptide (1)..(798): Ceres Seq. ID no. 12669819
  misc_feature: Pfam Name: p450 Pfam Description: Cytochrome P450
  misc_feature (1)..(348): Homolog of NCBI NO: 21542394 NR Description: Cytochrome P450 71A27
  misc_feature (349)..(399): Homolog of NCBI NO: 21542394 NR Description: Cytochrome P450 71A27
  misc_feature (611)..(798): Homolog of NCBI NO: 13878368 NR Description: CYTOCHROME P450 71A28
  misc_feature (401)..(518): Homolog of NCBI NO: 13878368 NR Description: CYTOCHROME P450 71A28
  misc_feature (518)..(623): Homolog of NCBI NO: 13878368 NR Description: CYTOCHROME P450 71A28
  misc_feature (1)..(386): Homolog of NCBI NO: 7430654 NR Description: probable cytochrome P450 F1C12.160 - Arabidopsis >gi|2982441|emb|CAA18249.1| cytochrome p450 like protein thaliana] >gi|7268819|emb|CAB79024.1| cytochrome p450 like
  misc_feature (1)..(352): Homolog of NCBI NO: 13878406 NR Description: Cytochrome P450 71A20 >gi|7430641|pir||T06288
  misc_feature (349)..(398): Homolog of NCBI NO: 13878406 NR Description: Cytochrome P450 71A20 >gi|7430641|pir||T06288
  misc_feature (1)..(347): Homolog of NCBI NO: 15224570 NR Description: cytochrome p450 family; protein id: At2g30770.1
  misc_feature (349)..(399): Homolog of NCBI NO: 15224570 NR Description: cytochrome p450 family; protein id: At2g30770.1
MLLHFGRVPVLVVSCPDVTNDIMKTHDLKFANRPKSKAINIFMEGGRDIIFGPYGEDWKSMKSLGVVHLLNNKMVRSFENLREEEIKVMTEKLEEASSSSSSVNLSKLLMTLTNDIICRITLGRKYNEEEGGIDIKNLVMTSSEFFGKFFFGDFIPSLAWIDWISGIDDKMKDINNKLDCFLDSMVQEHVDADHKEPSDFIDMLLLIQKDKTKRFKFDRSDLILILKDMFFSGTATTASQLEWTMTELMRHPECMKKLQDEINSFSTHNLNVTEKEVEKMNYLHCVIKEGLRLHPSGPLLFRLPSEDVQLKGYDISAGTHVIINAWALQRNPAIWGLDANEYRPERHFGRRLCPGIGFSLVLSKLALANLVKRFNWRLKVGPVGDDKPDLAEASGIDVCPFLFLNPLLKRTTTTKPNQPPSPWRLPVIGYLHQLSLHPHRSFRSLSLRLWSAHAPSLRSCPYPRFSKYISSSDVAHDVMKTHDLKFANRPKTKAVDIIINGGRDVAFSSYGEYWRQMKRRRDNISDMGKLEKQSSSSLPVNLSDLLLNMSNDVICRIAVGRKYSREENTSDFENQLRKVMELLGAFPVGDYIPGLAWIDKVRGLDRKMEEIQLEKTNEFELERSDIRLIILEFFLGGTTTTFTAIDWAMTLVVRHPESMKKLQEEIQTYSRNKLYVPEEEVENMKYLKAVIKEVFRLHPPGPLSIPRQLSEDVFINAWAIHRDTEKWGPYAEEFKPERHLDLPLNFQGQDFNFIPFGSGRRLCPDIDFATMLIEVGLANFVYRFNWRVETRPLGDDDG

SEQ ID NO: 83330 - DNA, 2330 bp, Arabidopsis thaliana
  misc_feature (1)..(2330): Ceres Seq. ID no. 12669846
  misc_feature: MA Experiment ID: 20000314 Result: Up-regulated in Transcription
  misc_feature: MA Experiment 20000314 PARAMETER Experiment Name: At_14day_Shoots-Roots_Sub_P Parameter: Age (day) Value: 14
  misc_feature: MA Experiment 20000314 PARAMETER Experiment Name: At_14day_Shoots-Roots_Sub_P Parameter: Organism Value: A. thaliana
  misc_feature: MA Experiment 20000314 PARAMETER Experiment Name: At_14day_Shoots-Roots_Sub_P Parameter: Plant Line Value: WS
  misc_feature: MA Experiment 20000314 PARAMETER Experiment Name: At_14day_Shoots-Roots_Sub_P Parameter: Tissue Value: Roots vs. Whole Plant
  misc_feature: MA Experiment ID: 20000348 Result: Up-regulated in Transcription
  misc_feature: MA Experiment 20000348 PARAMETER Experiment Name: At_100uM_ABA_Sub_P Parameter: Age (day) Value: 14
  misc_feature: MA Experiment 20000348 PARAMETER Experiment Name: At_100uM_ABA_Sub_P Parameter: Organism Value: A. thaliana
  misc_feature: MA Experiment 20000348 PARAMETER Experiment Name: At_100uM_ABA_Sub_P Parameter: Plant Line Value: WS
  misc_feature: MA Experiment 20000348 PARAMETER Experiment Name: At_100uM_ABA_Sub_P Parameter: Timepoint (hr) Value: 1
  misc_feature: MA Experiment 20000348 PARAMETER Experiment Name: At_100uM_ABA_Sub_P Parameter: Tissue Value: Aerial
  misc_feature: MA Experiment 20000348 PARAMETER Experiment Name: At_100uM_ABA_Sub_P Parameter: Treatment Value: 100uM ABA vs. No Treatment
  misc_feature: MA Experiment ID: 20000349 Result: Up-regulated in Transcription
  misc_feature: MA Experiment 20000349 PARAMETER Experiment Name: At_100uM_ABA_Sub_P Parameter: Age (day) Value: 14
  misc_feature: MA Experiment 20000349 PARAMETER Experiment Name: At_100uM_ABA_Sub_P Parameter: Organism Value: A. thaliana
  misc_feature: MA Experiment 20000349 PARAMETER Experiment Name: At_100uM_ABA_Sub_P Parameter: Plant Line Value: WS
  misc_feature: MA Experiment 20000349 PARAMETER Experiment Name: At_100uM_ABA_Sub_P Parameter: Timepoint (hr) Value: 6
  misc_feature: MA Experiment 20000349 PARAMETER Experiment Name: At_100uM_ABA_Sub_P Parameter: Tissue Value: Aerial
  misc_feature: MA Experiment 20000349 PARAMETER Experiment Name: At_100uM_ABA_Sub_P Parameter: Treatment Value: 100uM ABA vs. No Treatment
  misc_feature: MA Experiment ID: 20000440 Result: Up-regulated in Transcription
  misc_feature: MA Experiment 20000440 PARAMETER Experiment Name: At_Closed-Flower__Sub_P Parameter: Tissue Value: Closed Flower vs. Whole Plant
aataaatcaaattacaaataaaatgcatacaaaaagcaaacaacctccgtgcaaatcatatcatatgcatggcttaaagggtttaggcttcaccttcccgatcgctagagttactgtgctagtctctatcttcccatcacagtcacatctcgtccgtacacgtggacccacatcctctttaagctcactagctgattgatatcgtcttatacctttggccgtttcgtctctctctctctcgtttaattacttgtacctatcaactcagtgatactctcgcttctgagagagaagagagaaagcgaagctcgtttcgtatcgtcttctttctcttcatccgacgctggattcataagggcattgataattggacttgttggttaagatttgaatcaacctggagctatgtcgagttttaatctgagtgtagatgtgaatcagaatgggaatatcaagaatgttgattctttatctacattggacgatattgatgacattgattttgccaagttgctagagaagccaaggccattgaatattgatagactgagatcacttgacgaaaggtctcttactgaattaactggttcaccacagcttagaaatgcggataatgcttctcgggcccctgatcatgcggattatgtgatttcaccaagctttggtaggaggtctggattcaatactcctaggtcacagcctggatttgagtctcatcctatggttggtgaggcctgggatgctttgaggcgctcaatggtttactttcgtggacaacctgttggcactattgctgctgtggataattctgaagaaaaactcaactatgatcaggtgttcgtgagagattttgtaccaagtgctttagcattcttgatgaatggagagccagatatagttaaaaacttccttttgaagactcttcgtcttcaatcttgggagaaaaagattgatagattccagcttggtgagggtgttatgcctgctagcttcaaagttttccatgatcctgttagaaaccatgaaacgctgatagctgattttggcgagagtgctattggaagagtagcgccggttgattcagggttttggtggattatattgctcagagcctacacaaaatctacaggagactcttctcttgctgacatgcctgaatgccagaagggtattcggctgatacttagcctgtgtctgtctgagggatttgataccttccccactctcttatgtgctgatggttgctgtatgattgatcgtaggatgggagtttatggttacccgatagagattcaagcccttttctttatggccttaaggtgtgccttgctcctgcttaaacatgacggagaaggtaaagaaatggtggaacagatagtgaagcgacttcatgcattgagctaccacatgaggagctacttttggctagacttgaagcagcttaatgacatttaccgatataagacagaggaatactctcacactgctgtcaacaagttcaacgtaatccctgattctcttccagaatgggttttcgactttatgccgcctcacggagggttctttattggcaacgttagccctgcaagaatggatttccgttggtttgctttgggtaattgtatagcaatattgtcttccttggctacacctgaacagtcgacagcaattatggatctgatagaatctcgctgggaagagttggttggagaaatgccactgaaagtttgctatcccgccatagaaagccatgaatggagaatagtaactggttgtgaccccaaaaacactcggtggagctaccacaatggaggatcgtggccagtgctgctatggcttctgacggctgcttgtatcaaaactggtcgacctcaaatagcaagacgagcaattgaagtagcagaggctaggcttcataaggaccactggcctgaatactatgatggaaaggtagggagatacgtggggaaacagtcgcgtaaaaaccagacttggtcagtcgcaggatacttagtagccaagatgatgctggaagatccgtcacatgttggtatggtttgtcttgaggaagacaaacagatgaaacccgttatgagaagatccaactcctggacttgttgaaaacgttggaaagagatgagctaagaagaaccttcttcgtgattcctggctttaatgctgataacgactcttttcttcatttttcaattgcaaattttacgttgcttgctttgtgaaatatttttagactatgaaagatttaagcatcgtaaaaaatatttcgtatgtttagcttcatgtctttattaaagcataaggggttctttctc

SEQ ID NO: 83331 - protein, 571 aa, Arabidopsis thaliana
  peptide (1)..(571): Ceres Seq. ID no. 12669847
  misc_feature (98)..(564): Pfam Name: Plant neutral invertase Pfam Description: Plant neutral invertase
  misc_feature (1)..(571): Homolog of NCBI NO: 15236209 NR Description: invertase - like protein; protein id: supported by cDNA: gi_15215775 [Arabidopsis thaliana]
  misc_feature (24)..(571): Homolog of NCBI NO: 18413234 NR Description: neutral invertase like protein; protein id:
  misc_feature (24)..(571): Homolog of NCBI NO: 25354737 NR Description: neutral invertase like protein [imported] - thaliana >gi|7267646|emb|CAB78074.1| neutral invertase like
  misc_feature (16)..(569): Homolog of NCBI NO: 30693221 NR Description: invertase -related [Arabidopsis thaliana]
  misc_feature (48)..(570): Homolog of NCBI NO: 18395144 NR Description: putative invertase; protein id: At1g22650.1,
  misc_feature (48)..(570): Homolog of NCBI NO: 21594008 NR Description: putative invertase [Arabidopsis thaliana]
  misc_feature (27)..(570): Homolog of NCBI NO: 38344939 NR Description: OSJNBa0084A10.15 [Oryza sativa (japonica
  misc_feature (80)..(570): Homolog of NCBI NO: 15218303 NR Description: neutral invertase, putative; protein id: [Arabidopsis thaliana] >gi|25354735|pir||A96743 probable neutral
  misc_feature (91)..(570): Homolog of NCBI NO: 7487359 NR Description: hypothetical protein T22J18.18 - Arabidopsis >gi|3287693|gb|AAC25521.1|AAC25521 Similar to LIM17 gene product from the genome of Synechocystis sp. gb|D90916. [Arabidopsis
  misc_feature (7)..(438): Homolog of NCBI NO: 431164 NR Description: ORF [Lilium longiflorum]
MSSFNLSVDVNQNGNIKNVDSLSTLDDIDDIDFAKLLEKPRPLNIDRLRSLDERSLTELTGSPQLRNADNASRAPDHADYVISPSFGRRSGFNTPRSQPGFESHPMVGEAWDALRRSMVYFRGQPVGTIAAVDNSEEKLNYDQVFVRDFVPSALAFLMNGEPDIVKNFLLKTLRLQSWEKKIDRFQLGEGVMPASFKVFHDPVRNHETLIADFGESAIGRVAPVDSGFWWIILLRAYTKSTGDSSLADMPECQKGIRLILSLCLSEGFDTFPTLLCADGCCMIDRRMGVYGYPIEIQALFFMALRCALLLLKHDGEGKEMVEQIVKRLHALSYHMRSYFWLDLKQLNDIYRYKTEEYSHTAVNKFNVIPDSLPEWVFDFMPPHGGFFIGNVSPARMDFRWFALGNCIAILSSLATPEQSTAIMDLIESRWEELVGEMPLKVCYPAIESHEWRIVTGCDPKNTRWSYHNGGSWPVLLWLLTAACIKTGRPQIARRAIEVAEARLHKDHWPEYYDGKVGRYVGKQSRKNQTWSVAGYLVAKMMLEDPSHVGMVCLEEDKQMKPVMRRSNSWTC

SEQ ID NO: 83332 - protein, 466 aa, Arabidopsis thaliana
  peptide (1)..(466): Ceres Seq. ID no. 12669848
  misc_feature (1)..(459): Pfam Name: Plant neutral invertase Pfam Description: Plant neutral invertase
  misc_feature (1)..(466): Homolog of NCBI NO: 15236209 NR Description: invertase - like protein; protein id: supported by cDNA: gi_15215775 [Arabidopsis thaliana]
  misc_feature (1)..(466): Homolog of NCBI NO: 18413234 NR Description: neutral invertase like protein; protein id:
  misc_feature (1)..(466): Homolog of NCBI NO: 25354737 NR Description: neutral invertase like protein [imported] - thaliana >gi|7267646|emb|CAB78074.1| neutral invertase like
  misc_feature (1)..(464): Homolog of NCBI NO: 30693221 NR Description: invertase -related [Arabidopsis thaliana]
  misc_feature (1)..(465): Homolog of NCBI NO: 18395144 NR Description: putative invertase; protein id: At1g22650.1,
  misc_feature (1)..(465): Homolog of NCBI NO: 21594008 NR Description: putative invertase [Arabidopsis thaliana]
  misc_feature (1)..(465): Homolog of NCBI NO: 38344939 NR Description: OSJNBa0084A10.15 [Oryza sativa (japonica
  misc_feature (1)..(465): Homolog of NCBI NO: 15218303 NR Description: neutral invertase, putative; protein id: [Arabidopsis thaliana] >gi|25354735|pir||A96743 probable neutral
  misc_feature (1)..(465): Homolog of NCBI NO: 7487359 NR Description: hypothetical protein T22J18.18 - Arabidopsis >gi|3287693|gb|AAC25521.1|AAC25521 Similar to LIM17 gene product from the genome of Synechocystis sp. gb|D90916. [Arabidopsis
  misc_feature (1)..(333): Homolog of NCBI NO: 431164 NR Description: ORF [Lilium longiflorum]
MVGEAWDALRRSMVYFRGQPVGTIAAVDNSEEKLNYDQVFVRDFVPSALAFLMNGEPDIVKNFLLKTLRLQSWEKKIDRFQLGEGVMPASFKVFHDPVRNHETLIADFGESAIGRVAPVDSGFWWIILLRAYTKSTGDSSLADMPECQKGIRLILSLCLSEGFDTFPTLLCADGCCMIDRRMGVYGYPIEIQALFFMALRCALLLLKHDGEGKEMVEQIVKRLHALSYHMRSYFWLDLKQLNDIYRYKTEEYSHTAVNKFNVIPDSLPEWVFDFMPPHGGFFIGNVSPARMDFRWFALGNCIAILSSLATPEQSTAIMDLIESRWEELVGEMPLKVCYPAIESHEWRIVTGCDPKNTRWSYHNGGSWPVLLWLLTAACIKTGRPQIARRAIEVAEARLHKDHWPEYYDGKVGRYVGKQSRKNQTWSVAGYLVAKMMLEDPSHVGMVCLEEDKQMKPVMRRSNSWTC

SEQ ID NO: 83333 - protein, 454 aa, Arabidopsis thaliana
  peptide (1)..(454): Ceres Seq. ID no. 12669849
  misc_feature (1)..(447): Pfam Name: Plant neutral invertase Pfam Description: Plant neutral invertase
  misc_feature (1)..(454): Homolog of NCBI NO: 15236209 NR Description: invertase - like protein; protein id: supported by cDNA: gi_15215775 [Arabidopsis thaliana]
  misc_feature (1)..(454): Homolog of NCBI NO: 18413234 NR Description: neutral invertase like protein; protein id:
  misc_feature (1)..(454): Homolog of NCBI NO: 25354737 NR Description: neutral invertase like protein [imported] - thaliana >gi|7267646|emb|CAB78074.1| neutral invertase like
  misc_feature (1)..(452): Homolog of NCBI NO: 30693221 NR Description: invertase -related [Arabidopsis thaliana]
  misc_feature (1)..(453): Homolog of NCBI NO: 18395144 NR Description: putative invertase; protein id: At1g22650.1,
  misc_feature (1)..(453): Homolog of NCBI NO: 21594008 NR Description: putative invertase [Arabidopsis thaliana]
  misc_feature (1)..(453): Homolog of NCBI NO: 38344939 NR Description: OSJNBa0084A10.15 [Oryza sativa (japonica
  misc_feature (1)..(453): Homolog of NCBI NO: 15218303 NR Description: neutral invertase, putative; protein id: [Arabidopsis thaliana] >gi|25354735|pir||A96743 probable neutral
  misc_feature (1)..(453): Homolog of NCBI NO: 7487359 NR Description: hypothetical protein T22J18.18 - Arabidopsis >gi|3287693|gb|AAC25521.1|AAC25521 Similar to LIM17 gene product from the genome of Synechocystis sp. gb|D90916. [Arabidopsis
  misc_feature (1)..(321): Homolog of NCBI NO: 431164 NR Description: ORF [Lilium longiflorum]
MVYFRGQPVGTIAAVDNSEEKLNYDQVFVRDFVPSALAFLMNGEPDIVKNFLLKTLRLQSWEKKIDRFQLGEGVMPASFKVFHDPVRNHETLIADFGESAIGRVAPVDSGFWWIILLRAYTKSTGDSSLADMPECQKGIRLILSLCLSEGFDTFPTLLCADGCCMIDRRMGVYGYPIEIQALFFMALRCALLLLKHDGEGKEMVEQIVKRLHALSYHMRSYFWLDLKQLNDIYRYKTEEYSHTAVNKFNVIPDSLPEWVFDFMPPHGGFFIGNVSPARMDFRWFALGNCIAILSSLATPEQSTAIMDLIESRWEELVGEMPLKVCYPAIESHEWRIVTGCDPKNTRWSYHNGGSWPVLLWLLTAACIKTGRPQIARRAIEVAEARLHKDHWPEYYDGKVGRYVGKQSRKNQTWSVAGYLVAKMMLEDPSHVGMVCLEEDKQMKPVMRRSNSWTC

SEQ ID NO: 83334 - DNA, 1704 bp, Arabidopsis thaliana
  misc_feature (1)..(1704): Ceres Seq. ID no. 12669854
  misc_feature: MA Experiment ID: 20000166 Result: Down-regulated in Transcription
  misc_feature: MA Experiment 20000166 PARAMETER Experiment Name: At_100uM_ABA_P Parameter: Age (day) Value: 14
  misc_feature: MA Experiment 20000166 PARAMETER Experiment Name: At_100uM_ABA_P Parameter: Organism Value: A. thaliana
  misc_feature: MA Experiment 20000166 PARAMETER Experiment Name: At_100uM_ABA_P Parameter: Plant Line Value: WS
  misc_feature: MA Experiment 20000166 PARAMETER Experiment Name: At_100uM_ABA_P Parameter: Timepoint (hr) Value: 1
  misc_feature: MA Experiment 20000166 PARAMETER Experiment Name: At_100uM_ABA_P Parameter: Tissue Value: Aerial
  misc_feature: MA Experiment 20000166 PARAMETER Experiment Name: At_100uM_ABA_P Parameter: Treatment Value: 100uM ABA vs. No Treatment
  misc_feature: MA Experiment ID: 20000169 Result: Down-regulated in Transcription
  misc_feature: MA Experiment 20000169 PARAMETER Experiment Name: At_100uM_ABA_P Parameter: Age (day) Value: 14
  misc_feature: MA Experiment 20000169 PARAMETER Experiment Name: At_100uM_ABA_P Parameter: Organism Value: A. thaliana
  misc_feature: MA Experiment 20000169 PARAMETER Experiment Name: At_100uM_ABA_P Parameter: Plant Line Value: WS
  misc_feature: MA Experiment 20000169 PARAMETER Experiment Name: At_100uM_ABA_P Parameter: Timepoint (hr) Value: 6
  misc_feature: MA Experiment 20000169 PARAMETER Experiment Name: At_100uM_ABA_P Parameter: Tissue Value: Aerial
  misc_feature: MA Experiment 20000169 PARAMETER Experiment Name: At_100uM_ABA_P Parameter: Treatment Value: 100uM ABA vs. No Treatment
  misc_feature: MA Experiment ID: 20000171 Result: Down-regulated in Transcription
  misc_feature: MA Experiment 20000171 PARAMETER Experiment Name: At_42deg_Heat_P Parameter: Age (day) Value: 14
  misc_feature: MA Experiment 20000171 PARAMETER Experiment Name: At_42deg_Heat_P Parameter: Organism Value: A. thaliana
  misc_feature: MA Experiment 20000171 PARAMETER Experiment Name: At_42deg_Heat_P Parameter: Plant Line Value: WS
  misc_feature: MA Experiment 20000171 PARAMETER Experiment Name: At_42deg_Heat_P Parameter: Temperature (deg C) Value: 42 vs. 22
  misc_feature: MA Experiment 20000171 PARAMETER Experiment Name: At_42deg_Heat_P Parameter: Timepoint (hr) Value: 1
  misc_feature: MA Experiment 20000171 PARAMETER Experiment Name: At_42deg_Heat_P Parameter: Tissue Value: Aerial
  misc_feature: MA Experiment ID: 20000173 Result: Down-regulated in Transcription
  misc_feature: MA Experiment 20000173 PARAMETER Experiment Name: At_42deg_Heat_P Parameter: Age (day) Value: 14
  misc_feature: MA Experiment 20000173 PARAMETER Experiment Name: At_42deg_Heat_P Parameter: Organism Value: A. thaliana
  misc_feature: MA Experiment 20000173 PARAMETER Experiment Name: At_42deg_Heat_P Parameter: Plant Line Value: WS
  misc_feature: MA Experiment 20000173 PARAMETER Experiment Name: At_42deg_Heat_P Parameter: Temperature (deg C) Value: 42 vs. 22
  misc_feature: MA Experiment 20000173 PARAMETER Experiment Name: At_42deg_Heat_P Parameter: Timepoint (hr) Value: 6
  misc_feature: MA Experiment 20000173 PARAMETER Experiment Name: At_42deg_Heat_P Parameter: Tissue Value: Aerial
  misc_feature: MA Experiment ID: 20000184 Result: Down-regulated in Transcription
  misc_feature: MA Experiment 20000184 PARAMETER Experiment Name: At_Shoots__P Parameter: Age (day) Value: 7
  misc_feature: MA Experiment 20000184 PARAMETER Experiment Name: At_Shoots__P Parameter: Tissue Value: Shoots vs. Whole Plant
  misc_feature: MA Experiment ID: 20000185 Result: Down-regulated in Transcription
  misc_feature: MA Experiment 20000185 PARAMETER Experiment Name: At_Roots__P Parameter: Age (day) Value: 7 vs. 21
  misc_feature: MA Experiment 20000185 PARAMETER Experiment Name: At_Roots__P Parameter: Organism Value: A. thaliana
  misc_feature: MA Experiment 20000185 PARAMETER Experiment Name: At_Roots__P Parameter: Tissue Value: Roots vs. Whole Plant
  misc_feature: MA Experiment ID: 20000213 Result: Up-regulated in Transcription
  misc_feature: MA Experiment 20000213 PARAMETER Experiment Name: At_4deg_Cold_P Parameter: Timepoint (hr) Value: 2
  misc_feature: MA Experiment ID: 20000234 Result: Down-regulated in Transcription
  misc_feature: MA Experiment 20000234 PARAMETER Experiment Name: At_Siliques_P Parameter: Age (day) Value: 21
  misc_feature: MA Experiment 20000234 PARAMETER Experiment Name: At_Siliques_P Parameter: Organism Value: A. thaliana
  misc_feature: MA Experiment 20000234 PARAMETER Experiment Name: At_Siliques_P Parameter: Plant Line Value: WS
  misc_feature: MA Experiment 20000234 PARAMETER Experiment Name: At_Siliques_P Parameter: Tissue Value: Less Than 5mm Siliques vs. Whole Plant
  misc_feature: MA Experiment ID: 20000235 Result: Down-regulated in Transcription
  misc_feature: MA Experiment 20000235 PARAMETER Experiment Name: At_Siliques_P Parameter: Age (day) Value: 21
  misc_feature: MA Experiment 20000235 PARAMETER Experiment Name: At_Siliques_P Parameter: Organism Value: A. thaliana
  misc_feature: MA Experiment 20000235 PARAMETER Experiment Name: At_Siliques_P Parameter: Plant Line Value: WS
  misc_feature: MA Experiment 20000235 PARAMETER Experiment Name: At_Siliques_P Parameter: Tissue Value: 5-10mm Siliques vs. Whole Plant
  misc_feature: MA Experiment ID: 20000264 Result: Down-regulated in Transcription
  misc_feature: MA Experiment 20000264 PARAMETER Experiment Name: At_Open_Flower_P Parameter: Age (day) Value: 21
  misc_feature: MA Experiment 20000264 PARAMETER Experiment Name: At_Open_Flower_P Parameter: Plant Line Value: WS
  misc_feature: MA Experiment 20000264 PARAMETER Experiment Name: At_Open_Flower_P Parameter: Tissue Value: Open Flower vs. Whole Plant
  misc_feature: MA Experiment ID: 20000265 Result: Down-regulated in Transcription
  misc_feature: MA Experiment 20000265 PARAMETER Experiment Name: At_Open_Flower_P Parameter: Age (day) Value: 21
  misc_feature: MA Experiment 20000265 PARAMETER Experiment Name: At_Open_Flower_P Parameter: Plant Line Value: WS
  misc_feature: MA Experiment 20000265 PARAMETER Experiment Name: At_Open_Flower_P Parameter: Tissue Value: Closed Flower vs. Whole Plant
  misc_feature: MA Experiment ID: 20000267 Result: Down-regulated in Transcription
  misc_feature: MA Experiment 20000267 PARAMETER Experiment Name: At_Drought_P Parameter: Age (day) Value: 7
  misc_feature: MA Experiment 20000267 PARAMETER Experiment Name: At_Drought_P Parameter: Organism Value: A. thaliana
  misc_feature: MA Experiment 20000267 PARAMETER Experiment Name: At_Drought_P Parameter: Plant Line Value: WS
  misc_feature: MA Experiment 20000267 PARAMETER Experiment Name: At_Drought_P Parameter: Timepoint (hr) Value: 6
  misc_feature: MA Experiment 20000267 PARAMETER Experiment Name: At_Drought_P Parameter: Tissue Value: Whole Plant
  misc_feature: MA Experiment 20000267 PARAMETER Experiment Name: At_Drought_P Parameter: Treatment Value: Drought vs. No Drought
  misc_feature: MA Experiment ID: 20000286 Result: Down-regulated in Transcription
  misc_feature: MA Experiment 20000286 PARAMETER Experiment Name: At_Open_Flower_P Parameter: Age (day) Value: 21
  misc_feature: MA Experiment 20000286 PARAMETER Experiment Name: At_Open_Flower_P Parameter: Plant Line Value: WS
  misc_feature: MA Experiment 20000286 PARAMETER Experiment Name: At_Open_Flower_P Parameter: Tissue Value: Half Open vs. Whole Plant
  misc_feature: MA Experiment ID: 20000308 Result: Up-regulated in Transcription
  misc_feature: MA Experiment 20000308 PARAMETER Experiment Name: At_100mM_NaCl__P Parameter: Age (day) Value: 17
  misc_feature: MA Experiment 20000308 PARAMETER Experiment Name: At_100mM_NaCl__P Parameter: Organism Value: A. thaliana
  misc_feature: MA Experiment 20000308 PARAMETER Experiment Name: At_100mM_NaCl__P Parameter: Plant Line Value: WS
  misc_feature: MA Experiment 20000308 PARAMETER Experiment Name: At_100mM_NaCl__P Parameter: Timepoint (hr) Value: 72
  misc_feature: MA Experiment 20000308 PARAMETER Experiment Name: At_100mM_NaCl__P Parameter: Tissue Value: Whole Plant
  misc_feature: MA Experiment 20000308 PARAMETER Experiment Name: At_100mM_NaCl__P Parameter: Treatment Value: 100mM NaCl vs. No Treatment
  misc_feature: MA Experiment ID: 20000436 Result: Down-regulated in Transcription
  misc_feature: MA Experiment 20000436 PARAMETER Experiment Name: At_Drought_P Parameter: Age (day) Value: 7
  misc_feature: MA Experiment 20000436 PARAMETER Experiment Name: At_Drought_P Parameter: Organism Value: A. thaliana
  misc_feature: MA Experiment 20000436 PARAMETER Experiment Name: At_Drought_P Parameter: Plant Line Value: WS
  misc_feature: MA Experiment 20000436 PARAMETER Experiment Name: At_Drought_P Parameter: Timepoint (hr) Value: 12
  misc_feature: MA Experiment 20000436 PARAMETER Experiment Name: At_Drought_P Parameter: Tissue Value: Whole Plant
  misc_feature: MA Experiment 20000436 PARAMETER Experiment Name: At_Drought_P Parameter: Treatment Value: Drought vs. No Drought
  misc_feature: MA Experiment ID: 20000438 Result: Down-regulated in Transcription
  misc_feature: MA Experiment 20000438 PARAMETER Experiment Name: At_Shoots__P Parameter: Age (day) Value: 14
  misc_feature: MA Experiment 20000438 PARAMETER Experiment Name: At_Shoots__P Parameter: Tissue Value: Shoots vs. Whole Plant
  misc_feature: MA Experiment ID: 20000439 Result: Down-regulated in Transcription
  misc_feature: MA Experiment 20000439 PARAMETER Experiment Name: At_Roots__P Parameter: Age (day) Value: 14 vs. 21
  misc_feature: MA Experiment 20000439 PARAMETER Experiment Name: At_Roots__P Parameter: Organism Value: A. thaliana
  misc_feature: MA Experiment 20000439 PARAMETER Experiment Name: At_Roots__P Parameter: Tissue Value: Roots vs. Whole Plant
  misc_feature: MA Experiment ID: 20000451 Result: Up-regulated in Transcription
  misc_feature: MA Experiment 20000451 PARAMETER Experiment Name: At_CS6879_Shoots-Roots_P Parameter: Age (day) Value: 14
  misc_feature: MA Experiment 20000451 PARAMETER Experiment Name: At_CS6879_Shoots-Roots_P Parameter: Organism Value: A. thaliana
  misc_feature: MA Experiment 20000451 PARAMETER Experiment Name: At_CS6879_Shoots-Roots_P Parameter: Plant Line Value: CS6879 vs. WS
  misc_feature: MA Experiment 20000451 PARAMETER Experiment Name: At_CS6879_Shoots-Roots_P Parameter: Tissue Value: Roots
  misc_feature: MA Experiment ID: 20000794 Result: Down-regulated in Transcription
  misc_feature: MA Experiment 20000794 PARAMETER Experiment Name: At_Petals_P Parameter: Age (day) Value: 23-25 days
  misc_feature: MA Experiment 20000794 PARAMETER Experiment Name: At_Petals_P Parameter: Plant Line Value: WS
  misc_feature: MA Experiment 20000794 PARAMETER Experiment Name: At_Petals_P Parameter: Tissue Value: Petals vs. Whole plant
  misc_feature: MA Experiment ID: 20001450 Result: Down-regulated in Transcription
  misc_feature: MA Experiment 20001450 PARAMETER Experiment Name: At_Far-red-induction_P Parameter: Age (day) Value: 7
  misc_feature: MA Experiment 20001450 PARAMETER Experiment Name: At_Far-red-induction_P Parameter: Light Value: Far-red vs. White
  misc_feature: MA Experiment 20001450 PARAMETER Experiment Name: At_Far-red-induction_P Parameter: Organism Value: A. thaliana
  misc_feature: MA Experiment 20001450 PARAMETER Experiment Name: At_Far-red-induction_P Parameter: Plant Line Value: Columbia
  misc_feature: MA Experiment 20001450 PARAMETER Experiment Name: At_Far-red-induction_P Parameter: Timepoint (hr) Value: 8
  misc_feature: MA Experiment 20001450 PARAMETER Experiment Name: At_Far-red-induction_P Parameter: Tissue Value: Whole Plant
  misc_feature: MA Experiment ID: 20001451 Result: Down-regulated in Transcription
  misc_feature: MA Experiment 20001451 PARAMETER Experiment Name: At_Far-red-induction_P Parameter: Age (day) Value: 7
  misc_feature: MA Experiment 20001451 PARAMETER Experiment Name: At_Far-red-induction_P Parameter: Light Value: Far-red vs. White
  misc_feature: MA Experiment 20001451 PARAMETER Experiment Name: At_Far-red-induction_P Parameter: Organism Value: A. thaliana
  misc_feature: MA Experiment 20001451 PARAMETER Experiment Name: At_Far-red-induction_P Parameter: Plant Line Value: Columbia
  misc_feature: MA Experiment 20001451 PARAMETER Experiment Name: At_Far-red-induction_P Parameter: Timepoint (hr) Value: 24
  misc_feature: MA Experiment 20001451 PARAMETER Experiment Name: At_Far-red-induction_P Parameter: Tissue Value: Whole Plant
  misc_feature: MA Experiment ID: 20001458 Result: Up-regulated in Transcription
  misc_feature: MA Experiment 20001458 PARAMETER Experiment Name: At_50mM_NH4NO3_L-to-H_P Parameter: Age (day) Value: Undefined
  misc_feature: MA Experiment 20001458 PARAMETER Experiment Name: At_50mM_NH4NO3_L-to-H_P Parameter: Organism Value: Undefined
  misc_feature: MA Experiment 20001458 PARAMETER Experiment Name: At_50mM_NH4NO3_L-to-H_P Parameter: Plant Line Value: Undefined
  misc_feature: MA Experiment 20001458 PARAMETER Experiment Name: At_50mM_NH4NO3_L-to-H_P Parameter: Timepoint (hr) Value: 2
  misc_feature: MA Experiment 20001458 PARAMETER Experiment Name: At_50mM_NH4NO3_L-to-H_P Parameter: Tissue Value: Siliques
  misc_feature: MA Experiment 20001458 PARAMETER Experiment Name: At_50mM_NH4NO3_L-to-H_P Parameter: Treatment Value: 50mM NH4NO3 vs. 100mM Manitol
  misc_feature: MA Experiment ID: 20001557 Result: Up-regulated in Transcription
  misc_feature: MA Experiment 20001557 PARAMETER Experiment Name: At_Drought_Soil_Dry_P Parameter: Age (day) Value: 27
  misc_feature: MA Experiment 20001557 PARAMETER Experiment Name: At_Drought_Soil_Dry_P Parameter: Organism Value: A. thaliana
  misc_feature: MA Experiment 20001557 PARAMETER Experiment Name: At_Drought_Soil_Dry_P Parameter: Plant Line Value: WS
  misc_feature: MA Experiment 20001557 PARAMETER Experiment Name: At_Drought_Soil_Dry_P Parameter: Post Timepoint (hr) Value: 3
  misc_feature: MA Experiment 20001557 PARAMETER Experiment Name: At_Drought_Soil_Dry_P Parameter: Post-Treatment Value: Re-Water vs. No Drought
  misc_feature: MA Experiment 20001557 PARAMETER Experiment Name: At_Drought_Soil_Dry_P Parameter: Timepoint (day) Value: 13
  misc_feature: MA Experiment 20001557 PARAMETER Experiment Name: At_Drought_Soil_Dry_P Parameter: Treatment Value: Drought vs. No Drought
  misc_feature: MA Experiment ID: 20001558 Result: Up-regulated in Transcription
  misc_feature: MA Experiment 20001558 PARAMETER Experiment Name: At_Drought_Soil_Dry_P Parameter: Age (day) Value: 27
  misc_feature: MA Experiment 20001558 PARAMETER Experiment Name: At_Drought_Soil_Dry_P Parameter: Organism Value: A. thaliana
  misc_feature: MA Experiment 20001558 PARAMETER Experiment Name: At_Drought_Soil_Dry_P Parameter: Plant Line Value: WS
  misc_feature: MA Experiment 20001558 PARAMETER Experiment Name: At_Drought_Soil_Dry_P Parameter: Post Timepoint (hr) Value: 6
  misc_feature: MA Experiment 20001558 PARAMETER Experiment Name: At_Drought_Soil_Dry_P Parameter: Post-Treatment Value: Re-Water vs. No Drought
  misc_feature: MA Experiment 20001558 PARAMETER Experiment Name: At_Drought_Soil_Dry_P Parameter: Timepoint (day) Value: 13
  misc_feature: MA Experiment 20001558 PARAMETER Experiment Name: At_Drought_Soil_Dry_P Parameter: Treatment Value: Drought vs. No Drought
  misc_feature: MA Experiment ID: 20001560 Result: Up-regulated in Transcription
  misc_feature: MA Experiment 20001560 PARAMETER Experiment Name: At_Drought_Soil_Dry_P Parameter: Age (day) Value: 28
  misc_feature: MA Experiment 20001560 PARAMETER Experiment Name: At_Drought_Soil_Dry_P Parameter: Organism Value: A. thaliana
  misc_feature: MA Experiment 20001560 PARAMETER Experiment Name: At_Drought_Soil_Dry_P Parameter: Plant Line Value: WS
  misc_feature: MA Experiment 20001560 PARAMETER Experiment Name: At_Drought_Soil_Dry_P Parameter: Post Timepoint (hr) Value: None
  misc_feature: MA Experiment 20001560 PARAMETER Experiment Name: At_Drought_Soil_Dry_P Parameter: Post-Treatment Value: None
  misc_feature: MA Experiment 20001560 PARAMETER Experiment Name: At_Drought_Soil_Dry_P Parameter: Timepoint (day) Value: 14
  misc_feature: MA Experiment 20001560 PARAMETER Experiment Name: At_Drought_Soil_Dry_P Parameter: Treatment Value: Drought vs. No Drought
  misc_feature: MA Experiment ID: 20001757 Result: Up-regulated in Transcription
  misc_feature: MA Experiment 20001757 PARAMETER Experiment Name: At_50mM_NH4NO3_L-to-H_P Parameter: Timepoint (hr) Value: 6
  misc_feature: MA Experiment 20001757 PARAMETER Experiment Name: At_50mM_NH4NO3_L-to-H_P Parameter: Tissue Value: Leaf
  misc_feature: MA Experiment 20001757 PARAMETER Experiment Name: At_50mM_NH4NO3_L-to-H_P Parameter: Treatment Value: 50mM NH4NO3 vs 100mM Mannitol
  misc_feature: MA Experiment ID: 20001911 Result: Down-regulated in Transcription
  misc_feature: MA Experiment 20001911 PARAMETER Experiment Name: At_Drought_Reproduction_P Parameter: Age (day) Value: 40
  misc_feature: MA Experiment 20001911 PARAMETER Experiment Name: At_Drought_Reproduction_P Parameter: Organism Value: A. thaliana
  misc_feature: MA Experiment 20001911 PARAMETER Experiment Name: At_Drought_Reproduction_P Parameter: Plant Line Value: WS
  misc_feature: MA Experiment 20001911 PARAMETER Experiment Name: At_Drought_Reproduction_P Parameter: Timepoint (day) Value: 10
  misc_feature: MA Experiment 20001911 PARAMETER Experiment Name: At_Drought_Reproduction_P Parameter: Tissue Value: Flowers
  misc_feature: MA Experiment 20001911 PARAMETER Experiment Name: At_Drought_Reproduction_P Parameter: Treatment Value: Drought vs. No Drought
atgggttttggtacatcttcttcttcatcttcttcctcagctctgaaatggctaggtttcgttactgccgtttgggtccaatccatctccggcaacaattacaccttctcaaattactccggcgcactcaaatccttaatgaacctcactcagttagaactcaacagtctctccgtcgctaaagacgtcggaaaagcattcggaatcctcgccggacttgcttccgaccgtctttcaactccggtgatcctcctcatcggttctttcgaaggtcttcttggttatggtgtacaatggcttgtcgttagccgcacgattcaacctataccttattggcagatgtgtgtgtttctctgtatgggaggaaacagtacgacgtggatgaacacggcggttctggttacttgtataagaaacttccggcgaaatcgtggtcctgtttcagggattcttaaaggatacgttggtttaagtactgcgattttcacggatctatgtaatgctctgttttcctctgacccagcttcgtttcttgtcctcctctccgtcgtgccttttgccgtttgtctcacggcggttttcttcctccgtgaaatccctccgtctactaccttcgccgaggataacgaagagtctaaatactttgctgtgtttaacatcgttgcggttgttgttgctgtgtaccttcagtcttacgacatcatcggaatcaaaacaggagctttctcaatcgcattcgcttccatacttctcatactcttagcctctcctgtcgctgtacctttccacgcttttatccgtagcaaagttcatgatgagcaagacgtagaaggacgaatagatgaacctttactaagatcaggatctgagattgaagtggaggaaacaatcgtaggtgctgcagcggcggcggataacgaattgccaccgtctcttaagccgttaagtaacgaggaggaagagaatcacggaactatagtgacgacggagaagaaaagaccggttcttggagaagaacacaccataatggaagctatgttgaccgttgacttttgggtgttgttcgtgtcgttcttgtgtggagtaggaactggtttagcagttatgaacaatatgggtcagatcgggcttgcgcttggttacactgatgtctccatttttgtctccatgactagcatttggggattctttggtcggattctctccggtactatctccgagcacttcatcaagaaagctggaacaccaagaccattatggaatgcagcagctcaaatcattatggccgtgggatatctactgatggctttagccttgcccggttcactctatattggttcaatggtggttggggtatgctatggagttcggttagcgataaccgtaccaacagcatcagaactcttcggtctcaaatactatggactcatctacaacatccttatacttaatatgcctctaggatcgttcctcttctcgggtctactcgcgggtttactctacgatgctgaagccacacctactcctggtggaggcaatacgtgtgtaggagctcattgtttccgtatcgtcttcattgtaatggcgtttgcttctatcattggggtcggtcttgaccttttgcttgcgtatagaaccaaggggatctatgcgaagattcatgcgagcaagaagactaagaaatctggtggtaatcttcgatga

SEQ ID NO: 83335 - protein, 567 aa, Arabidopsis thaliana
  peptide (1)..(567): Ceres Seq. ID no. 12669855
  misc_feature (330)..(501): Pfam Name: Sugar (and other) transporter Pfam Description: Sugar (and other) transporter
  misc_feature (1)..(567): Homolog of NCBI NO: 15236224 NR Description: putative protein; protein id: At4g34950.1
  misc_feature (1)..(330): Homolog of NCBI NO: 15227274 NR Description: nodulin-like protein; protein id: At2g16660.1, by cDNA: gi_17979282, supported by cDNA: gi_20465249 [Arabidopsis
  misc_feature (290)..(566): Homolog of NCBI NO: 15227274 NR Description: nodulin-like protein; protein id: At2g16660.1, by cDNA: gi_17979282, supported by cDNA: gi_20465249 [Arabidopsis
  misc_feature (2)..(556): Homolog of NCBI NO: 38345150 NR Description: OSJNBa0014K14.4 [Oryza sativa (japonica
  misc_feature (17)..(555): Homolog of NCBI NO: 37572921 NR Description: nodulin-like protein [Oryza sativa (japonica
  misc_feature (17)..(555): Homolog of NCBI NO: 24461856 NR Description: nodulin-like protein [Poncirus trifoliata]
  misc_feature (5)..(556): Homolog of NCBI NO: 15220164 NR Description: nodulin-like protein; protein id: At1g80530.1, by cDNA: gi_14334879, supported by cDNA: gi_15810606 [Arabidopsis
  misc_feature (16)..(285): Homolog of NCBI NO: 18395988 NR Description: unknown protein; protein id: At3g01930.1 thaliana] >gi|6091732|gb|AAF03444.1|AC010797_20 unknown protein thaliana] >gi|6513938|gb|AAF14842.1|AC011664_24 unknown protein
  misc_feature (324)..(558): Homolog of NCBI NO: 18395988 NR Description: unknown protein; protein id: At3g01930.1 thaliana] >gi|6091732|gb|AAF03444.1|AC010797_20 unknown protein thaliana] >gi|6513938|gb|AAF14842.1|AC011664_24 unknown protein
  misc_feature (16)..(559): Homolog of NCBI NO: 15241312 NR Description: nodulin-like protein; protein id: At5g14120.1
MGFGTSSSSSSSSALKWLGFVTAVWVQSISGNNYTFSNYSGALKSLMNLTQLELNSLSVAKDVGKAFGILAGLASDRLSTPVILLIGSFEGLLGYGVQWLVVSRTIQPIPYWQMCVFLCMGGNSTTWMNTAVLVTCIRNFRRNRGPVSGILKGYVGLSTAIFTDLCNALFSSDPASFLVLLSVVPFAVCLTAVFFLREIPPSTTFAEDNEESKYFAVFNIVAVVVAVYLQSYDIIGIKTGAFSIAFASILLILLASPVAVPFHAFIRSKVHDEQDVEGRIDEPLLRSGSEIEVEETIVGAAAAADNELPPSLKPLSNEEEENHGTIVTTEKKRPVLGEEHTIMEAMLTVDFWVLFVSFLCGVGTGLAVMNNMGQIGLALGYTDVSIFVSMTSIWGFFGRILSGTISEHFIKKAGTPRPLWNAAAQIIMAVGYLLMALALPGSLYIGSMVVGVCYGVRLAITVPTASELFGLKYYGLIYNILILNMPLGSFLFSGLLAGLLYDAEATPTPGGGNTCVGAHCFRIVFIVMAFASIIGVGLDLLLAYRTKGIYAKIHASKKTKKSGGNLR

SEQ ID NO: 83336 - protein, 521 aa, Arabidopsis thaliana
  peptide (1)..(521): Ceres Seq. ID no. 12669856
  misc_feature (284)..(455): Pfam Name: Sugar (and other) transporter Pfam Description: Sugar (and other) transporter
  misc_feature (1)..(521): Homolog of NCBI NO: 15236224 NR Description: putative protein; protein id: At4g34950.1
  misc_feature (1)..(284): Homolog of NCBI NO: 15227274 NR Description: nodulin-like protein; protein id: At2g16660.1, by cDNA: gi_17979282, supported by cDNA: gi_20465249 [Arabidopsis
  misc_feature (244)..(520): Homolog of NCBI NO: 15227274 NR Description: nodulin-like protein; protein id: At2g16660.1, by cDNA: gi_17979282, supported by cDNA: gi_20465249 [Arabidopsis
  misc_feature (1)..(510): Homolog of NCBI NO: 38345150 NR Description: OSJNBa0014K14.4 [Oryza sativa (japonica
  misc_feature (1)..(509): Homolog of NCBI NO: 37572921 NR Description: nodulin-like protein [Oryza sativa (japonica
  misc_feature (1)..(509): Homolog of NCBI NO: 24461856 NR Description: nodulin-like protein [Poncirus trifoliata]
  misc_feature (1)..(510): Homolog of NCBI NO: 15220164 NR Description: nodulin-like protein; protein id: At1g80530.1, by cDNA: gi_14334879, supported by cDNA: gi_15810606 [Arabidopsis
  misc_feature (1)..(239): Homolog of NCBI NO: 18395988 NR Description: unknown protein; protein id: At3g01930.1 thaliana] >gi|6091732|gb|AAF03444.1|AC010797_20 unknown protein thaliana] >gi|6513938|gb|AAF14842.1|AC011664_24 unknown protein
  misc_feature (278)..(512): Homolog of NCBI NO: 18395988 NR Description: unknown protein; protein id: At3g01930.1 thaliana] >gi|6091732|gb|AAF03444.1|AC010797_20 unknown protein thaliana] >gi|6513938|gb|AAF14842.1|AC011664_24 unknown protein
  misc_feature (1)..(513): Homolog of NCBI NO: 15241312 NR Description: nodulin-like protein; protein id: At5g14120.1
MNLTQLELNSLSVAKDVGKAFGILAGLASDRLSTPVILLIGSFEGLLGYGVQWLVVSRTIQPIPYWQMCVFLCMGGNSTTWMNTAVLVTCIRNFRRNRGPVSGILKGYVGLSTAIFTDLCNALFSSDPASFLVLLSVVPFAVCLTAVFFLREIPPSTTFAEDNEESKYFAVFNIVAVVVAVYLQSYDIIGIKTGAFSIAFASILLILLASPVAVPFHAFIRSKVHDEQDVEGRIDEPLLRSGSEIEVEETIVGAAAAADNELPPSLKPLSNEEEENHGTIVTTEKKRPVLGEEHTIMEAMLTVDFWVLFVSFLCGVGTGLAVMNNMGQIGLALGYTDVSIFVSMTSIWGFFGRILSGTISEHFIKKAGTPRPLWNAAAQIIMAVGYLLMALALPGSLYIGSMVVGVCYGVRLAITVPTASELFGLKYYGLIYNILILNMPLGSFLFSGLLAGLLYDAEATPTPGGGNTCVGAHCFRIVFIVMAFASIIGVGLDLLLAYRTKGIYAKIHASKKTKKSGGNLR

SEQ ID NO: 83337 - protein, 454 aa, Arabidopsis thaliana
  peptide (1)..(454): Ceres Seq. ID no. 12669857
  misc_feature (217)..(388): Pfam Name: Sugar (and other) transporter Pfam Description: Sugar (and other) transporter
  misc_feature (1)..(454): Homolog of NCBI NO: 15236224 NR Description: putative protein; protein id: At4g34950.1
  misc_feature (1)..(217): Homolog of NCBI NO: 15227274 NR Description: nodulin-like protein; protein id: At2g16660.1, by cDNA: gi_17979282, supported by cDNA: gi_20465249 [Arabidopsis
  misc_feature (177)..(453): Homolog of NCBI NO: 15227274 NR Description: nodulin-like protein; protein id: At2g16660.1, by cDNA: gi_17979282, supported by cDNA: gi_20465249 [Arabidopsis
  misc_feature (1)..(443): Homolog of NCBI NO: 38345150 NR Description: OSJNBa0014K14.4 [Oryza sativa (japonica
  misc_feature (1)..(442): Homolog of NCBI NO: 37572921 NR Description: nodulin-like protein [Oryza sativa (japonica
  misc_feature (1)..(442): Homolog of NCBI NO: 24461856 NR Description: nodulin-like protein [Poncirus trifoliata]
  misc_feature (1)..(443): Homolog of NCBI NO: 15220164 NR Description: nodulin-like protein; protein id: At1g80530.1, by cDNA: gi_14334879, supported by cDNA: gi_15810606 [Arabidopsis
  misc_feature (1)..(172): Homolog of NCBI NO: 18395988 NR Description: unknown protein; protein id: At3g01930.1 thaliana] >gi|6091732|gb|AAF03444.1|AC010797_20 unknown protein thaliana] >gi|6513938|gb|AAF14842.1|AC011664_24 unknown protein
  misc_feature (211)..(445): Homolog of NCBI NO: 18395988 NR Description: unknown protein; protein id: At3g01930.1 thaliana] >gi|6091732|gb|AAF03444.1|AC010797_20 unknown protein thaliana] >gi|6513938|gb|AAF14842.1|AC011664_24 unknown protein
  misc_feature (1)..(446): Homolog of NCBI NO: 15241312 NR Description: nodulin-like protein; protein id: At5g14120.1
MCVFLCMGGNSTTWMNTAVLVTCIRNFRRNRGPVSGILKGYVGLSTAIFTDLCNALFSSDPASFLVLLSVVPFAVCLTAVFFLREIPPSTTFAEDNEESKYFAVFNIVAVVVAVYLQSYDIIGIKTGAFSIAFASILLILLASPVAVPFHAFIRSKVHDEQDVEGRIDEPLLRSGSEIEVEETIVGAAAAADNELPPSLKPLSNEEEENHGTIVTTEKKRPVLGEEHTIMEAMLTVDFWVLFVSFLCGVGTGLAVMNNMGQIGLALGYTDVSIFVSMTSIWGFFGRILSGTISEHFIKKAGTPRPLWNAAAQIIMAVGYLLMALALPGSLYIGSMVVGVCYGVRLAITVPTASELFGLKYYGLIYNILILNMPLGSFLFSGLLAGLLYDAEATPTPGGGNTCVGAHCFRIVFIVMAFASIIGVGLDLLLAYRTKGIYAKIHASKKTKKSGGNLR

SEQ ID NO: 83338 - DNA, 909 bp, Arabidopsis thaliana
  misc_feature (1)..(909): Ceres Seq. ID no. 12669858
  misc_feature: MA Experiment ID: 20000314 Result: Up-regulated in Transcription
  misc_feature: MA Experiment 20000314 PARAMETER Experiment Name: At_14day_Shoots-Roots_Sub_P Parameter: Age (day) Value: 14
  misc_feature: MA Experiment 20000314 PARAMETER Experiment Name: At_14day_Shoots-Roots_Sub_P Parameter: Organism Value: A. thaliana
  misc_feature: MA Experiment 20000314 PARAMETER Experiment Name: At_14day_Shoots-Roots_Sub_P Parameter: Plant Line Value: WS
  misc_feature: MA Experiment 20000314 PARAMETER Experiment Name: At_14day_Shoots-Roots_Sub_P Parameter: Tissue Value: Roots vs. Whole Plant
  misc_feature: MA Experiment ID: 20000315 Result: Down-regulated in Transcription
  misc_feature: MA Experiment 20000315 PARAMETER Experiment Name: At_14day_Shoots-Roots_Sub_P Parameter: Age (day) Value: 14
  misc_feature: MA Experiment 20000315 PARAMETER Experiment Name: At_14day_Shoots-Roots_Sub_P Parameter: Organism Value: A. thaliana
  misc_feature: MA Experiment 20000315 PARAMETER Experiment Name: At_14day_Shoots-Roots_Sub_P Parameter: Plant Line Value: WS
  misc_feature: MA Experiment 20000315 PARAMETER Experiment Name: At_14day_Shoots-Roots_Sub_P Parameter: Tissue Value: Shoots vs. Whole Plant
  misc_feature: MA Experiment ID: 20000348 Result: Up-regulated in Transcription
  misc_feature: MA Experiment 20000348 PARAMETER Experiment Name: At_100uM_ABA_Sub_P Parameter: Age (day) Value: 14
  misc_feature: MA Experiment 20000348 PARAMETER Experiment Name: At_100uM_ABA_Sub_P Parameter: Organism Value: A. thaliana
  misc_feature: MA Experiment 20000348 PARAMETER Experiment Name: At_100uM_ABA_Sub_P Parameter: Plant Line Value: WS
  misc_feature: MA Experiment 20000348 PARAMETER Experiment Name: At_100uM_ABA_Sub_P Parameter: Timepoint (hr) Value: 1
  misc_feature: MA Experiment 20000348 PARAMETER Experiment Name: At_100uM_ABA_Sub_P Parameter: Tissue Value: Aerial
  misc_feature: MA Experiment 20000348 PARAMETER Experiment Name: At_100uM_ABA_Sub_P Parameter: Treatment Value: 100uM ABA vs. No Treatment
  misc_feature: MA Experiment ID: 20000440 Result: Up-regulated in Transcription
  misc_feature: MA Experiment 20000440 PARAMETER Experiment Name: At_Closed-Flower__Sub_P Parameter: Tissue Value: Closed Flower vs. Whole Plant
atgggaaggtctccttgctgtgagaaagaccacacaaacaaaggagcttggactaaggaagaagacgataagctcatctcttacatcaaagctcacggtgaaggttgttggcgttctcttcctagatccgccggtcttcaacgttgcggaaaaagctgtcgtctccgatggattaactatctccgacctgatctcaagaggggtaacttcaccctcgaagaagatgatctcatcatcaaactacatagccttctcggtaacaagtggtctcttattgcgacgagattaccaggaagaacagataacgagattaagaattactggaacacacatgttaagaggaagctattaagaaaagggattgatccggcgactcatcgacctatcaacgagaccaaaacttctcaagattcgtctgattctagtaaaacagaggaccctcttgtcaagattctctcttttggtcctcagctggagaaaatagcaaatttcggggacgagagaattcaaaagagagttgagtactcagttgttgaagaaagatgtctggacttgaatcttgagcttaggatcagtccaccatggcaagacaagctccatgatgagaggaacctaaggtttgggagagtgaagtataggtgcagtgcgtgccgttttggattcgggaacggcaaggagtgtagctgtaataatgtgaaatgtcaaacagaggacagtagtagcagcagttattcttcaaccgacattagtagtagcattggttatgacttcttgggtctaaacaacactagggttttggattttagcactttggaaatgaaatgaaatgaaatactatattaatcaatttatagctgtgaattgtgaaaaaaaaaaaaaaaaatcgatgtcgactcgagtcgggcggcc

SEQ ID NO: 83339 - protein, 274 aa, Arabidopsis thaliana
  peptide (1)..(274): Ceres Seq. ID no. 12669859
  misc_feature (14)..(61): Pfam Name: Myb-like DNA-binding domain Pfam Description: Myb-like DNA-binding domain
  misc_feature (1)..(274): Homolog of NCBI NO: 15236236 NR Description: myb family transcription factor; protein id:
  misc_feature (1)..(274): Homolog of NCBI NO: 6467223 NR Description: DNA-binding protein [Arabidopsis thaliana]
  misc_feature (63)..(274): Homolog of NCBI NO: 11358684 NR Description: probable transcription factor MYB32 [imported] - thaliana (fragment) >gi|3941440|gb|AAC83596.1| putative
  misc_feature (1)..(274): Homolog of NCBI NO: 15227288 NR Description: myb DNA-binding protein; protein id: At2g16720.1, by cDNA: gi_1020156 [Arabidopsis thaliana]
  misc_feature (1)..(274): Homolog of NCBI NO: 13346194 NR Description: GHMYB9 [Gossypium hirsutum]
  misc_feature (1)..(274): Homolog of NCBI NO: 2129933 NR Description: myb-related protein TMH27 - tomato
  misc_feature (1)..(274): Homolog of NCBI NO: 15233968 NR Description: putative transcription factor (MYB4); protein id:
  misc_feature (1)..(274): Homolog of NCBI NO: 11273985 NR Description: myb-related transcription factor MYB4 [imported] Arabidopsis thaliana >gi|3941412|gb|AAC83582.1| putative
  misc_feature (1)..(268): Homolog of NCBI NO: 39725415 NR Description: MYB transcription factor [Eucalyptus gunnii]
  misc_feature (1)..(231): Homolog of NCBI NO: 82308 NR Description: myb-related protein 308 - garden snapdragon
MGRSPCCEKDHTNKGAWTKEEDDKLISYIKAHGEGCWRSLPRSAGLQRCGKSCRLRWINYLRPDLKRGNFTLEEDDLIIKLHSLLGNKWSLIATRLPGRTDNEIKNYWNTHVKRKLLRKGIDPATHRPINETKTSQDSSDSSKTEDPLVKILSFGPQLEKIANFGDERIQKRVEYSVVEERCLDLNLELRISPPWQDKLHDERNLRFGRVKYRCSACRFGFGNGKECSCNNVKCQTEDSSSSSYSSTDISSSIGYDFLGLNNTRVLDFSTLEMK

SEQ ID NO: 83340 - DNA, 2415 bp, Arabidopsis thaliana
  misc_feature (1)..(2415): Ceres Seq. ID no. 12669868
  misc_feature: MA Experiment ID: 20000180 Result: Down-regulated in Transcription
  misc_feature: MA Experiment 20000180 PARAMETER Experiment Name: At_Germinating_Seeds_P Parameter: Age (hr) Value: 24 vs. 0
  misc_feature: MA Experiment 20000180 PARAMETER Experiment Name: At_Germinating_Seeds_P Parameter: Tissue Value: Germinating Seeds
atggctgcgactctgctgtctcaatgctaccgtatctacaattccgatgcgtgcaagtgtgtttcttctgagaatcaccagacgacggggaagcgaaatgggaatcgaaatctcgaattcgactcgggaatttcgaaaccagcacggctagtacttcgagaccgatacaaggtaactaagcaggtcaatgatcctgcgctgactagggctttacgtggtttcgctgattcccgtcttatggaggatgcactccaactgttcgatgaaatgaacaaagctgatgcttttctgtggaatgtgatgattaaaggtttcactagctgtgggttgtacattgaagcagttcaattttatagcagaatggtgtttgcaggggtcaaagctgatacctttacttatcctttcgtgattaaatcggttgcgggaatttcctcattggaagaagggaagaagattcatgcgatggtgattaagcttgggtttgtttcagatgtttacgtctgtaattctcttatatctttatacatgaagcttgggtgtgcttgggatgcagagaaagtgttcgaagaaatgcctgagagagacattgtttcgtggaattccatgatttctggatatcttgcgcttggagatggctttagctcgttgatgctgtttaaagaaatgctgaaatgtgggtttaaaccggacaggttcagtaccatgagtgctcttggtgcttgttctcatgtgtatagtccaaaaatgggaaaagagatacattgccacgctgttcgaagtaggattgaaactggtgatgttatggtaatgacatcaattcttgacatgtacagtaaatatggtgaagtgagttatgcggagaggatatttaacggtatgatccagaggaacatcgtagcttggaacgttatgatagggtgttatgctagaaatggccgagtcactgatgctttcctctgctttcagaaaatgtcagagcaaaatgggttgcagccagatgttatcacatcgattaatctgcttcctgcttctgcgatcttagagggtagaacgattcacgggtatgctatgaggagaggctttcttccccatatggtattggaaactgctctgattgatatgtatggagaatgtgggcagttaaaatcagctgaggttatatttgatcgaatggctgaaaagaatgtgatctcatggaactcgattattgctgcctatgtgcagaacgggaagaactattcagccttggagctatttcaagagctctgggattcatcgcttgtacctgattccacaacaattgctagtattctaccagcttatgcagaatctctatccttgagtgaaggtagagaaatccatgcttatattgttaagtctagatactggtcaaacaccatcatcttgaattcacttgttcacatgtatgccatgtgtggtgaccttgaggatgcaagaaaatgtttcaaccacatcttgttaaaggatgttgtttcatggaacagcatcatcatggcatatgcagtacatggttttgggagaatttcggtttggttattctctgagatgattgcttctagagtaaatccaaacaagagcacctttgcttcactattagcagcatgtagcatttctggtatggttgatgaaggatgggaatatttcgagtcgatgaaaagagaatacgggatagatcctggaatagagcattatgggtgcatgctggatctcattggccgtacaggaaacttcagcgcagccaagagattccttgaagaaatgccatttgtgccaacagctaggatttggggatcgttgttaaacgcaagcagaaaccacaaggacataaccatagctgaatttgcggcagaacagatatttaagatggaacacgataacacgggatgttatgtcttgcttttgaacatgtatgcagaagctggaagatgggaagatgtaaataggattaagcttctcatggagagcaaaggcatatccagaacatcaagtcgcagtactgttgaggcgaagggcaaaagtcatgtgttcacaaatggagacagatcccacgtggcgacgaacaagatctatgaagtcttagatgtcgtctcgaggatggttggagaagaagacatttatgttcactgtgtctcgaggttgagaccagagactctagttaagagcagaagcaattcaccaagaagacattcggtaaggctcgccacgtgttttggattgatctctacggaaacgggaagaagagttacggtgaggaataacacgagaatctgcagaaaatgtcacgagttcttggaaaaagcttcgagattgacgagaagagagatcgttgtgggagattccaagatttttcatcacttctccaatggtcgctgctcgtgtggaaattactggtga

SEQ ID NO: 83341 - protein, 804 aa, Arabidopsis thaliana
  peptide (1)..(804): Ceres Seq. ID no. 12669869
  misc_feature (299)..(333): Pfam Name: PPR repeat Pfam Description: PPR repeat
  misc_feature (80)..(804): Homolog of NCBI NO: 15234006 NR Description: putative protein; protein id: At4g18750.1
  misc_feature (83)..(804): Homolog of NCBI NO: 34903762 NR Description: unnamed protein product [Oryza sativa (japonica group)] >gi|7340873|dbj|BAA92963.1| unnamed protein product
  misc_feature (287)..(804): Homolog of NCBI NO: 15237421 NR Description: putative protein; protein id: At5g16860.1
  misc_feature (80)..(336): Homolog of NCBI NO: 15237421 NR Description: putative protein; protein id: At5g16860.1
  misc_feature (67)..(804): Homolog of NCBI NO: 38606535 NR Description: OSJNBa0016O02.23 [Oryza sativa (japonica
  misc_feature (66)..(804): Homolog of NCBI NO: 34915012 NR Description: P0458A05.10 [Oryza sativa (japonica
  misc_feature (82)..(802): Homolog of NCBI NO: 15218216 NR Description: hypothetical protein; protein id: At1g15510.1
  misc_feature (80)..(804): Homolog of NCBI NO: 15220337 NR Description: hypothetical protein; protein id: At1g11290.1
  misc_feature (52)..(804): Homolog of NCBI NO: 18418348 NR Description: putative protein; protein id: At4g33990.1
  misc_feature (114)..(804): Homolog of NCBI NO: 34897884 NR Description: Similar to Arabidopsis thaliana DNA chromosome 4,
MAATLLSQCYRIYNSDACKCVSSENHQTTGKRNGNRNLEFDSGISKPARLVLRDRYKVTKQVNDPALTRALRGFADSRLMEDALQLFDEMNKADAFLWNVMIKGFTSCGLYIEAVQFYSRMVFAGVKADTFTYPFVIKSVAGISSLEEGKKIHAMVIKLGFVSDVYVCNSLISLYMKLGCAWDAEKVFEEMPERDIVSWNSMISGYLALGDGFSSLMLFKEMLKCGFKPDRFSTMSALGACSHVYSPKMGKEIHCHAVRSRIETGDVMVMTSILDMYSKYGEVSYAERIFNGMIQRNIVAWNVMIGCYARNGRVTDAFLCFQKMSEQNGLQPDVITSINLLPASAILEGRTIHGYAMRRGFLPHMVLETALIDMYGECGQLKSAEVIFDRMAEKNVISWNSIIAAYVQNGKNYSALELFQELWDSSLVPDSTTIASILPAYAESLSLSEGREIHAYIVKSRYWSNTIILNSLVHMYAMCGDLEDARKCFNHILLKDVVSWNSIIMAYAVHGFGRISVWLFSEMIASRVNPNKSTFASLLAACSISGMVDEGWEYFESMKREYGIDPGIEHYGCMLDLIGRTGNFSAAKRFLEEMPFVPTARIWGSLLNASRNHKDITIAEFAAEQIFKMEHDNTGCYVLLLNMYAEAGRWEDVNRIKLLMESKGISRTSSRSTVEAKGKSHVFTNGDRSHVATNKIYEVLDVVSRMVGEEDIYVHCVSRLRPETLVKSRSNSPRRHSVRLATCFGLISTETGRRVTVRNNTRICRKCHEFLEKASRLTRREIVVGDSKIFHHFSNGRCSCGNYW

SEQ ID NO: 83342 - protein, 725 aa, Arabidopsis thaliana
  peptide (1)..(725): Ceres Seq. ID no. 12669870
  misc_feature (220)..(254): Pfam Name: PPR repeat Pfam Description: PPR repeat
  misc_feature (1)..(725): Homolog of NCBI NO: 15234006 NR Description: putative protein; protein id: At4g18750.1
  misc_feature (4)..(725): Homolog of NCBI NO: 34903762 NR Description: unnamed protein product [Oryza sativa (japonica group)] >gi|7340873|dbj|BAA92963.1| unnamed protein product
  misc_feature (208)..(725): Homolog of NCBI NO: 15237421 NR Description: putative protein; protein id: At5g16860.1
  misc_feature (1)..(257): Homolog of NCBI NO: 15237421 NR Description: putative protein; protein id: At5g16860.1
  misc_feature (1)..(725): Homolog of NCBI NO: 38606535 NR Description: OSJNBa0016O02.23 [Oryza sativa (japonica
  misc_feature (1)..(725): Homolog of NCBI NO: 34915012 NR Description: P0458A05.10 [Oryza sativa (japonica
  misc_feature (3)..(723): Homolog of NCBI NO: 15218216 NR Description: hypothetical protein; protein id: At1g15510.1
  misc_feature (1)..(725): Homolog of NCBI NO: 15220337 NR Description: hypothetical protein; protein id: At1g11290.1
  misc_feature (1)..(725): Homolog of NCBI NO: 18418348 NR Description: putative protein; protein id: At4g33990.1
  misc_feature (35)..(725): Homolog of NCBI NO: 34897884 NR Description: Similar to Arabidopsis thaliana DNA chromosome 4,
MEDALQLFDEMNKADAFLWNVMIKGFTSCGLYIEAVQFYSRMVFAGVKADTFTYPFVIKSVAGISSLEEGKKIHAMVIKLGFVSDVYVCNSLISLYMKLGCAWDAEKVFEEMPERDIVSWNSMISGYLALGDGFSSLMLFKEMLKCGFKPDRFSTMSALGACSHVYSPKMGKEIHCHAVRSRIETGDVMVMTSILDMYSKYGEVSYAERIFNGMIQRNIVAWNVMIGCYARNGRVTDAFLCFQKMSEQNGLQPDVITSINLLPASAILEGRTIHGYAMRRGFLPHMVLETALIDMYGECGQLKSAEVIFDRMAEKNVISWNSIIAAYVQNGKNYSALELFQELWDSSLVPDSTTIASILPAYAESLSLSEGREIHAYIVKSRYWSNTIILNSLVHMYAMCGDLEDARKCFNHILLKDVVSWNSIIMAYAVHGFGRISVWLFSEMIASRVNPNKSTFASLLAACSISGMVDEGWEYFESMKREYGIDPGIEHYGCMLDLIGRTGNFSAAKRFLEEMPFVPTARIWGSLLNASRNHKDITIAEFAAEQIFKMEHDNTGCYVLLLNMYAEAGRWEDVNRIKLLMESKGISRTSSRSTVEAKGKSHVFTNGDRSHVATNKIYEVLDVVSRMVGEEDIYVHCVSRLRPETLVKSRSNSPRRHSVRLATCFGLISTETGRRVTVRNNTRICRKCHEFLEKASRLTRREIVVGDSKIFHHFSNGRCSCGNYW

SEQ ID NO: 83343 - protein, 715 aa, Arabidopsis thaliana
  peptide (1)..(715): Ceres Seq. ID no. 12669871
  misc_feature (210)..(244): Pfam Name: PPR repeat Pfam Description: PPR repeat
  misc_feature (1)..(715): Homolog of NCBI NO: 15234006 NR Description: putative protein; protein id: At4g18750.1
  misc_feature (1)..(715): Homolog of NCBI NO: 34903762 NR Description: unnamed protein product [Oryza sativa (japonica group)] >gi|7340873|dbj|BAA92963.1| unnamed protein product
  misc_feature (198)..(715): Homolog of NCBI NO: 15237421 NR Description: putative protein; protein id: At5g16860.1
  misc_feature (1)..(247): Homolog of NCBI NO: 15237421 NR Description: putative protein; protein id: At5g16860.1
  misc_feature (1)..(715): Homolog of NCBI NO: 38606535 NR Description: OSJNBa0016O02.23 [Oryza sativa (japonica
  misc_feature (1)..(715): Homolog of NCBI NO: 34915012 NR Description: P0458A05.10 [Oryza sativa (japonica
  misc_feature (1)..(713): Homolog of NCBI NO: 15218216 NR Description: hypothetical protein; protein id: At1g15510.1
  misc_feature (1)..(715): Homolog of NCBI NO: 15220337 NR Description: hypothetical protein; protein id: At1g11290.1
  misc_feature (1)..(715): Homolog of NCBI NO: 18418348 NR Description: putative protein; protein id: At4g33990.1
  misc_feature (25)..(715): Homolog of NCBI NO: 34897884 NR Description: Similar to Arabidopsis thaliana DNA chromosome 4,
MNKADAFLWNVMIKGFTSCGLYIEAVQFYSRMVFAGVKADTFTYPFVIKSVAGISSLEEGKKIHAMVIKLGFVSDVYVCNSLISLYMKLGCAWDAEKVFEEMPERDIVSWNSMISGYLALGDGFSSLMLFKEMLKCGFKPDRFSTMSALGACSHVYSPKMGKEIHCHAVRSRIETGDVMVMTSILDMYSKYGEVSYAERIFNGMIQRNIVAWNVMIGCYARNGRVTDAFLCFQKMSEQNGLQPDVITSINLLPASAILEGRTIHGYAMRRGFLPHMVLETALIDMYGECGQLKSAEVIFDRMAEKNVISWNSIIAAYVQNGKNYSALELFQELWDSSLVPDSTTIASILPAYAESLSLSEGREIHAYIVKSRYWSNTIILNSLVHMYAMCGDLEDARKCFNHILLKDVVSWNSIIMAYAVHGFGRISVWLFSEMIASRVNPNKSTFASLLAACSISGMVDEGWEYFESMKREYGIDPGIEHYGCMLDLIGRTGNFSAAKRFLEEMPFVPTARIWGSLLNASRNHKDITIAEFAAEQIFKMEHDNTGCYVLLLNMYAEAGRWEDVNRIKLLMESKGISRTSSRSTVEAKGKSHVFTNGDRSHVATNKIYEVLDVVSRMVGEEDIYVHCVSRLRPETLVKSRSNSPRRHSVRLATCFGLISTETGRRVTVRNNTRICRKCHEFLEKASRLTRREIVVGDSKIFHHFSNGRCSCGNYW

SEQ ID NO: 83344 - DNA, 1786 bp, Arabidopsis thaliana
  misc_feature (1)..(1786): Ceres Seq. ID no. 12669890
  misc_feature: MA Experiment ID: 20000184 Result: Down-regulated in Transcription
  misc_feature: MA Experiment 20000184 PARAMETER Experiment Name: At_Shoots__P Parameter: Age (day) Value: 7
  misc_feature: MA Experiment 20000184 PARAMETER Experiment Name: At_Shoots__P Parameter: Tissue Value: Shoots vs. Whole Plant
  misc_feature: MA Experiment ID: 20000234 Result: Down-regulated in Transcription
  misc_feature: MA Experiment 20000234 PARAMETER Experiment Name: At_Siliques_P Parameter: Age (day) Value: 21
  misc_feature: MA Experiment 20000234 PARAMETER Experiment Name: At_Siliques_P Parameter: Organism Value: A. thaliana
  misc_feature: MA Experiment 20000234 PARAMETER Experiment Name: At_Siliques_P Parameter: Plant Line Value: WS
  misc_feature: MA Experiment 20000234 PARAMETER Experiment Name: At_Siliques_P Parameter: Tissue Value: Less Than 5mm Siliques vs. Whole Plant
  misc_feature: MA Experiment ID: 20001451 Result: Up-regulated in Transcription
  misc_feature: MA Experiment 20001451 PARAMETER Experiment Name: At_Far-red-induction_P Parameter: Age (day) Value: 7
  misc_feature: MA Experiment 20001451 PARAMETER Experiment Name: At_Far-red-induction_P Parameter: Light Value: Far-red vs. White
  misc_feature: MA Experiment 20001451 PARAMETER Experiment Name: At_Far-red-induction_P Parameter: Organism Value: A. thaliana
  misc_feature: MA Experiment 20001451 PARAMETER Experiment Name: At_Far-red-induction_P Parameter: Plant Line Value: Columbia
  misc_feature: MA Experiment 20001451 PARAMETER Experiment Name: At_Far-red-induction_P Parameter: Timepoint (hr) Value: 24
  misc_feature: MA Experiment 20001451 PARAMETER Experiment Name: At_Far-red-induction_P Parameter: Tissue Value: Whole Plant
aaggagcgaaagagaaacactttccgacttgggtaaggaaaaagagtttgatgggttgttgtcaatccttgttttccggcgataacccacttgggaaagatggagttcagccgcaaccactatctcaaaacaatcacggcggagctacgacggctgataacggcggaagcggcggagctagtggtgtaggcggcggaggaggaggaggaggaatcccatctttctctgagttctctttcgctgaccttaaagcagctacaaacaactttagctcagacaacatcgtatcagaaagtggtgagaaagccccaaatcttgtctacaaaggccgacttcagaaccgtcgttggatcgctgtcaagaagtttactaagatggcttggcctgagcctaaacaatttgcggaagaagcatggggtgtggggaaattgaggcataatcgattagcgaatttgattggatattgttgtgatggagatgagaggcttcttgttgctgagttcatgcctaatgatactcttgctaagcatttgttccattgggaaaatcagacaattgagtgggctatgaggttgcgagtaggatattacatagctgaggctttggattattgtagtactgagggtcgtccattgtaccatgatttgaatgcttatagggttctctttgatgaggatggtgatcctcgtctctcatgttttggcttgatgaagaacagtagggatggtaaaagttatagcacaaatttagcttatacaccacctgaatatctaagaaatggaagagtgacacctgaaagtgttacgtatagctttggaactgtccttctggatttgcttagcggaaaacacatccctccaagccatgctctcgatatgatacgaggcaagaatattattctgttgatggattcacacctcgaaggaaagttctcaacagaagaggctactgtagtggtcgaactcgcctctcaatgtttacaatatgagcctcgagagagaccaaatacaaaagatcttgttgcaacacttgcaccattgcaaactaaatcagacgttccatcttatgtgatgcttggaataaagaagcaagaggaggcaccttcgactccacagagaccactttcgccattaggtgaggcctgctcaagaatggatctcacagctattcatcagattttggtcatgacacattacagagacgacgagggcacaaacgagttatcattccaagaatggactcaacaaatgaaagatatgcttgatgcacggaaacgcggtgatcaatctttccgcgagaaagatttcaaaacagccatcgactgttactcacagttcattgacgttggaacaatggtatctccaactgtatttggtcggcgaagtctatgctacttactatgcgatcaaccagatgcagcactacgcgacgcaatgcaagcgcagtgtgtgtatccggattggccaacagctttctacatgcagtctgtggcattagcgaagctgaacatgaacacagacgcagccgatatgttgaacgaagcagctcagctcgaagaaaagagacaacgaggcggcagaggatcttgattcttgagacacaaagtgttacatcttgttgtaaaatttgatgagcttcaagaattctttttaagaagaagagaaagaaaaaatacggttaaaaacttgttgctggattgtttgattggggatgtaatgtaaccatagggagagaaaacaattgaatgtttgtttgtatgcaatacatgttgtaagttttaatggtc

SEQ ID NO: 83345 - protein, 528 aa, Arabidopsis thaliana
  peptide (1)..(528): Ceres Seq. ID no. 12669891
  misc_feature (17)..(528): Homolog of NCBI NO: 18418600 NR Description: putative protein; protein id: At4g35230.1, by cDNA: gi_16612248 [Arabidopsis thaliana] AT4g35230/F23E12_210 [Arabidopsis thaliana]
  misc_feature (17)..(528): Homolog of NCBI NO: 7486022 NR Description: hypothetical protein F23E12.210 - Arabidopsis >gi|3080427|emb|CAA18746.1| putative protein [Arabidopsis >gi|7270475|emb|CAB80240.1| putative protein [Arabidopsis
  misc_feature (17)..(527): Homolog of NCBI NO: 37536550 NR Description: protein kinase-like protein [Oryza sativa
  misc_feature (17)..(527): Homolog of NCBI NO: 37537032 NR Description: putative protein kinase [Oryza sativa (japonica group)] >gi|19225015|gb|AAL86491.1| putative protein kinase
  misc_feature (67)..(521): Homolog of NCBI NO: 22327962 NR Description: protein kinase - like; protein id: At5g59010.1, by cDNA: gi_19715585 [Arabidopsis thaliana]
  misc_feature (68)..(521): Homolog of NCBI NO: 15232406 NR Description: protein kinase -like protein; protein id: supported by cDNA: 150889., supported by cDNA: gi_15450845
  misc_feature (68)..(521): Homolog of NCBI NO: 21553556 NR Description: protein kinase-like protein [Arabidopsis thaliana]
  misc_feature (64)..(521): Homolog of NCBI NO: 15237604 NR Description: protein kinase-like; protein id: At5g41260.1
  misc_feature (71)..(526): Homolog of NCBI NO: 15237465 NR Description: protein kinase-like protein; protein id:
  misc_feature (71)..(526): Homolog of NCBI NO: 28393210 NR Description: putative protein kinase [Arabidopsis thaliana]
GAKEKHFPTWVRKKSLMGCCQSLFSGDNPLGKDGVQPQPLSQNNHGGATTADNGGSGGASGVGGGGGGGGIPSFSEFSFADLKAATNNFSSDNIVSESGEKAPNLVYKGRLQNRRWIAVKKFTKMAWPEPKQFAEEAWGVGKLRHNRLANLIGYCCDGDERLLVAEFMPNDTLAKHLFHWENQTIEWAMRLRVGYYIAEALDYCSTEGRPLYHDLNAYRVLFDEDGDPRLSCFGLMKNSRDGKSYSTNLAYTPPEYLRNGRVTPESVTYSFGTVLLDLLSGKHIPPSHALDMIRGKNIILLMDSHLEGKFSTEEATVVVELASQCLQYEPRERPNTKDLVATLAPLQTKSDVPSYVMLGIKKQEEAPSTPQRPLSPLGEACSRMDLTAIHQILVMTHYRDDEGTNELSFQEWTQQMKDMLDARKRGDQSFREKDFKTAIDCYSQFIDVGTMVSPTVFGRRSLCYLLCDQPDAALRDAMQAQCVYPDWPTAFYMQSVALAKLNMNTDAADMLNEAAQLEEKRQRGGRGS

SEQ ID NO: 83346 - protein, 512 aa, Arabidopsis thaliana
  peptide (1)..(512): Ceres Seq. ID no. 12669892
  misc_feature (1)..(512): Homolog of NCBI NO: 18418600 NR Description: putative protein; protein id: At4g35230.1, by cDNA: gi_16612248 [Arabidopsis thaliana] AT4g35230/F23E12_210 [Arabidopsis thaliana]
  misc_feature (1)..(512): Homolog of NCBI NO: 7486022 NR Description: hypothetical protein F23E12.210 - Arabidopsis >gi|3080427|emb|CAA18746.1| putative protein [Arabidopsis >gi|7270475|emb|CAB80240.1| putative protein [Arabidopsis
  misc_feature (1)..(511): Homolog of NCBI NO: 37536550 NR Description: protein kinase-like protein [Oryza sativa
  misc_feature (1)..(511): Homolog of NCBI NO: 37537032 NR Description: putative protein kinase [Oryza sativa (japonica group)] >gi|19225015|gb|AAL86491.1| putative protein kinase
  misc_feature (51)..(505): Homolog of NCBI NO: 22327962 NR Description: protein kinase - like; protein id: At5g59010.1, by cDNA: gi_19715585 [Arabidopsis thaliana]
  misc_feature (52)..(505): Homolog of NCBI NO: 15232406 NR Description: protein kinase -like protein; protein id: supported by cDNA: 150889., supported by cDNA: gi_15450845
  misc_feature (52)..(505): Homolog of NCBI NO: 21553556 NR Description: protein kinase-like protein [Arabidopsis thaliana]
  misc_feature (48)..(505): Homolog of NCBI NO: 15237604 NR Description: protein kinase-like; protein id: At5g41260.1
  misc_feature (55)..(510): Homolog of NCBI NO: 15237465 NR Description: protein kinase-like protein; protein id:
  misc_feature (55)..(510): Homolog of NCBI NO: 28393210 NR Description: putative protein kinase [Arabidopsis thaliana]
MGCCQSLFSGDNPLGKDGVQPQPLSQNNHGGATTADNGGSGGASGVGGGGGGGGIPSFSEFSFADLKAATNNFSSDNIVSESGEKAPNLVYKGRLQNRRWIAVKKFTKMAWPEPKQFAEEAWGVGKLRHNRLANLIGYCCDGDERLLVAEFMPNDTLAKHLFHWENQTIEWAMRLRVGYYIAEALDYCSTEGRPLYHDLNAYRVLFDEDGDPRLSCFGLMKNSRDGKSYSTNLAYTPPEYLRNGRVTPESVTYSFGTVLLDLLSGKHIPPSHALDMIRGKNIILLMDSHLEGKFSTEEATVVVELASQCLQYEPRERPNTKDLVATLAPLQTKSDVPSYVMLGIKKQEEAPSTPQRPLSPLGEACSRMDLTAIHQILVMTHYRDDEGTNELSFQEWTQQMKDMLDARKRGDQSFREKDFKTAIDCYSQFIDVGTMVSPTVFGRRSLCYLLCDQPDAALRDAMQAQCVYPDWPTAFYMQSVALAKLNMNTDAADMLNEAAQLEEKRQRGGRGS

SEQ ID NO: 83347 - protein, 404 aa, Arabidopsis thaliana
  peptide (1)..(404): Ceres Seq. ID no. 12669893
  misc_feature (1)..(404): Homolog of NCBI NO: 18418600 NR Description: putative protein; protein id: At4g35230.1, by cDNA: gi_16612248 [Arabidopsis thaliana] AT4g35230/F23E12_210 [Arabidopsis thaliana]
  misc_feature (1)..(404): Homolog of NCBI NO: 7486022 NR Description: hypothetical protein F23E12.210 - Arabidopsis >gi|3080427|emb|CAA18746.1| putative protein [Arabidopsis >gi|7270475|emb|CAB80240.1| putative protein [Arabidopsis
  misc_feature (1)..(403): Homolog of NCBI NO: 37536550 NR Description: protein kinase-like protein [Oryza sativa
  misc_feature (1)..(403): Homolog of NCBI NO: 37537032 NR Description: putative protein kinase [Oryza sativa (japonica group)] >gi|19225015|gb|AAL86491.1| putative protein kinase
  misc_feature (1)..(397): Homolog of NCBI NO: 22327962 NR Description: protein kinase - like; protein id: At5g59010.1, by cDNA: gi_19715585 [Arabidopsis thaliana]
  misc_feature (1)..(397): Homolog of NCBI NO: 15232406 NR Description: protein kinase -like protein; protein id: supported by cDNA: 150889., supported by cDNA: gi_15450845
  misc_feature (1)..(397): Homolog of NCBI NO: 21553556 NR Description: protein kinase-like protein [Arabidopsis thaliana]
  misc_feature (1)..(397): Homolog of NCBI NO: 15237604 NR Description: protein kinase-like; protein id: At5g41260.1
  misc_feature (1)..(402): Homolog of NCBI NO: 15237465 NR Description: protein kinase-like protein; protein id:
  misc_feature (1)..(402): Homolog of NCBI NO: 28393210 NR Description: putative protein kinase [Arabidopsis thaliana]
MAWPEPKQFAEEAWGVGKLRHNRLANLIGYCCDGDERLLVAEFMPNDTLAKHLFHWENQTIEWAMRLRVGYYIAEALDYCSTEGRPLYHDLNAYRVLFDEDGDPRLSCFGLMKNSRDGKSYSTNLAYTPPEYLRNGRVTPESVTYSFGTVLLDLLSGKHIPPSHALDMIRGKNIILLMDSHLEGKFSTEEATVVVELASQCLQYEPRERPNTKDLVATLAPLQTKSDVPSYVMLGIKKQEEAPSTPQRPLSPLGEACSRMDLTAIHQILVMTHYRDDEGTNELSFQEWTQQMKDMLDARKRGDQSFREKDFKTAIDCYSQFIDVGTMVSPTVFGRRSLCYLLCDQPDAALRDAMQAQCVYPDWPTAFYMQSVALAKLNMNTDAADMLNEAAQLEEKRQRGGRGS

SEQ ID NO: 83348 - DNA, 2569 bp, Arabidopsis thaliana
  misc_feature (1)..(2569): Ceres Seq. ID no. 12669905
  misc_feature: MA Experiment ID: 20000234 Result: Up-regulated in Transcription
  misc_feature: MA Experiment 20000234 PARAMETER Experiment Name: At_Siliques_P Parameter: Age (day) Value: 21
  misc_feature: MA Experiment 20000234 PARAMETER Experiment Name: At_Siliques_P Parameter: Organism Value: A. thaliana
  misc_feature: MA Experiment 20000234 PARAMETER Experiment Name: At_Siliques_P Parameter: Plant Line Value: WS
  misc_feature: MA Experiment 20000234 PARAMETER Experiment Name: At_Siliques_P Parameter: Tissue Value: Less Than 5mm Siliques vs. Whole Plant
  misc_feature: MA Experiment ID: 20000235 Result: Up-regulated in Transcription
  misc_feature: MA Experiment 20000235 PARAMETER Experiment Name: At_Siliques_P Parameter: Age (day) Value: 21
  misc_feature: MA Experiment 20000235 PARAMETER Experiment Name: At_Siliques_P Parameter: Organism Value: A. thaliana
  misc_feature: MA Experiment 20000235 PARAMETER Experiment Name: At_Siliques_P Parameter: Plant Line Value: WS
  misc_feature: MA Experiment 20000235 PARAMETER Experiment Name: At_Siliques_P Parameter: Tissue Value: 5-10mm Siliques vs. Whole Plant
  misc_feature: MA Experiment ID: 20000264 Result: Up-regulated in Transcription
  misc_feature: MA Experiment 20000264 PARAMETER Experiment Name: At_Open_Flower_P Parameter: Age (day) Value: 21
  misc_feature: MA Experiment 20000264 PARAMETER Experiment Name: At_Open_Flower_P Parameter: Plant Line Value: WS
  misc_feature: MA Experiment 20000264 PARAMETER Experiment Name: At_Open_Flower_P Parameter: Tissue Value: Open Flower vs. Whole Plant
  misc_feature: MA Experiment ID: 20000286 Result: Up-regulated in Transcription
  misc_feature: MA Experiment 20000286 PARAMETER Experiment Name: At_Open_Flower_P Parameter: Age (day) Value: 21
  misc_feature: MA Experiment 20000286 PARAMETER Experiment Name: At_Open_Flower_P Parameter: Plant Line Value: WS
  misc_feature: MA Experiment 20000286 PARAMETER Experiment Name: At_Open_Flower_P Parameter: Tissue Value: Half Open vs. Whole Plant
  misc_feature: MA Experiment ID: 20001554 Result: Up-regulated in Transcription
  misc_feature: MA Experiment 20001554 PARAMETER Experiment Name: At_Drought_Soil_Dry_P Parameter: Age (day) Value: 21
  misc_feature: MA Experiment 20001554 PARAMETER Experiment Name: At_Drought_Soil_Dry_P Parameter: Organism Value: A. thaliana
  misc_feature: MA Experiment 20001554 PARAMETER Experiment Name: At_Drought_Soil_Dry_P Parameter: Plant Line Value: WS
  misc_feature: MA Experiment 20001554 PARAMETER Experiment Name: At_Drought_Soil_Dry_P Parameter: Post Timepoint (hr) Value: None
  misc_feature: MA Experiment 20001554 PARAMETER Experiment Name: At_Drought_Soil_Dry_P Parameter: Post-Treatment Value: None
  misc_feature: MA Experiment 20001554 PARAMETER Experiment Name: At_Drought_Soil_Dry_P Parameter: Timepoint (day) Value: 7
  misc_feature: MA Experiment 20001554 PARAMETER Experiment Name: At_Drought_Soil_Dry_P Parameter: Treatment Value: Drought vs. No Drought
  misc_feature: MA Experiment ID: 20001555 Result: Up-regulated in Transcription
  misc_feature: MA Experiment 20001555 PARAMETER Experiment Name: At_Drought_Soil_Dry_P Parameter: Age (day) Value: 24
  misc_feature: MA Experiment 20001555 PARAMETER Experiment Name: At_Drought_Soil_Dry_P Parameter: Organism Value: A. thaliana
  misc_feature: MA Experiment 20001555 PARAMETER Experiment Name: At_Drought_Soil_Dry_P Parameter: Plant Line Value: WS
  misc_feature: MA Experiment 20001555 PARAMETER Experiment Name: At_Drought_Soil_Dry_P Parameter: Post Timepoint (hr) Value: None
  misc_feature: MA Experiment 20001555 PARAMETER Experiment Name: At_Drought_Soil_Dry_P Parameter: Post-Treatment Value: None
  misc_feature: MA Experiment 20001555 PARAMETER Experiment Name: At_Drought_Soil_Dry_P Parameter: Timepoint (day) Value: 10
  misc_feature: MA Experiment 20001555 PARAMETER Experiment Name: At_Drought_Soil_Dry_P Parameter: Treatment Value: Drought vs. No Drought
ttttctttttttttgatttaaaccaaaagggtaaacaatgctttatgattgcttagtgacgccattgaagcagcggctcactgatagtggcttcttctgcctccaattccaagtggattttgtttcactcactcatcgtcgttgatcagtgactctgtttttgcgaaattctcttcagatttcttgataaaagatagaagacggaattatgagtggagctgtgcttgttgctattgctgctgctgttggcaacttgttacaaggatgggataacgcaactattgcaggagctgtgttgtacataaaaaaggagtttaatttggagagtaatccatcagtggaaggtctaattgtggcgatgtcacttattggtgctactctgattacaacatgctctggaggggtagctgattggcttggtcgccgtcccatgctaatattgtcctcaattctctactttgttggttctctagtaatgctatggtctccgaatgtttatgtgttgctcttaggaaggttgttagatggatttggggttggtcttgtggtcacacttgttcctatttatatatctgagactgcaccacctgagattaggggactgttgaatacgctaccgcagttcactggctctggagggatgttcttatcttactgtatggttttcggaatgtcgttgatgccatcacctagctggagattgatgcttggtgtccttttcatcccttcccttgtctttttcttcctcacggtcttcttcttgcccgagtccccaaggtggctcgtgagcaaaggtcgaatgcttgaagcaaagcgggttcttcagagactgcgtggtcgcgaagatgtgtctggtgagatggctttgttggttgagggtcttggaattggaggtgaaacaaccatagaggaatatataattggtcccgcggatgaagttactgatgatcatgatatagctgtggataaggatcaaattaagttatatggtgcagaagaagggctgagttgggttgctaggccagtcaaaggaggaagcactatgagtgttttgtctcgccatggaagtacaatgagcaggaggcaaggctcattgattgatcctcttgtcacactgtttgggagcgttcacgagaagatgccggacactggaagcatgaggagtgccttgttcccacattttgggagtatgttcagtgttggagggaatcaaccaagacatgaagattgggatgaagagaatcttgttggagaaggtgaggattatccatccgaccatggagatgattctgaagatgatcttcattctccgttgatctcacgtcaaacgacaagcatggagaaagacatgcctcacactgctcatggaactctttctaccttcagacatggaagtcaagtgcagggagctcaaggggaaggagcgggtagtatggggattggaggtggatggcaagtggcatggaaatggacggaaagagaagatgaatcgggacagaaagaaggtgggtttaaacggatatacttgcatcaagaaggtttcccaggatctcgacgtggctcaattgtttcattgcctggtggtgatggaaccggtgaggcagattttgtacaagcgtctgctttggttagccaaccagctctttattccaaagaccttctcaaagaacatacaattggtcctgctatggtacatccatccgaaacaactaaagggtcaatttggcatgatcttcatgatcctggagtcaagcgtgcattagtcgtaggagttggacttcaaatacttcagcagttctcaggcatcaacggagttctttactacacaccgcaaatccttgagcaggcgggtgtcgggatcctactatcgaacatggggattagttcttcctcagcatccttacttataagtgcattgacaacctttgtgatgttacctgcaatagctgttgcaatgaggctcatggatctttctggtcgaaggaccttgcttctcaccacgataccaatcctgatagcatctctattggttttagtaatctcaaatcttgttcacatgaacagcattgtgcacgcggtcttatcaaccgtaagcgttgtgctctacttctgcttcttcgtgatgggtttcggtcctgctccaaacatcctctgttcagagatttttccaactcgagtccgcggaatctgcatcgccatctgcgcactcaccttctggatctgtgacataatcgtcacttacagtctccccgtgctgctcaaatccattggactagctggtgtgtttggaatgtacgcaatcgtatgttgcatttcatgggtctttgtgttcattaaagtcccggaaactaaaggcatgccacttgaagtcatcacagagttcttttctgttggagctagacaagctgaagctgctaaaaacgagtgagaaactgaaagacttgttgagataaaaagtttgtgtaatattcatgtggatttgttgttgtctttttactttgtgcagtaataatcatctctctctgtttcgtcttcttcatgtggggagaaaaaaaagtttcaaactttc

SEQ ID NO: 83349 - protein, 739 aa, Arabidopsis thaliana
  peptide (1)..(739): Ceres Seq. ID no. 12669906
  misc_feature (1)..(734): Homolog of NCBI NO: 37536506 NR Description: putative sugar transporter [Oryza sativa cultivar- group)] >gi|12039327|gb|AAG46115.1| putative sugar [Oryza sativa] >gi|31433313|gb|AAP54842.1| putative sugar
  misc_feature (2)..(736): Homolog of NCBI NO: 26986186 NR Description: hexose transporter [Hordeum vulgare subsp.
  misc_feature (1)..(736): Homolog of NCBI NO: 25402933 NR Description: Sugar transporter [imported] - Arabidopsis >gi|4836905|gb|AAD30608.1|AC007369_18 Sugar transporter
  misc_feature (1)..(736): Homolog of NCBI NO: 15218044 NR Description: putative sugar transporter protein; protein id: [Arabidopsis thaliana] >gi|8886941|gb|AAF80627.1|AC069251_20
  misc_feature (1)..(736): Homolog of NCBI NO: 15230501 NR Description: sugar transporter-like protein; protein id:
  misc_feature (1)..(736): Homolog of NCBI NO: 11358863 NR Description: sugar transport protein [imported] - Arabidopsis >gi|1495273|emb|CAA90628.1| sugar transporter [Arabidopsis
  misc_feature (67)..(739): Homolog of NCBI NO: 26986188 NR Description: sugar transporter [Hordeum vulgare subsp. vulgare]
  misc_feature (1)..(352): Homolog of NCBI NO: 6063538 NR Description: similar to sugar transporter protein. (AL022604)
  misc_feature (464)..(739): Homolog of NCBI NO: 6063538 NR Description: similar to sugar transporter protein. (AL022604)
  misc_feature (386)..(732): Homolog of NCBI NO: 22208506 NR Description: putative sugar transporter [Sorghum bicolor]
MSGAVLVAIAAAVGNLLQGWDNATIAGAVLYIKKEFNLESNPSVEGLIVAMSLIGATLITTCSGGVADWLGRRPMLILSSILYFVGSLVMLWSPNVYVLLLGRLLDGFGVGLVVTLVPIYISETAPPEIRGLLNTLPQFTGSGGMFLSYCMVFGMSLMPSPSWRLMLGVLFIPSLVFFFLTVFFLPESPRWLVSKGRMLEAKRVLQRLRGREDVSGEMALLVEGLGIGGETTIEEYIIGPADEVTDDHDIAVDKDQIKLYGAEEGLSWVARPVKGGSTMSVLSRHGSTMSRRQGSLIDPLVTLFGSVHEKMPDTGSMRSALFPHFGSMFSVGGNQPRHEDWDEENLVGEGEDYPSDHGDDSEDDLHSPLISRQTTSMEKDMPHTAHGTLSTFRHGSQVQGAQGEGAGSMGIGGGWQVAWKWTEREDESGQKEGGFKRIYLHQEGFPGSRRGSIVSLPGGDGTGEADFVQASALVSQPALYSKDLLKEHTIGPAMVHPSETTKGSIWHDLHDPGVKRALVVGVGLQILQQFSGINGVLYYTPQILEQAGVGILLSNMGISSSSASLLISALTTFVMLPAIAVAMRLMDLSGRRTLLLTTIPILIASLLVLVISNLVHMNSIVHAVLSTVSVVLYFCFFVMGFGPAPNILCSEIFPTRVRGICIAICALTFWICDIIVTYSLPVLLKSIGLAGVFGMYAIVCCISWVFVFIKVPETKGMPLEVITEFFSVGARQAEAAKNE

SEQ ID NO: 83350 - protein, 689 aa, Arabidopsis thaliana
  peptide (1)..(689): Ceres Seq. ID no. 12669907
  misc_feature (1)..(684): Homolog of NCBI NO: 37536506 NR Description: putative sugar transporter [Oryza sativa cultivar- group)] >gi|12039327|gb|AAG46115.1| putative sugar [Oryza sativa] >gi|31433313|gb|AAP54842.1| putative sugar
  misc_feature (1)..(686): Homolog of NCBI NO: 26986186 NR Description: hexose transporter [Hordeum vulgare subsp.
  misc_feature (1)..(686): Homolog of NCBI NO: 25402933 NR Description: Sugar transporter [imported] - Arabidopsis >gi|4836905|gb|AAD30608.1|AC007369_18 Sugar transporter
  misc_feature (1)..(686): Homolog of NCBI NO: 15218044 NR Description: putative sugar transporter protein; protein id: [Arabidopsis thaliana] >gi|8886941|gb|AAF80627.1|AC069251_20
  misc_feature (1)..(686): Homolog of NCBI NO: 15230501 NR Description: sugar transporter-like protein; protein id:
  misc_feature (1)..(686): Homolog of NCBI NO: 11358863 NR Description: sugar transport protein [imported] - Arabidopsis >gi|1495273|emb|CAA90628.1| sugar transporter [Arabidopsis
  misc_feature (17)..(689): Homolog of NCBI NO: 26986188 NR Description: sugar transporter [Hordeum vulgare subsp. vulgare]
  misc_feature (1)..(302): Homolog of NCBI NO: 6063538 NR Description: similar to sugar transporter protein. (AL022604)
  misc_feature (414)..(689): Homolog of NCBI NO: 6063538 NR Description: similar to sugar transporter protein. (AL022604)
  misc_feature (336)..(682): Homolog of NCBI NO: 22208506 NR Description: putative sugar transporter [Sorghum bicolor]
MSLIGATLITTCSGGVADWLGRRPMLILSSILYFVGSLVMLWSPNVYVLLLGRLLDGFGVGLVVTLVPIYISETAPPEIRGLLNTLPQFTGSGGMFLSYCMVFGMSLMPSPSWRLMLGVLFIPSLVFFFLTVFFLPESPRWLVSKGRMLEAKRVLQRLRGREDVSGEMALLVEGLGIGGETTIEEYIIGPADEVTDDHDIAVDKDQIKLYGAEEGLSWVARPVKGGSTMSVLSRHGSTMSRRQGSLIDPLVTLFGSVHEKMPDTGSMRSALFPHFGSMFSVGGNQPRHEDWDEENLVGEGEDYPSDHGDDSEDDLHSPLISRQTTSMEKDMPHTAHGTLSTFRHGSQVQGAQGEGAGSMGIGGGWQVAWKWTEREDESGQKEGGFKRIYLHQEGFPGSRRGSIVSLPGGDGTGEADFVQASALVSQPALYSKDLLKEHTIGPAMVHPSETTKGSIWHDLHDPGVKRALVVGVGLQILQQFSGINGVLYYTPQILEQAGVGILLSNMGISSSSASLLISALTTFVMLPAIAVAMRLMDLSGRRTLLLTTIPILIASLLVLVISNLVHMNSIVHAVLSTVSVVLYFCFFVMGFGPAPNILCSEIFPTRVRGICIAICALTFWICDIIVTYSLPVLLKSIGLAGVFGMYAIVCCISWVFVFIKVPETKGMPLEVITEFFSVGARQAEAAKNE

SEQ ID NO: 83351 - protein, 665 aa, Arabidopsis thaliana
  peptide (1)..(665): Ceres Seq. ID no. 12669908
  misc_feature (1)..(660): Homolog of NCBI NO: 37536506 NR Description: putative sugar transporter [Oryza sativa cultivar- group)] >gi|12039327|gb|AAG46115.1| putative sugar [Oryza sativa] >gi|31433313|gb|AAP54842.1| putative sugar
  misc_feature (1)..(662): Homolog of NCBI NO: 26986186 NR Description: hexose transporter [Hordeum vulgare subsp.
  misc_feature (1)..(662): Homolog of NCBI NO: 25402933 NR Description: Sugar transporter [imported] - Arabidopsis >gi|4836905|gb|AAD30608.1|AC007369_18 Sugar transporter
  misc_feature (1)..(662): Homolog of NCBI NO: 15218044 NR Description: putative sugar transporter protein; protein id: [Arabidopsis thaliana] >gi|8886941|gb|AAF80627.1|AC069251_20
  misc_feature (1)..(662): Homolog of NCBI NO: 15230501 NR Description: sugar transporter-like protein; protein id:
  misc_feature (1)..(662): Homolog of NCBI NO: 11358863 NR Description: sugar transport protein [imported] - Arabidopsis >gi|1495273|emb|CAA90628.1| sugar transporter [Arabidopsis
  misc_feature (1)..(665): Homolog of NCBI NO: 26986188 NR Description: sugar transporter [Hordeum vulgare subsp. vulgare]
  misc_feature (1)..(278): Homolog of NCBI NO: 6063538 NR Description: similar to sugar transporter protein. (AL022604)
  misc_feature (390)..(665): Homolog of NCBI NO: 6063538 NR Description: similar to sugar transporter protein. (AL022604)
  misc_feature (312)..(658): Homolog of NCBI NO: 22208506 NR Description: putative sugar transporter [Sorghum bicolor]
MLILSSILYFVGSLVMLWSPNVYVLLLGRLLDGFGVGLVVTLVPIYISETAPPEIRGLLNTLPQFTGSGGMFLSYCMVFGMSLMPSPSWRLMLGVLFIPSLVFFFLTVFFLPESPRWLVSKGRMLEAKRVLQRLRGREDVSGEMALLVEGLGIGGETTIEEYIIGPADEVTDDHDIAVDKDQIKLYGAEEGLSWVARPVKGGSTMSVLSRHGSTMSRRQGSLIDPLVTLFGSVHEKMPDTGSMRSALFPHFGSMFSVGGNQPRHEDWDEENLVGEGEDYPSDHGDDSEDDLHSPLISRQTTSMEKDMPHTAHGTLSTFRHGSQVQGAQGEGAGSMGIGGGWQVAWKWTEREDESGQKEGGFKRIYLHQEGFPGSRRGSIVSLPGGDGTGEADFVQASALVSQPALYSKDLLKEHTIGPAMVHPSETTKGSIWHDLHDPGVKRALVVGVGLQILQQFSGINGVLYYTPQILEQAGVGILLSNMGISSSSASLLISALTTFVMLPAIAVAMRLMDLSGRRTLLLTTIPILIASLLVLVISNLVHMNSIVHAVLSTVSVVLYFCFFVMGFGPAPNILCSEIFPTRVRGICIAICALTFWICDIIVTYSLPVLLKSIGLAGVFGMYAIVCCISWVFVFIKVPETKGMPLEVITEFFSVGARQAEAAKNE

SEQ ID NO: 83352 - DNA, 825 bp, Arabidopsis thaliana
  misc_feature (1)..(825): Ceres Seq. ID no. 12669938
  misc_feature: MA Experiment ID: 20000173 Result: Down-regulated in Transcription
  misc_feature: MA Experiment 20000173 PARAMETER Experiment Name: At_42deg_Heat_P Parameter: Age (day) Value: 14
  misc_feature: MA Experiment 20000173 PARAMETER Experiment Name: At_42deg_Heat_P Parameter: Organism Value: A. thaliana
  misc_feature: MA Experiment 20000173 PARAMETER Experiment Name: At_42deg_Heat_P Parameter: Plant Line Value: WS
  misc_feature: MA Experiment 20000173 PARAMETER Experiment Name: At_42deg_Heat_P Parameter: Temperature (deg C) Value: 42 vs. 22
  misc_feature: MA Experiment 20000173 PARAMETER Experiment Name: At_42deg_Heat_P Parameter: Timepoint (hr) Value: 6
  misc_feature: MA Experiment 20000173 PARAMETER Experiment Name: At_42deg_Heat_P Parameter: Tissue Value: Aerial
  misc_feature: MA Experiment ID: 20000182 Result: Up-regulated in Transcription
  misc_feature: MA Experiment 20000182 PARAMETER Experiment Name: At_2mM_SA_P Parameter: Age (day) Value: 14
  misc_feature: MA Experiment 20000182 PARAMETER Experiment Name: At_2mM_SA_P Parameter: Organism Value: A. thaliana
  misc_feature: MA Experiment 20000182 PARAMETER Experiment Name: At_2mM_SA_P Parameter: Plant Line Value: WS
  misc_feature: MA Experiment 20000182 PARAMETER Experiment Name: At_2mM_SA_P Parameter: Timepoint (hr) Value: 6
  misc_feature: MA Experiment 20000182 PARAMETER Experiment Name: At_2mM_SA_P Parameter: Tissue Value: Aerial
  misc_feature: MA Experiment 20000182 PARAMETER Experiment Name: At_2mM_SA_P Parameter: Treatment Value: 2mM SA vs. No Treatment
  misc_feature: MA Experiment ID: 20000227 Result: Down-regulated in Transcription
  misc_feature: MA Experiment 20000227 PARAMETER Experiment Name: At_Root-Tips-vs-Tops_P Parameter: Tissue Value: Root Tips vs. Root Tops
  misc_feature: MA Experiment ID: 20000234 Result: Down-regulated in Transcription
  misc_feature: MA Experiment 20000234 PARAMETER Experiment Name: At_Siliques_P Parameter: Age (day) Value: 21
  misc_feature: MA Experiment 20000234 PARAMETER Experiment Name: At_Siliques_P Parameter: Organism Value: A. thaliana
  misc_feature: MA Experiment 20000234 PARAMETER Experiment Name: At_Siliques_P Parameter: Plant Line Value: WS
  misc_feature: MA Experiment 20000234 PARAMETER Experiment Name: At_Siliques_P Parameter: Tissue Value: Less Than 5mm Siliques vs. Whole Plant
  misc_feature: MA Experiment ID: 20000235 Result: Down-regulated in Transcription
  misc_feature: MA Experiment 20000235 PARAMETER Experiment Name: At_Siliques_P Parameter: Age (day) Value: 21
  misc_feature: MA Experiment 20000235 PARAMETER Experiment Name: At_Siliques_P Parameter: Organism Value: A. thaliana
  misc_feature: MA Experiment 20000235 PARAMETER Experiment Name: At_Siliques_P Parameter: Plant Line Value: WS
  misc_feature: MA Experiment 20000235 PARAMETER Experiment Name: At_Siliques_P Parameter: Tissue Value: 5-10mm Siliques vs. Whole Plant
  misc_feature: MA Experiment ID: 20000264 Result: Down-regulated in Transcription
  misc_feature: MA Experiment 20000264 PARAMETER Experiment Name: At_Open_Flower_P Parameter: Age (day) Value: 21
  misc_feature: MA Experiment 20000264 PARAMETER Experiment Name: At_Open_Flower_P Parameter: Plant Line Value: WS
  misc_feature: MA Experiment 20000264 PARAMETER Experiment Name: At_Open_Flower_P Parameter: Tissue Value: Open Flower vs. Whole Plant
  misc_feature: MA Experiment ID: 20000265 Result: Down-regulated in Transcription
  misc_feature: MA Experiment 20000265 PARAMETER Experiment Name: At_Open_Flower_P Parameter: Age (day) Value: 21
  misc_feature: MA Experiment 20000265 PARAMETER Experiment Name: At_Open_Flower_P Parameter: Plant Line Value: WS
  misc_feature: MA Experiment 20000265 PARAMETER Experiment Name: At_Open_Flower_P Parameter: Tissue Value: Closed Flower vs. Whole Plant
  misc_feature: MA Experiment ID: 20000286 Result: Down-regulated in Transcription
  misc_feature: MA Experiment 20000286 PARAMETER Experiment Name: At_Open_Flower_P Parameter: Age (day) Value: 21
  misc_feature: MA Experiment 20000286 PARAMETER Experiment Name: At_Open_Flower_P Parameter: Plant Line Value: WS
  misc_feature: MA Experiment 20000286 PARAMETER Experiment Name: At_Open_Flower_P Parameter: Tissue Value: Half Open vs. Whole Plant
  misc_feature: MA Experiment ID: 20000496 Result: Down-regulated in Transcription
  misc_feature: MA Experiment 20000496 PARAMETER Experiment Name: At_Guard_Cells_P Parameter: Harvest Date Value: 7/19/2002
  misc_feature: MA Experiment 20000496 PARAMETER Experiment Name: At_Guard_Cells_P Parameter: Organism Value: Canola
  misc_feature: MA Experiment 20000496 PARAMETER Experiment Name: At_Guard_Cells_P Parameter: Tissue Value: Guard Cells vs. Leaves
atgctttcgcaccgaaatctggtgaagttattgggatactgtcgtgaagacaaagagcttctccttgtctacgagttcatgcccaaaggaagtcttgagagtcatctttttagacgaaacgatccttttccttgggatttaaggatcaagattgtgattggtgcagctcgtggccttgcgtttctacacagcttacaaagagaagtcatctatagagacttcaaagcttccaatatacttcttgattcgaactatgacgcaaagctttcagatttcggactagcaaagctaggaccagcagatgagaagtcacacgtcacgactaggatcatgggcacatatggttatgctgctcctgaatatatggcaacaggccatttatacgttaagagtgacgtattcgcctttggtgtggttttactagaaataatgaccggactgacggcgcacaacacaaaacggcccagaggacaagagagtcttgtcgactggttaagaccagaactctcaaacaaacacagagtgaaacaaataatggacaaaggaatcaaaggtcaatacacaaccaaggtcgcgaccgaaatggcacgcattacactctcttgtatcgagccagacccaaaaaaccgaccacacatgaaggaagtagtcgaagtcctcgaacacatccaagggcttaatgttgtccctaaccgttcttccactaaacaggccgttgctaactcttcacgttcttcgccacatcactatcgctataaagctggcgcacttggggctgaacgcaagagagcaacgcctggacggtttggatcagtagaaaaataa

SEQ ID NO: 83353 - protein, 274 aa, Arabidopsis thaliana
  peptide (1)..(274): Ceres Seq. ID no. 12669939
  misc_feature (1)..(274): Homolog of NCBI NO: 7434285 NR Description: probable serine/threonine-specific protein kinase
  misc_feature (1)..(274): Homolog of NCBI NO: 25287611 NR Description: protein kinase-like protein [imported] -
  misc_feature (1)..(274): Homolog of NCBI NO: 30690422 NR Description: protein kinase family [Arabidopsis thaliana] putative protein kinase [Arabidopsis thaliana]
  misc_feature (2)..(268): Homolog of NCBI NO: 21537344 NR Description: putative protein kinase [Arabidopsis thaliana]
  misc_feature (2)..(251): Homolog of NCBI NO: 18398350 NR Description: putative protein kinase; protein id: At2g17220.1, by cDNA: 13257., supported by cDNA: gi_13877652, supported by gi_15146243 [Arabidopsis thaliana]
  misc_feature (2)..(251): Homolog of NCBI NO: 25287605 NR Description: probable protein kinase [imported] - Arabidopsis
  misc_feature (2)..(266): Homolog of NCBI NO: 38345396 NR Description: OSJNBa0017B10.2 [Oryza sativa (japonica
  misc_feature (2)..(252): Homolog of NCBI NO: 20503002 NR Description: Putative protein kinase [Oryza sativa (japonica
  misc_feature (2)..(246): Homolog of NCBI NO: 14719339 NR Description: putative protein kinase [Oryza sativa]
  misc_feature (2)..(266): Homolog of NCBI NO: 34906046 NR Description: putative serine/threonine-specific protein kinase
MLSHRNLVKLLGYCREDKELLLVYEFMPKGSLESHLFRRNDPFPWDLRIKIVIGAARGLAFLHSLQREVIYRDFKASNILLDSNYDAKLSDFGLAKLGPADEKSHVTTRIMGTYGYAAPEYMATGHLYVKSDVFAFGVVLLEIMTGLTAHNTKRPRGQESLVDWLRPELSNKHRVKQIMDKGIKGQYTTKVATEMARITLSCIEPDPKNRPHMKEVVEVLEHIQGLNVVPNRSSTKQAVANSSRSSPHHYRYKAGALGAERKRATPGRFGSVEK

SEQ ID NO: 83354 - protein, 248 aa, Arabidopsis thaliana
  peptide (1)..(248): Ceres Seq. ID no. 12669940
  misc_feature (1)..(248): Homolog of NCBI NO: 7434285 NR Description: probable serine/threonine-specific protein kinase
  misc_feature (1)..(248): Homolog of NCBI NO: 25287611 NR Description: protein kinase-like protein [imported] -
  misc_feature (1)..(248): Homolog of NCBI NO: 30690422 NR Description: protein kinase family [Arabidopsis thaliana] putative protein kinase [Arabidopsis thaliana]
  misc_feature (1)..(242): Homolog of NCBI NO: 21537344 NR Description: putative protein kinase [Arabidopsis thaliana]
  misc_feature (1)..(225): Homolog of NCBI NO: 18398350 NR Description: putative protein kinase; protein id: At2g17220.1, by cDNA: 13257., supported by cDNA: gi_13877652, supported by gi_15146243 [Arabidopsis thaliana]
  misc_feature (1)..(225): Homolog of NCBI NO: 25287605 NR Description: probable protein kinase [imported] - Arabidopsis
  misc_feature (1)..(240): Homolog of NCBI NO: 38345396 NR Description: OSJNBa0017B10.2 [Oryza sativa (japonica
  misc_feature (1)..(226): Homolog of NCBI NO: 20503002 NR Description: Putative protein kinase [Oryza sativa (japonica
  misc_feature (1)..(220): Homolog of NCBI NO: 14719339 NR Description: putative protein kinase [Oryza sativa]
  misc_feature (1)..(240): Homolog of NCBI NO: 34906046 NR Description: putative serine/threonine-specific protein kinase
MPKGSLESHLFRRNDPFPWDLRIKIVIGAARGLAFLHSLQREVIYRDFKASNILLDSNYDAKLSDFGLAKLGPADEKSHVTTRIMGTYGYAAPEYMATGHLYVKSDVFAFGVVLLEIMTGLTAHNTKRPRGQESLVDWLRPELSNKHRVKQIMDKGIKGQYTTKVATEMARITLSCIEPDPKNRPHMKEVVEVLEHIQGLNVVPNRSSTKQAVANSSRSSPHHYRYKAGALGAERKRATPGRFGSVEK

SEQ ID NO: 83355 - protein, 164 aa, Arabidopsis thaliana
  peptide (1)..(164): Ceres Seq. ID no. 12669941
  misc_feature (1)..(164): Homolog of NCBI NO: 7434285 NR Description: probable serine/threonine-specific protein kinase
  misc_feature (1)..(164): Homolog of NCBI NO: 25287611 NR Description: protein kinase-like protein [imported] -
  misc_feature (1)..(164): Homolog of NCBI NO: 30690422 NR Description: protein kinase family [Arabidopsis thaliana] putative protein kinase [Arabidopsis thaliana]
  misc_feature (1)..(158): Homolog of NCBI NO: 21537344 NR Description: putative protein kinase [Arabidopsis thaliana]
  misc_feature (1)..(141): Homolog of NCBI NO: 18398350 NR Description: putative protein kinase; protein id: At2g17220.1, by cDNA: 13257., supported by cDNA: gi_13877652, supported by gi_15146243 [Arabidopsis thaliana]
  misc_feature (1)..(141): Homolog of NCBI NO: 25287605 NR Description: probable protein kinase [imported] - Arabidopsis
  misc_feature (1)..(156): Homolog of NCBI NO: 38345396 NR Description: OSJNBa0017B10.2 [Oryza sativa (japonica
  misc_feature (1)..(142): Homolog of NCBI NO: 20503002 NR Description: Putative protein kinase [Oryza sativa (japonica
  misc_feature (1)..(136): Homolog of NCBI NO: 14719339 NR Description: putative protein kinase [Oryza sativa]
  misc_feature (1)..(156): Homolog of NCBI NO: 34906046 NR Description: putative serine/threonine-specific protein kinase
MGTYGYAAPEYMATGHLYVKSDVFAFGVVLLEIMTGLTAHNTKRPRGQESLVDWLRPELSNKHRVKQIMDKGIKGQYTTKVATEMARITLSCIEPDPKNRPHMKEVVEVLEHIQGLNVVPNRSSTKQAVANSSRSSPHHYRYKAGALGAERKRATPGRFGSVEK

SEQ ID NO: 83356 - DNA, 2104 bp, Arabidopsis thaliana
  misc_feature (1)..(2104): Ceres Seq. ID no. 12669959
  misc_feature: MA Experiment ID: 20001557 Result: Down-regulated in Transcription
  misc_feature: MA Experiment 20001557 PARAMETER Experiment Name: At_Drought_Soil_Dry_P Parameter: Age (day) Value: 27
  misc_feature: MA Experiment 20001557 PARAMETER Experiment Name: At_Drought_Soil_Dry_P Parameter: Organism Value: A. thaliana
  misc_feature: MA Experiment 20001557 PARAMETER Experiment Name: At_Drought_Soil_Dry_P Parameter: Plant Line Value: WS
  misc_feature: MA Experiment 20001557 PARAMETER Experiment Name: At_Drought_Soil_Dry_P Parameter: Post Timepoint (hr) Value: 3
  misc_feature: MA Experiment 20001557 PARAMETER Experiment Name: At_Drought_Soil_Dry_P Parameter: Post-Treatment Value: Re-Water vs. No Drought
  misc_feature: MA Experiment 20001557 PARAMETER Experiment Name: At_Drought_Soil_Dry_P Parameter: Timepoint (day) Value: 13
  misc_feature: MA Experiment 20001557 PARAMETER Experiment Name: At_Drought_Soil_Dry_P Parameter: Treatment Value: Drought vs. No Drought
atacattacaccctctctctctcttctcttcaatttccgtcttctcactctctaatcttttcgcctttagttgaatctctgggatcattctacctttttgtggatttaggatcgaagaagagatcactcctactgttgaattctggttttacttgagagagtttttcaattctgatctgctgttttgcgatggcgatcaaagaggagacggaggagagttgcggaagcagagccgtggtagcttcaataacgaaagaaagccctagacagcaccgtatgaaactggaggtgtacggtgaggttcttcaacgaatccaggaatccaattacgaagaagctaatttccctggttttgatgatctcctctggcttcacttcaatcgtcttcctgctcgatatgctttggatgtaaatgttgagagagcagaagatgtacttactcatcagagattgttgaaattggctgaagatcctgctactagacctgttttcgaagttcgttgtgtgcaggtttctcccacattgaatggaaattctggtgacgttgatccttcggatcctgcggtcaatgaagatgctcaaagctcctataactcgaggtctcttgcacctccaacttttggttcttctccgaatttcgaagctcttactcaagcttacaaagatcatgctcaagacgatgatagtgctgtcaatgcacagttgcctaattctcgaccgatgcacgaaatcaccttttctacaatcgacaggccgaaactccttagtcagctaacttccatgcttggtgaacttggattgaatattcaagaggctcatgctttctctaccgccgatggtttctctctcgatgtatttgttgttgatggctggtcgcaggaggaaacagaaggtttaaaagatgcattgaagaaggagataagaaagtttaaggatcaaccttgttcaaaacagaaatctatcactttctttgagcatgacaaatcaaccaacgagctgctacctgcgtgtgttgaaatacctacggatggaactgatgagtgggaaattgacatgaagcagctcaaaattgaaaaaaaggtggcatgtggatcatacggggaactatttagaggaacctattgtagtcaggaagtagctatcaaaattctcaagcctgagcgtgttaatgcggaaatgctacgagagttttctcaggaagtatatataatgaggaaagttcggcataaaaatgttgtccagttcattggtgcatgtacacgatcaccaaacctctgcattgtgacagagttcatgactcgggggagcatttatgatttccttcacaaacacaaaggggtttttaaaattcaatctttgctcaaagtggcactcgacgtctcgaaaggaatgaattatctgcatcaaaacaatattattcatagagaccttaagactgctaatcttcttatggacgaacatgaagttgtcaaagttgccgattttggtgttgccagagtgcagactgagtcaggggttatgacagcggaaacagggacataccgatggatggctccagaggtcattgagcacaaaccttatgatcacagggcagatgtcttcagctacgcgattgtgctgtgggaacttttgactggggaactcccatattcttacttgactccactgcaagctgctgttggcgttgtccaaaagggacttagaccaaaaattccaaaggaaacacacccaaaactgactgaacttcttgagaaatgctggcagcaagacccagctctaagacccaattttgcagaaatcatagaaatgcttaaccaactaatccgcgaggttggagatgatgagcgccacaaggataaacatggtggttacttttcaggcctaaaaaaaggccatcgttgactctctcgggtgcgctgaaaaatttggtttgatcggtttgatagagctctactcacttctcgttttttcgttgtacagtttcttagagcctcactctttttgtccatgtataattttcttaaaaaacaatctccttttgatacaattatcactgcagagattgatttggattgcaactcaataaagtgaaagccattctttt

SEQ ID NO: 83357 - protein, 570 aa, Arabidopsis thaliana
  peptide (1)..(570): Ceres Seq. ID no. 12669960
  misc_feature (292)..(541): Pfam Name: Protein kinase domain Pfam Description: Protein kinase domain
  misc_feature (1)..(570): Homolog of NCBI NO: 22329194 NR Description: putative protein; protein id: At4g35780.1, by cDNA: gi_20260235 [Arabidopsis thaliana] putative protein [Arabidopsis thaliana]
  misc_feature (248)..(570): Homolog of NCBI NO: 7486654 NR Description: hypothetical protein F8D20.290 - Arabidopsis >gi|3367596|emb|CAA20048.1| putative protein [Arabidopsis >gi|7270530|emb|CAB81487.1| putative protein [Arabidopsis
  misc_feature (1)..(232): Homolog of NCBI NO: 7486654 NR Description: hypothetical protein F8D20.290 - Arabidopsis >gi|3367596|emb|CAA20048.1| putative protein [Arabidopsis >gi|7270530|emb|CAB81487.1| putative protein [Arabidopsis
  misc_feature (1)..(548): Homolog of NCBI NO: 15227883 NR Description: putative protein kinase; protein id: At2g17700.1, by cDNA: gi_17979170, supported by cDNA: gi_20465914 [Arabidopsis >gi|25411811|pir||D84555 probable protein kinase putative protein
  misc_feature (1)..(232): Homolog of NCBI NO: 7486398 NR Description: hypothetical protein F4B14.50 - Arabidopsis
  misc_feature (248)..(396): Homolog of NCBI NO: 7486398 NR Description: hypothetical protein F4B14.50 - Arabidopsis
  misc_feature (502)..(570): Homolog of NCBI NO: 7486398 NR Description: hypothetical protein F4B14.50 - Arabidopsis
  misc_feature (390)..(484): Homolog of NCBI NO: 7486398 NR Description: hypothetical protein F4B14.50 - Arabidopsis
  misc_feature (6)..(567): Homolog of NCBI NO: 18420244 NR Description: protein kinase like protein; protein id:
  misc_feature (137)..(550): Homolog of NCBI NO: 34901608 NR Description: P0571D04.18 [Oryza sativa (japonica
MAIKEETEESCGSRAVVASITKESPRQHRMKLEVYGEVLQRIQESNYEEANFPGFDDLLWLHFNRLPARYALDVNVERAEDVLTHQRLLKLAEDPATRPVFEVRCVQVSPTLNGNSGDVDPSDPAVNEDAQSSYNSRSLAPPTFGSSPNFEALTQAYKDHAQDDDSAVNAQLPNSRPMHEITFSTIDRPKLLSQLTSMLGELGLNIQEAHAFSTADGFSLDVFVVDGWSQEETEGLKDALKKEIRKFKDQPCSKQKSITFFEHDKSTNELLPACVEIPTDGTDEWEIDMKQLKIEKKVACGSYGELFRGTYCSQEVAIKILKPERVNAEMLREFSQEVYIMRKVRHKNVVQFIGACTRSPNLCIVTEFMTRGSIYDFLHKHKGVFKIQSLLKVALDVSKGMNYLHQNNIIHRDLKTANLLMDEHEVVKVADFGVARVQTESGVMTAETGTYRWMAPEVIEHKPYDHRADVFSYAIVLWELLTGELPYSYLTPLQAAVGVVQKGLRPKIPKETHPKLTELLEKCWQQDPALRPNFAEIIEMLNQLIREVGDDERHKDKHGGYFSGLKKGHR

SEQ ID NO: 83358 - protein, 541 aa, Arabidopsis thaliana
  peptide (1)..(541): Ceres Seq. ID no. 12669961
  misc_feature (263)..(512): Pfam Name: Protein kinase domain Pfam Description: Protein kinase domain
  misc_feature (1)..(541): Homolog of NCBI NO: 22329194 NR Description: putative protein; protein id: At4g35780.1, by cDNA: gi_20260235 [Arabidopsis thaliana] putative protein [Arabidopsis thaliana]
  misc_feature (219)..(541): Homolog of NCBI NO: 7486654 NR Description: hypothetical protein F8D20.290 - Arabidopsis >gi|3367596|emb|CAA20048.1| putative protein [Arabidopsis >gi|7270530|emb|CAB81487.1| putative protein [Arabidopsis
  misc_feature (1)..(203): Homolog of NCBI NO: 7486654 NR Description: hypothetical protein F8D20.290 - Arabidopsis >gi|3367596|emb|CAA20048.1| putative protein [Arabidopsis >gi|7270530|emb|CAB81487.1| putative protein [Arabidopsis
  misc_feature (1)..(519): Homolog of NCBI NO: 15227883 NR Description: putative protein kinase; protein id: At2g17700.1, by cDNA: gi_17979170, supported by cDNA: gi_20465914 [Arabidopsis >gi|25411811|pir||D84555 probable protein kinase putative protein
  misc_feature (1)..(203): Homolog of NCBI NO: 7486398 NR Description: hypothetical protein F4B14.50 - Arabidopsis
  misc_feature (219)..(367): Homolog of NCBI NO: 7486398 NR Description: hypothetical protein F4B14.50 - Arabidopsis
  misc_feature (473)..(541): Homolog of NCBI NO: 7486398 NR Description: hypothetical protein F4B14.50 - Arabidopsis
  misc_feature (361)..(455): Homolog of NCBI NO: 7486398 NR Description: hypothetical protein F4B14.50 - Arabidopsis
  misc_feature (1)..(538): Homolog of NCBI NO: 18420244 NR Description: protein kinase like protein; protein id:
  misc_feature (108)..(521): Homolog of NCBI NO: 34901608 NR Description: P0571D04.18 [Oryza sativa (japonica
MKLEVYGEVLQRIQESNYEEANFPGFDDLLWLHFNRLPARYALDVNVERAEDVLTHQRLLKLAEDPATRPVFEVRCVQVSPTLNGNSGDVDPSDPAVNEDAQSSYNSRSLAPPTFGSSPNFEALTQAYKDHAQDDDSAVNAQLPNSRPMHEITFSTIDRPKLLSQLTSMLGELGLNIQEAHAFSTADGFSLDVFVVDGWSQEETEGLKDALKKEIRKFKDQPCSKQKSITFFEHDKSTNELLPACVEIPTDGTDEWEIDMKQLKIEKKVACGSYGELFRGTYCSQEVAIKILKPERVNAEMLREFSQEVYIMRKVRHKNVVQFIGACTRSPNLCIVTEFMTRGSIYDFLHKHKGVFKIQSLLKVALDVSKGMNYLHQNNIIHRDLKTANLLMDEHEVVKVADFGVARVQTESGVMTAETGTYRWMAPEVIEHKPYDHRADVFSYAIVLWELLTGELPYSYLTPLQAAVGVVQKGLRPKIPKETHPKLTELLEKCWQQDPALRPNFAEIIEMLNQLIREVGDDERHKDKHGGYFSGLKKGHR

SEQ ID NO: 83359 - protein, 393 aa, Arabidopsis thaliana
  peptide (1)..(393): Ceres Seq. ID no. 12669962
  misc_feature (115)..(364): Pfam Name: Protein kinase domain Pfam Description: Protein kinase domain
  misc_feature (1)..(393): Homolog of NCBI NO: 22329194 NR Description: putative protein; protein id: At4g35780.1, by cDNA: gi_20260235 [Arabidopsis thaliana] putative protein [Arabidopsis thaliana]
  misc_feature (71)..(393): Homolog of NCBI NO: 7486654 NR Description: hypothetical protein F8D20.290 - Arabidopsis >gi|3367596|emb|CAA20048.1| putative protein [Arabidopsis >gi|7270530|emb|CAB81487.1| putative protein [Arabidopsis
  misc_feature (1)..(55): Homolog of NCBI NO: 7486654 NR Description: hypothetical protein F8D20.290 - Arabidopsis >gi|3367596|emb|CAA20048.1| putative protein [Arabidopsis >gi|7270530|emb|CAB81487.1| putative protein [Arabidopsis
  misc_feature (1)..(371): Homolog of NCBI NO: 15227883 NR Description: putative protein kinase; protein id: At2g17700.1, by cDNA: gi_17979170, supported by cDNA: gi_20465914 [Arabidopsis >gi|25411811|pir||D84555 probable protein kinase putative protein
  misc_feature (1)..(55): Homolog of NCBI NO: 7486398 NR Description: hypothetical protein F4B14.50 - Arabidopsis
  misc_feature (71)..(219): Homolog of NCBI NO: 7486398 NR Description: hypothetical protein F4B14.50 - Arabidopsis
  misc_feature (325)..(393): Homolog of NCBI NO: 7486398 NR Description: hypothetical protein F4B14.50 - Arabidopsis
  misc_feature (213)..(307): Homolog of NCBI NO: 7486398 NR Description: hypothetical protein F4B14.50 - Arabidopsis
  misc_feature (1)..(390): Homolog of NCBI NO: 18420244 NR Description: protein kinase like protein; protein id:
  misc_feature (1)..(373): Homolog of NCBI NO: 34901608 NR Description: P0571D04.18 [Oryza sativa (japonica
MHEITFSTIDRPKLLSQLTSMLGELGLNIQEAHAFSTADGFSLDVFVVDGWSQEETEGLKDALKKEIRKFKDQPCSKQKSITFFEHDKSTNELLPACVEIPTDGTDEWEIDMKQLKIEKKVACGSYGELFRGTYCSQEVAIKILKPERVNAEMLREFSQEVYIMRKVRHKNVVQFIGACTRSPNLCIVTEFMTRGSIYDFLHKHKGVFKIQSLLKVALDVSKGMNYLHQNNIIHRDLKTANLLMDEHEVVKVADFGVARVQTESGVMTAETGTYRWMAPEVIEHKPYDHRADVFSYAIVLWELLTGELPYSYLTPLQAAVGVVQKGLRPKIPKETHPKLTELLEKCWQQDPALRPNFAEIIEMLNQLIREVGDDERHKDKHGGYFSGLKKGHR

SEQ ID NO: 83360 - DNA, 1347 bp, Arabidopsis thaliana
  misc_feature (1)..(1347): Ceres Seq. ID no. 12669973
  misc_feature: MA Experiment ID: 20000171 Result: Up-regulated in Transcription
  misc_feature: MA Experiment 20000171 PARAMETER Experiment Name: At_42deg_Heat_P Parameter: Age (day) Value: 14
  misc_feature: MA Experiment 20000171 PARAMETER Experiment Name: At_42deg_Heat_P Parameter: Organism Value: A. thaliana
  misc_feature: MA Experiment 20000171 PARAMETER Experiment Name: At_42deg_Heat_P Parameter: Plant Line Value: WS
  misc_feature: MA Experiment 20000171 PARAMETER Experiment Name: At_42deg_Heat_P Parameter: Temperature (deg C) Value: 42 vs. 22
  misc_feature: MA Experiment 20000171 PARAMETER Experiment Name: At_42deg_Heat_P Parameter: Timepoint (hr) Value: 1
  misc_feature: MA Experiment 20000171 PARAMETER Experiment Name: At_42deg_Heat_P Parameter: Tissue Value: Aerial
  misc_feature: MA Experiment ID: 20000173 Result: Up-regulated in Transcription
  misc_feature: MA Experiment 20000173 PARAMETER Experiment Name: At_42deg_Heat_P Parameter: Age (day) Value: 14
  misc_feature: MA Experiment 20000173 PARAMETER Experiment Name: At_42deg_Heat_P Parameter: Organism Value: A. thaliana
  misc_feature: MA Experiment 20000173 PARAMETER Experiment Name: At_42deg_Heat_P Parameter: Plant Line Value: WS
  misc_feature: MA Experiment 20000173 PARAMETER Experiment Name: At_42deg_Heat_P Parameter: Temperature (deg C) Value: 42 vs. 22
  misc_feature: MA Experiment 20000173 PARAMETER Experiment Name: At_42deg_Heat_P Parameter: Timepoint (hr) Value: 6
  misc_feature: MA Experiment 20000173 PARAMETER Experiment Name: At_42deg_Heat_P Parameter: Tissue Value: Aerial
  misc_feature: MA Experiment ID: 20000182 Result: Up-regulated in Transcription
  misc_feature: MA Experiment 20000182 PARAMETER Experiment Name: At_2mM_SA_P Parameter: Age (day) Value: 14
  misc_feature: MA Experiment 20000182 PARAMETER Experiment Name: At_2mM_SA_P Parameter: Organism Value: A. thaliana
  misc_feature: MA Experiment 20000182 PARAMETER Experiment Name: At_2mM_SA_P Parameter: Plant Line Value: WS
  misc_feature: MA Experiment 20000182 PARAMETER Experiment Name: At_2mM_SA_P Parameter: Timepoint (hr) Value: 6
  misc_feature: MA Experiment 20000182 PARAMETER Experiment Name: At_2mM_SA_P Parameter: Tissue Value: Aerial
  misc_feature: MA Experiment 20000182 PARAMETER Experiment Name: At_2mM_SA_P Parameter: Treatment Value: 2mM SA vs. No Treatment
  misc_feature: MA Experiment ID: 20000184 Result: Down-regulated in Transcription
  misc_feature: MA Experiment 20000184 PARAMETER Experiment Name: At_Shoots__P Parameter: Age (day) Value: 7
  misc_feature: MA Experiment 20000184 PARAMETER Experiment Name: At_Shoots__P Parameter: Tissue Value: Shoots vs. Whole Plant
  misc_feature: MA Experiment ID: 20000185 Result: Down-regulated in Transcription
  misc_feature: MA Experiment 20000185 PARAMETER Experiment Name: At_Roots__P Parameter: Age (day) Value: 7 vs. 21
  misc_feature: MA Experiment 20000185 PARAMETER Experiment Name: At_Roots__P Parameter: Organism Value: A. thaliana
  misc_feature: MA Experiment 20000185 PARAMETER Experiment Name: At_Roots__P Parameter: Tissue Value: Roots vs. Whole Plant
  misc_feature: MA Experiment ID: 20000234 Result: Down-regulated in Transcription
  misc_feature: MA Experiment 20000234 PARAMETER Experiment Name: At_Siliques_P Parameter: Age (day) Value: 21
  misc_feature: MA Experiment 20000234 PARAMETER Experiment Name: At_Siliques_P Parameter: Organism Value: A. thaliana
  misc_feature: MA Experiment 20000234 PARAMETER Experiment Name: At_Siliques_P Parameter: Plant Line Value: WS
  misc_feature: MA Experiment 20000234 PARAMETER Experiment Name: At_Siliques_P Parameter: Tissue Value: Less Than 5mm Siliques vs. Whole Plant
  misc_feature: MA Experiment ID: 20000235 Result: Down-regulated in Transcription
  misc_feature: MA Experiment 20000235 PARAMETER Experiment Name: At_Siliques_P Parameter: Age (day) Value: 21
  misc_feature: MA Experiment 20000235 PARAMETER Experiment Name: At_Siliques_P Parameter: Organism Value: A. thaliana
  misc_feature: MA Experiment 20000235 PARAMETER Experiment Name: At_Siliques_P Parameter: Plant Line Value: WS
  misc_feature: MA Experiment 20000235 PARAMETER Experiment Name: At_Siliques_P Parameter: Tissue Value: 5-10mm Siliques vs. Whole Plant
  misc_feature: MA Experiment ID: 20000264 Result: Down-regulated in Transcription
  misc_feature: MA Experiment 20000264 PARAMETER Experiment Name: At_Open_Flower_P Parameter: Age (day) Value: 21
  misc_feature: MA Experiment 20000264 PARAMETER Experiment Name: At_Open_Flower_P Parameter: Plant Line Value: WS
  misc_feature: MA Experiment 20000264 PARAMETER Experiment Name: At_Open_Flower_P Parameter: Tissue Value: Open Flower vs. Whole Plant
  misc_feature: MA Experiment ID: 20000265 Result: Down-regulated in Transcription
  misc_feature: MA Experiment 20000265 PARAMETER Experiment Name: At_Open_Flower_P Parameter: Age (day) Value: 21
  misc_feature: MA Experiment 20000265 PARAMETER Experiment Name: At_Open_Flower_P Parameter: Plant Line Value: WS
  misc_feature: MA Experiment 20000265 PARAMETER Experiment Name: At_Open_Flower_P Parameter: Tissue Value: Closed Flower vs. Whole Plant
  misc_feature: MA Experiment ID: 20000286 Result: Down-regulated in Transcription
  misc_feature: MA Experiment 20000286 PARAMETER Experiment Name: At_Open_Flower_P Parameter: Age (day) Value: 21
  misc_feature: MA Experiment 20000286 PARAMETER Experiment Name: At_Open_Flower_P Parameter: Plant Line Value: WS
  misc_feature: MA Experiment 20000286 PARAMETER Experiment Name: At_Open_Flower_P Parameter: Tissue Value: Half Open vs. Whole Plant
  misc_feature: MA Experiment ID: 20000437 Result: Up-regulated in Transcription
  misc_feature: MA Experiment 20000437 PARAMETER Experiment Name: At_Drought_P Parameter: Age (day) Value: 8
  misc_feature: MA Experiment 20000437 PARAMETER Experiment Name: At_Drought_P Parameter: Organism Value: A. thaliana
  misc_feature: MA Experiment 20000437 PARAMETER Experiment Name: At_Drought_P Parameter: Plant Line Value: WS
  misc_feature: MA Experiment 20000437 PARAMETER Experiment Name: At_Drought_P Parameter: Timepoint (hr) Value: 24
  misc_feature: MA Experiment 20000437 PARAMETER Experiment Name: At_Drought_P Parameter: Tissue Value: Whole Plant
  misc_feature: MA Experiment 20000437 PARAMETER Experiment Name: At_Drought_P Parameter: Treatment Value: Drought vs. No Drought
  misc_feature: MA Experiment ID: 20000438 Result: Down-regulated in Transcription
  misc_feature: MA Experiment 20000438 PARAMETER Experiment Name: At_Shoots__P Parameter: Age (day) Value: 14
  misc_feature: MA Experiment 20000438 PARAMETER Experiment Name: At_Shoots__P Parameter: Tissue Value: Shoots vs. Whole Plant
  misc_feature: MA Experiment ID: 20000451 Result: Down-regulated in Transcription
  misc_feature: MA Experiment 20000451 PARAMETER Experiment Name: At_CS6879_Shoots-Roots_P Parameter: Age (day) Value: 14
  misc_feature: MA Experiment 20000451 PARAMETER Experiment Name: At_CS6879_Shoots-Roots_P Parameter: Organism Value: A. thaliana
  misc_feature: MA Experiment 20000451 PARAMETER Experiment Name: At_CS6879_Shoots-Roots_P Parameter: Plant Line Value: CS6879 vs. WS
  misc_feature: MA Experiment 20000451 PARAMETER Experiment Name: At_CS6879_Shoots-Roots_P Parameter: Tissue Value: Roots
  misc_feature: MA Experiment ID: 20000495 Result: Down-regulated in Transcription
  misc_feature: MA Experiment 20000495 PARAMETER Experiment Name: At_Guard_Cells_P Parameter: Harvest Date Value: 8/2/2002
  misc_feature: MA Experiment 20000495 PARAMETER Experiment Name: At_Guard_Cells_P Parameter: Organism Value: A. thaliana
  misc_feature: MA Experiment 20000495 PARAMETER Experiment Name: At_Guard_Cells_P Parameter: Tissue Value: Guard Cells vs. Leaves
  misc_feature: MA Experiment ID: 20000794 Result: Down-regulated in Transcription
  misc_feature: MA Experiment 20000794 PARAMETER Experiment Name: At_Petals_P Parameter: Age (day) Value: 23-25 days
  misc_feature: MA Experiment 20000794 PARAMETER Experiment Name: At_Petals_P Parameter: Plant Line Value: WS
  misc_feature: MA Experiment 20000794 PARAMETER Experiment Name: At_Petals_P Parameter: Tissue Value: Petals vs. Whole plant
  misc_feature: MA Experiment ID: 20001905 Result: Up-regulated in Transcription
  misc_feature: MA Experiment 20001905 PARAMETER Experiment Name: At_Drought_Reproduction_P Parameter: Age (day) Value: 40
  misc_feature: MA Experiment 20001905 PARAMETER Experiment Name: At_Drought_Reproduction_P Parameter: Organism Value: A. thaliana
  misc_feature: MA Experiment 20001905 PARAMETER Experiment Name: At_Drought_Reproduction_P Parameter: Plant Line Value: WS
  misc_feature: MA Experiment 20001905 PARAMETER Experiment Name: At_Drought_Reproduction_P Parameter: Timepoint (day) Value: 10
  misc_feature: MA Experiment 20001905 PARAMETER Experiment Name: At_Drought_Reproduction_P Parameter: Tissue Value: Rosettes
  misc_feature: MA Experiment 20001905 PARAMETER Experiment Name: At_Drought_Reproduction_P Parameter: Treatment Value: Drought vs. No Drought
  misc_feature: MA Experiment ID: 20001911 Result: Up-regulated in Transcription
  misc_feature: MA Experiment 20001911 PARAMETER Experiment Name: At_Drought_Reproduction_P Parameter: Age (day) Value: 40
  misc_feature: MA Experiment 20001911 PARAMETER Experiment Name: At_Drought_Reproduction_P Parameter: Organism Value: A. thaliana
  misc_feature: MA Experiment 20001911 PARAMETER Experiment Name: At_Drought_Reproduction_P Parameter: Plant Line Value: WS
  misc_feature: MA Experiment 20001911 PARAMETER Experiment Name: At_Drought_Reproduction_P Parameter: Timepoint (day) Value: 10
  misc_feature: MA Experiment 20001911 PARAMETER Experiment Name: At_Drought_Reproduction_P Parameter: Tissue Value: Flowers
  misc_feature: MA Experiment 20001911 PARAMETER Experiment Name: At_Drought_Reproduction_P Parameter: Treatment Value: Drought vs. No Drought
atggaatgctctgcaactcctcccaagctttatccaaccgtcgacacttcaaccaccgttgctcctctccctaagtcctcttcctcctcctcttctactaataataataatctctatccttcaatcaatgtcaatgatcttgtcaacaatatcttccccgatcccaccgcctctgactcagcttcagcgcctcctctcgcgacggaggaagtgattctcacaatccacggcgcgatggtccacctcattgacaaatcctacagcgtagagctcgcttgcggcgatctcgagattctccgtcttgttcaaggagatatcaccgtcgcggttttcgctcgcgtcggtgacgagatccaatggccgttgactaaagacgaacccgccgttaaagtcgatgagtctcattacttcttctcgctccgacccgttaaagaatccgagtcatcggatcattcagtcaacgaaacagagaacgagatgttgaactacggattaacaatggcttcgaaaggtcaagaaccgatgcttgagaagctagacaagatcttagctgattacagtagtttcacagcggaggagaaacagaaagaagagaacgttttggatttgacggcggcgaaggagacttcaccggaggagctgaagggaaagaggaaaaagatggtggagaagcagtgtacggcttattggacgactctggctccgaatgttgaggattacagtggcgttgcagcgaaactgatcgctgctggttctggtcaattgattaaagggatcttatggtgtggggatctcacaatggatagactcatgtggggaaatgatttcatgaagaagaagttgtccaaagcagagaaggagagacaagttagtcctggaactttgaaacgtctcaaaagagtaaagaagatgacaaaaatgacagagaaagtggcgaatggtgtgctctctggtgttgttaaagtttctggattcttctcgagttcagtgataaatagcaaagctgggcagaaactctttgggcttcttcctggagaaatggttcttgcaacacttgatggattcaacaaggtttgtgatgctgtcgaagtagcaggaagacacgttatgaaaacaacttcagatgtaactactgaaatcgtcgatcacaagtatggagcaaagacagcacaagcgacaaacgaagggcttagcgcagcagggcatgcttttggaacggcgtggactgttttcaagattagacaagctcttaaccccaagagtgccatgaagccatcatcactcgctaaaaccgtagttaaaacggcagctaaagagagaaagaaggggaaaaaaagttctaagtag

SEQ ID NO: 83361 - protein, 448 aa, Arabidopsis thaliana
  peptide (1)..(448): Ceres Seq. ID no. 12669974
  misc_feature (1)..(448): Homolog of NCBI NO: 18419759 NR Description: putative protein; protein id: At4g35985.1
  misc_feature (1)..(432): Homolog of NCBI NO: 7486396 NR Description: hypothetical protein F4B14.250 - Arabidopsis >gi|3036802|emb|CAA18492.1| putative protein [Arabidopsis >gi|3805864|emb|CAA21484.1| putative protein [Arabidopsis
  misc_feature (10)..(441): Homolog of NCBI NO: 15227905 NR Description: putative senescence-associated protein 12; id: At2g17840.1, supported by cDNA: 40806., supported by cDNA:
  misc_feature (10)..(441): Homolog of NCBI NO: 21593641 NR Description: putative senescence-associated protein 12
  misc_feature (14)..(444): Homolog of NCBI NO: 15320412 NR Description: ERD7 protein [Arabidopsis thaliana]
  misc_feature (8)..(442): Homolog of NCBI NO: 15230434 NR Description: putative protein; protein id: At3g51250.1, by cDNA: gi_15215687 [Arabidopsis thaliana]
  misc_feature (178)..(445): Homolog of NCBI NO: 18855022 NR Description: putative senescence-associated protein [Oryza
  misc_feature (8)..(192): Homolog of NCBI NO: 18855022 NR Description: putative senescence-associated protein [Oryza
  misc_feature (228)..(445): Homolog of NCBI NO: 3551958 NR Description: senescence-associated protein 12 [Hemerocallis
  misc_feature (230)..(439): Homolog of NCBI NO: 15233098 NR Description: unknown protein; protein id: At3g21600.1
MECSATPPKLYPTVDTSTTVAPLPKSSSSSSSTNNNNLYPSINVNDLVNNIFPDPTASDSASAPPLATEEVILTIHGAMVHLIDKSYSVELACGDLEILRLVQGDITVAVFARVGDEIQWPLTKDEPAVKVDESHYFFSLRPVKESESSDHSVNETENEMLNYGLTMASKGQEPMLEKLDKILADYSSFTAEEKQKEENVLDLTAAKETSPEELKGKRKKMVEKQCTAYWTTLAPNVEDYSGVAAKLIAAGSGQLIKGILWCGDLTMDRLMWGNDFMKKKLSKAEKERQVSPGTLKRLKRVKKMTKMTEKVANGVLSGVVKVSGFFSSSVINSKAGQKLFGLLPGEMVLATLDGFNKVCDAVEVAGRHVMKTTSDVTTEIVDHKYGAKTAQATNEGLSAAGHAFGTAWTVFKIRQALNPKSAMKPSSLAKTVVKTAAKERKKGKKSSK

SEQ ID NO: 83362 - protein, 370 aa, Arabidopsis thaliana
  peptide (1)..(370): Ceres Seq. ID no. 12669975
  misc_feature (1)..(370): Homolog of NCBI NO: 18419759 NR Description: putative protein; protein id: At4g35985.1
  misc_feature (1)..(354): Homolog of NCBI NO: 7486396 NR Description: hypothetical protein F4B14.250 - Arabidopsis >gi|3036802|emb|CAA18492.1| putative protein [Arabidopsis >gi|3805864|emb|CAA21484.1| putative protein [Arabidopsis
  misc_feature (1)..(363): Homolog of NCBI NO: 15227905 NR Description: putative senescence-associated protein 12; id: At2g17840.1, supported by cDNA: 40806., supported by cDNA:
  misc_feature (1)..(363): Homolog of NCBI NO: 21593641 NR Description: putative senescence-associated protein 12
  misc_feature (1)..(366): Homolog of NCBI NO: 15320412 NR Description: ERD7 protein [Arabidopsis thaliana]
  misc_feature (1)..(364): Homolog of NCBI NO: 15230434 NR Description: putative protein; protein id: At3g51250.1, by cDNA: gi_15215687 [Arabidopsis thaliana]
  misc_feature (100)..(367): Homolog of NCBI NO: 18855022 NR Description: putative senescence-associated protein [Oryza
  misc_feature (1)..(114): Homolog of NCBI NO: 18855022 NR Description: putative senescence-associated protein [Oryza
  misc_feature (150)..(367): Homolog of NCBI NO: 3551958 NR Description: senescence-associated protein 12 [Hemerocallis
  misc_feature (152)..(361): Homolog of NCBI NO: 15233098 NR Description: unknown protein; protein id: At3g21600.1
MVHLIDKSYSVELACGDLEILRLVQGDITVAVFARVGDEIQWPLTKDEPAVKVDESHYFFSLRPVKESESSDHSVNETENEMLNYGLTMASKGQEPMLEKLDKILADYSSFTAEEKQKEENVLDLTAAKETSPEELKGKRKKMVEKQCTAYWTTLAPNVEDYSGVAAKLIAAGSGQLIKGILWCGDLTMDRLMWGNDFMKKKLSKAEKERQVSPGTLKRLKRVKKMTKMTEKVANGVLSGVVKVSGFFSSSVINSKAGQKLFGLLPGEMVLATLDGFNKVCDAVEVAGRHVMKTTSDVTTEIVDHKYGAKTAQATNEGLSAAGHAFGTAWTVFKIRQALNPKSAMKPSSLAKTVVKTAAKERKKGKKSSK

SEQ ID NO: 83363 - protein, 289 aa, Arabidopsis thaliana
  peptide (1)..(289): Ceres Seq. ID no. 12669976
  misc_feature (1)..(289): Homolog of NCBI NO: 18419759 NR Description: putative protein; protein id: At4g35985.1
  misc_feature (1)..(273): Homolog of NCBI NO: 7486396 NR Description: hypothetical protein F4B14.250 - Arabidopsis >gi|3036802|emb|CAA18492.1| putative protein [Arabidopsis >gi|3805864|emb|CAA21484.1| putative protein [Arabidopsis
  misc_feature (1)..(282): Homolog of NCBI NO: 15227905 NR Description: putative senescence-associated protein 12; id: At2g17840.1, supported by cDNA: 40806., supported by cDNA:
  misc_feature (1)..(282): Homolog of NCBI NO: 21593641 NR Description: putative senescence-associated protein 12
  misc_feature (1)..(285): Homolog of NCBI NO: 15320412 NR Description: ERD7 protein [Arabidopsis thaliana]
  misc_feature (1)..(283): Homolog of NCBI NO: 15230434 NR Description: putative protein; protein id: At3g51250.1, by cDNA: gi_15215687 [Arabidopsis thaliana]
  misc_feature (19)..(286): Homolog of NCBI NO: 18855022 NR Description: putative senescence-associated protein [Oryza
  misc_feature (1)..(33): Homolog of NCBI NO: 18855022 NR Description: putative senescence-associated protein [Oryza
  misc_feature (69)..(286): Homolog of NCBI NO: 3551958 NR Description: senescence-associated protein 12 [Hemerocallis
  misc_feature (71)..(280): Homolog of NCBI NO: 15233098 NR Description: unknown protein; protein id: At3g21600.1
MLNYGLTMASKGQEPMLEKLDKILADYSSFTAEEKQKEENVLDLTAAKETSPEELKGKRKKMVEKQCTAYWTTLAPNVEDYSGVAAKLIAAGSGQLIKGILWCGDLTMDRLMWGNDFMKKKLSKAEKERQVSPGTLKRLKRVKKMTKMTEKVANGVLSGVVKVSGFFSSSVINSKAGQKLFGLLPGEMVLATLDGFNKVCDAVEVAGRHVMKTTSDVTTEIVDHKYGAKTAQATNEGLSAAGHAFGTAWTVFKIRQALNPKSAMKPSSLAKTVVKTAAKERKKGKKSSK

SEQ ID NO: 83364 - DNA, 1134 bp, Arabidopsis thaliana
  misc_feature (1)..(1134): Ceres Seq. ID no. 12669995
  misc_feature: MA Experiment ID: 20000307 Result: Up-regulated in Transcription
  misc_feature: MA Experiment 20000307 PARAMETER Experiment Name: At_Germinating_Seeds_Sub_P Parameter: Age (hr) Value: 24 vs. 0
  misc_feature: MA Experiment 20000307 PARAMETER Experiment Name: At_Germinating_Seeds_Sub_P Parameter: Organism Value: A. thaliana
  misc_feature: MA Experiment 20000307 PARAMETER Experiment Name: At_Germinating_Seeds_Sub_P Parameter: Plant Line Value: WS
  misc_feature: MA Experiment 20000307 PARAMETER Experiment Name: At_Germinating_Seeds_Sub_P Parameter: Tissue Value: Germinating Seeds
  misc_feature: MA Experiment ID: 20000355 Result: Up-regulated in Transcription
  misc_feature: MA Experiment 20000355 PARAMETER Experiment Name: At_Siliques_Sub_P Parameter: Age (day) Value: 21
  misc_feature: MA Experiment 20000355 PARAMETER Experiment Name: At_Siliques_Sub_P Parameter: Organism Value: A. thaliana
  misc_feature: MA Experiment 20000355 PARAMETER Experiment Name: At_Siliques_Sub_P Parameter: Plant Line Value: WS
  misc_feature: MA Experiment 20000355 PARAMETER Experiment Name: At_Siliques_Sub_P Parameter: Tissue Value: Less Than 5mm Siliques vs. Whole Plant
  misc_feature: MA Experiment ID: 20000440 Result: Up-regulated in Transcription
  misc_feature: MA Experiment 20000440 PARAMETER Experiment Name: At_Closed-Flower__Sub_P Parameter: Tissue Value: Closed Flower vs. Whole Plant
atggaatcggtggatcaatcatgtagtgttcctccgggattcagattccatccaacagatgaagagctcgttggttactatttaaggaaaaaagttgcatcgcaaaagatcgatcttgatgtcataagagatattgatctctacagaatcgaaccatgggatttacaagagagctgccgaatcggatatgaggaaagaaatgaatggtatttcttcagccacaaagataagaaatatccaacaggaacaagaacaaacagagcgaccatggctgggttttggaaagccacgggccgagacaaggctgtttacgacaagtcaaaactgattggtatgagaaaaacacttgtgttctacaaaggaagagcccctaatggccaaaaaaccgattggatcatgcatgaataccggctagagtcagatgagaatgcacctcctcaggaagaagggtgggtggtttgtagagcgttcaagaaaaagccaatgaccgggcaagccaagaacacagaaacttggagctcaagttacttttacgacgaattaccgagtggagtacgctcagttacggagcctcttaactacgtatctaagcagaaacaaaacgtttttgcacaagatttaatgttcaagcaagaactagaaggatcagatatcggtttaaacttcatccactgcgatcaattcattcaacttccgcagcttgaaagcccttcactccctcttaccaaaagaccagtgagcttgacgtcaattacatcattggagaagaataaaaatatctacaaaagacatttaatagaagaggatgtgagcttcaatgcgctaataagtagtggaaataaagataagaagaagaagaaaacatcagtgatgacgacggattggagagcactcgataaatttgttgcttctcaacttatgagccaagaagatggagtttcgggttttggaggtcatcatgaagaagataacaataaaatcggtcattacaataacgaagagagcaataacaagggatcagtagagactgcttcttccacgttattgagtgatagagaagaagagaacagattcatcagtggattattgtgttccaacttggactatgacttatatagggatttacatgtttga

SEQ ID NO: 83365 - protein, 377 aa, Arabidopsis thaliana
  peptide (1)..(377): Ceres Seq. ID no. 12669996
  misc_feature (10)..(139): Pfam Name: No apical meristem (NAM) protein Pfam Description: No apical meristem (NAM) protein
  misc_feature (1)..(377): Homolog of NCBI NO: 15234325 NR Description: NAM like protein; protein id: At4g36160.1
  misc_feature (1)..(371): Homolog of NCBI NO: 15227958 NR Description: putative NAM (no apical meristem)-like protein; id: At2g18060.1 [Arabidopsis thaliana] >gi|25352296|pir||G84559
  misc_feature (6)..(312): Homolog of NCBI NO: 34902254 NR Description: Putative NAM-like protein [Oryza sativa (japonica
  misc_feature (1)..(249): Homolog of NCBI NO: 15239338 NR Description: NAM (no apical meristem)-like protein; protein At5g66300.1 [Arabidopsis thaliana] >gi|10177424|dbj|BAB10709.1|
  misc_feature (10)..(190): Homolog of NCBI NO: 15221256 NR Description: unknown protein; protein id: At1g12260.1
  misc_feature (181)..(338): Homolog of NCBI NO: 15221256 NR Description: unknown protein; protein id: At1g12260.1
  misc_feature (10)..(180): Homolog of NCBI NO: 15221554 NR Description: unknown protein; protein id: At1g62700.1
  misc_feature (228)..(331): Homolog of NCBI NO: 15221554 NR Description: unknown protein; protein id: At1g62700.1
  misc_feature (59)..(180): Homolog of NCBI NO: 6630463 NR Description: F23N19.6 [Arabidopsis thaliana]
  misc_feature (228)..(331): Homolog of NCBI NO: 6630463 NR Description: F23N19.6 [Arabidopsis thaliana]
MESVDQSCSVPPGFRFHPTDEELVGYYLRKKVASQKIDLDVIRDIDLYRIEPWDLQESCRIGYEERNEWYFFSHKDKKYPTGTRTNRATMAGFWKATGRDKAVYDKSKLIGMRKTLVFYKGRAPNGQKTDWIMHEYRLESDENAPPQEEGWVVCRAFKKKPMTGQAKNTETWSSSYFYDELPSGVRSVTEPLNYVSKQKQNVFAQDLMFKQELEGSDIGLNFIHCDQFIQLPQLESPSLPLTKRPVSLTSITSLEKNKNIYKRHLIEEDVSFNALISSGNKDKKKKKTSVMTTDWRALDKFVASQLMSQEDGVSGFGGHHEEDNNKIGHYNNEESNNKGSVETASSTLLSDREEENRFISGLLCSNLDYDLYRDLHV

SEQ ID NO: 83366 - protein, 288 aa, Arabidopsis thaliana
  peptide (1)..(288): Ceres Seq. ID no. 12669997
  misc_feature (1)..(288): Homolog of NCBI NO: 15234325 NR Description: NAM like protein; protein id: At4g36160.1
  misc_feature (1)..(282): Homolog of NCBI NO: 15227958 NR Description: putative NAM (no apical meristem)-like protein; id: At2g18060.1 [Arabidopsis thaliana] >gi|25352296|pir||G84559
  misc_feature (1)..(223): Homolog of NCBI NO: 34902254 NR Description: Putative NAM-like protein [Oryza sativa (japonica
  misc_feature (1)..(160): Homolog of NCBI NO: 15239338 NR Description: NAM (no apical meristem)-like protein; protein At5g66300.1 [Arabidopsis thaliana] >gi|10177424|dbj|BAB10709.1|
  misc_feature (1)..(101): Homolog of NCBI NO: 15221256 NR Description: unknown protein; protein id: At1g12260.1
  misc_feature (92)..(249): Homolog of NCBI NO: 15221256 NR Description: unknown protein; protein id: At1g12260.1
  misc_feature (1)..(91): Homolog of NCBI NO: 15221554 NR Description: unknown protein; protein id: At1g62700.1
  misc_feature (139)..(242): Homolog of NCBI NO: 15221554 NR Description: unknown protein; protein id: At1g62700.1
  misc_feature (1)..(91): Homolog of NCBI NO: 6630463 NR Description: F23N19.6 [Arabidopsis thaliana]
  misc_feature (139)..(242): Homolog of NCBI NO: 6630463 NR Description: F23N19.6 [Arabidopsis thaliana]
MAGFWKATGRDKAVYDKSKLIGMRKTLVFYKGRAPNGQKTDWIMHEYRLESDENAPPQEEGWVVCRAFKKKPMTGQAKNTETWSSSYFYDELPSGVRSVTEPLNYVSKQKQNVFAQDLMFKQELEGSDIGLNFIHCDQFIQLPQLESPSLPLTKRPVSLTSITSLEKNKNIYKRHLIEEDVSFNALISSGNKDKKKKKTSVMTTDWRALDKFVASQLMSQEDGVSGFGGHHEEDNNKIGHYNNEESNNKGSVETASSTLLSDREEENRFISGLLCSNLDYDLYRDLHV

SEQ ID NO: 83367 - protein, 266 aa, Arabidopsis thaliana
  peptide (1)..(266): Ceres Seq. ID no. 12669998
  misc_feature (1)..(266): Homolog of NCBI NO: 15234325 NR Description: NAM like protein; protein id: At4g36160.1
  misc_feature (1)..(260): Homolog of NCBI NO: 15227958 NR Description: putative NAM (no apical meristem)-like protein; id: At2g18060.1 [Arabidopsis thaliana] >gi|25352296|pir||G84559
  misc_feature (1)..(201): Homolog of NCBI NO: 34902254 NR Description: Putative NAM-like protein [Oryza sativa (japonica
  misc_feature (1)..(138): Homolog of NCBI NO: 15239338 NR Description: NAM (no apical meristem)-like protein; protein At5g66300.1 [Arabidopsis thaliana] >gi|10177424|dbj|BAB10709.1|
  misc_feature (1)..(79): Homolog of NCBI NO: 15221256 NR Description: unknown protein; protein id: At1g12260.1
  misc_feature (70)..(227): Homolog of NCBI NO: 15221256 NR Description: unknown protein; protein id: At1g12260.1
  misc_feature (1)..(69): Homolog of NCBI NO: 15221554 NR Description: unknown protein; protein id: At1g62700.1
  misc_feature (117)..(220): Homolog of NCBI NO: 15221554 NR Description: unknown protein; protein id: At1g62700.1
  misc_feature (1)..(69): Homolog of NCBI NO: 6630463 NR Description: F23N19.6 [Arabidopsis thaliana]
  misc_feature (117)..(220): Homolog of NCBI NO: 6630463 NR Description: F23N19.6 [Arabidopsis thaliana]
MRKTLVFYKGRAPNGQKTDWIMHEYRLESDENAPPQEEGWVVCRAFKKKPMTGQAKNTETWSSSYFYDELPSGVRSVTEPLNYVSKQKQNVFAQDLMFKQELEGSDIGLNFIHCDQFIQLPQLESPSLPLTKRPVSLTSITSLEKNKNIYKRHLIEEDVSFNALISSGNKDKKKKKTSVMTTDWRALDKFVASQLMSQEDGVSGFGGHHEEDNNKIGHYNNEESNNKGSVETASSTLLSDREEENRFISGLLCSNLDYDLYRDLHV

SEQ ID NO: 83368 - DNA, 1819 bp, Arabidopsis thaliana
  misc_feature (1)..(1819): Ceres Seq. ID no. 12670002
  misc_feature: MA Experiment ID: 20000171 Result: Down-regulated in Transcription
  misc_feature: MA Experiment 20000171 PARAMETER Experiment Name: At_42deg_Heat_P Parameter: Age (day) Value: 14
  misc_feature: MA Experiment 20000171 PARAMETER Experiment Name: At_42deg_Heat_P Parameter: Organism Value: A. thaliana
  misc_feature: MA Experiment 20000171 PARAMETER Experiment Name: At_42deg_Heat_P Parameter: Plant Line Value: WS
  misc_feature: MA Experiment 20000171 PARAMETER Experiment Name: At_42deg_Heat_P Parameter: Temperature (deg C) Value: 42 vs. 22
  misc_feature: MA Experiment 20000171 PARAMETER Experiment Name: At_42deg_Heat_P Parameter: Timepoint (hr) Value: 1
  misc_feature: MA Experiment 20000171 PARAMETER Experiment Name: At_42deg_Heat_P Parameter: Tissue Value: Aerial
  misc_feature: MA Experiment ID: 20000173 Result: Down-regulated in Transcription
  misc_feature: MA Experiment 20000173 PARAMETER Experiment Name: At_42deg_Heat_P Parameter: Age (day) Value: 14
  misc_feature: MA Experiment 20000173 PARAMETER Experiment Name: At_42deg_Heat_P Parameter: Organism Value: A. thaliana
  misc_feature: MA Experiment 20000173 PARAMETER Experiment Name: At_42deg_Heat_P Parameter: Plant Line Value: WS
  misc_feature: MA Experiment 20000173 PARAMETER Experiment Name: At_42deg_Heat_P Parameter: Temperature (deg C) Value: 42 vs. 22
  misc_feature: MA Experiment 20000173 PARAMETER Experiment Name: At_42deg_Heat_P Parameter: Timepoint (hr) Value: 6
  misc_feature: MA Experiment 20000173 PARAMETER Experiment Name: At_42deg_Heat_P Parameter: Tissue Value: Aerial
  misc_feature: MA Experiment ID: 20000227 Result: Down-regulated in Transcription
  misc_feature: MA Experiment 20000227 PARAMETER Experiment Name: At_Root-Tips-vs-Tops_P Parameter: Tissue Value: Root Tips vs. Root Tops
  misc_feature: MA Experiment ID: 20000234 Result: Down-regulated in Transcription
  misc_feature: MA Experiment 20000234 PARAMETER Experiment Name: At_Siliques_P Parameter: Age (day) Value: 21
  misc_feature: MA Experiment 20000234 PARAMETER Experiment Name: At_Siliques_P Parameter: Organism Value: A. thaliana
  misc_feature: MA Experiment 20000234 PARAMETER Experiment Name: At_Siliques_P Parameter: Plant Line Value: WS
  misc_feature: MA Experiment 20000234 PARAMETER Experiment Name: At_Siliques_P Parameter: Tissue Value: Less Than 5mm Siliques vs. Whole Plant
  misc_feature: MA Experiment ID: 20000235 Result: Down-regulated in Transcription
  misc_feature: MA Experiment 20000235 PARAMETER Experiment Name: At_Siliques_P Parameter: Age (day) Value: 21
  misc_feature: MA Experiment 20000235 PARAMETER Experiment Name: At_Siliques_P Parameter: Organism Value: A. thaliana
  misc_feature: MA Experiment 20000235 PARAMETER Experiment Name: At_Siliques_P Parameter: Plant Line Value: WS
  misc_feature: MA Experiment 20000235 PARAMETER Experiment Name: At_Siliques_P Parameter: Tissue Value: 5-10mm Siliques vs. Whole Plant
  misc_feature: MA Experiment ID: 20000265 Result: Down-regulated in Transcription
  misc_feature: MA Experiment 20000265 PARAMETER Experiment Name: At_Open_Flower_P Parameter: Age (day) Value: 21
  misc_feature: MA Experiment 20000265 PARAMETER Experiment Name: At_Open_Flower_P Parameter: Plant Line Value: WS
  misc_feature: MA Experiment 20000265 PARAMETER Experiment Name: At_Open_Flower_P Parameter: Tissue Value: Closed Flower vs. Whole Plant
  misc_feature: MA Experiment ID: 20000286 Result: Down-regulated in Transcription
  misc_feature: MA Experiment 20000286 PARAMETER Experiment Name: At_Open_Flower_P Parameter: Age (day) Value: 21
  misc_feature: MA Experiment 20000286 PARAMETER Experiment Name: At_Open_Flower_P Parameter: Plant Line Value: WS
  misc_feature: MA Experiment 20000286 PARAMETER Experiment Name: At_Open_Flower_P Parameter: Tissue Value: Half Open vs. Whole Plant
  misc_feature: MA Experiment ID: 20000437 Result: Down-regulated in Transcription
  misc_feature: MA Experiment 20000437 PARAMETER Experiment Name: At_Drought_P Parameter: Age (day) Value: 8
  misc_feature: MA Experiment 20000437 PARAMETER Experiment Name: At_Drought_P Parameter: Organism Value: A. thaliana
  misc_feature: MA Experiment 20000437 PARAMETER Experiment Name: At_Drought_P Parameter: Plant Line Value: WS
  misc_feature: MA Experiment 20000437 PARAMETER Experiment Name: At_Drought_P Parameter: Timepoint (hr) Value: 24
  misc_feature: MA Experiment 20000437 PARAMETER Experiment Name: At_Drought_P Parameter: Tissue Value: Whole Plant
  misc_feature: MA Experiment 20000437 PARAMETER Experiment Name: At_Drought_P Parameter: Treatment Value: Drought vs. No Drought
  misc_feature: MA Experiment ID: 20000794 Result: Down-regulated in Transcription
  misc_feature: MA Experiment 20000794 PARAMETER Experiment Name: At_Petals_P Parameter: Age (day) Value: 23-25 days
  misc_feature: MA Experiment 20000794 PARAMETER Experiment Name: At_Petals_P Parameter: Plant Line Value: WS
  misc_feature: MA Experiment 20000794 PARAMETER Experiment Name: At_Petals_P Parameter: Tissue Value: Petals vs. Whole plant
  misc_feature: MA Experiment ID: 20001248 Result: Down-regulated in Transcription
  misc_feature: MA Experiment 20001248 PARAMETER Experiment Name: At_Far-red-induction_P Parameter: Age (day) Value: 7
  misc_feature: MA Experiment 20001248 PARAMETER Experiment Name: At_Far-red-induction_P Parameter: Light Value: Far-red vs. White
  misc_feature: MA Experiment 20001248 PARAMETER Experiment Name: At_Far-red-induction_P Parameter: Organism Value: A. thaliana
  misc_feature: MA Experiment 20001248 PARAMETER Experiment Name: At_Far-red-induction_P Parameter: Plant Line Value: Columbia
  misc_feature: MA Experiment 20001248 PARAMETER Experiment Name: At_Far-red-induction_P Parameter: Timepoint (hr) Value: 4
  misc_feature: MA Experiment 20001248 PARAMETER Experiment Name: At_Far-red-induction_P Parameter: Tissue Value: Whole Plant
  misc_feature: MA Experiment ID: 20001450 Result: Down-regulated in Transcription
  misc_feature: MA Experiment 20001450 PARAMETER Experiment Name: At_Far-red-induction_P Parameter: Age (day) Value: 7
  misc_feature: MA Experiment 20001450 PARAMETER Experiment Name: At_Far-red-induction_P Parameter: Light Value: Far-red vs. White
  misc_feature: MA Experiment 20001450 PARAMETER Experiment Name: At_Far-red-induction_P Parameter: Organism Value: A. thaliana
  misc_feature: MA Experiment 20001450 PARAMETER Experiment Name: At_Far-red-induction_P Parameter: Plant Line Value: Columbia
  misc_feature: MA Experiment 20001450 PARAMETER Experiment Name: At_Far-red-induction_P Parameter: Timepoint (hr) Value: 8
  misc_feature: MA Experiment 20001450 PARAMETER Experiment Name: At_Far-red-induction_P Parameter: Tissue Value: Whole Plant
  misc_feature: MA Experiment ID: 20001911 Result: Down-regulated in Transcription
  misc_feature: MA Experiment 20001911 PARAMETER Experiment Name: At_Drought_Reproduction_P Parameter: Age (day) Value: 40
  misc_feature: MA Experiment 20001911 PARAMETER Experiment Name: At_Drought_Reproduction_P Parameter: Organism Value: A. thaliana
  misc_feature: MA Experiment 20001911 PARAMETER Experiment Name: At_Drought_Reproduction_P Parameter: Plant Line Value: WS
  misc_feature: MA Experiment 20001911 PARAMETER Experiment Name: At_Drought_Reproduction_P Parameter: Timepoint (day) Value: 10
  misc_feature: MA Experiment 20001911 PARAMETER Experiment Name: At_Drought_Reproduction_P Parameter: Tissue Value: Flowers
  misc_feature: MA Experiment 20001911 PARAMETER Experiment Name: At_Drought_Reproduction_P Parameter: Treatment Value: Drought vs. No Drought
aaaaaaaacactcaatatggagtcttctatatcacaaacactaagcaaactatcagatcccacgacgtctcttgtcatcgttgtctctcttttcatcttcatcagcttcatcacacggcggcgaaggcctccatatcctcccggtccacgaggttggcccatcataggcaacatgttaatgatggaccaactcacccaccgtggtttagccaatttagctaaaaagtatggcggattgtgccatctccgcatgggattcctccatatgtacgctgtctcatcacccgaggtggctcgacaagtccttcaagtccaagacagcgtcttctcgaaccggcctgcaactatagctataagctatctgacttacgaccgagcggacatggctttcgctcactacggaccgttttggagacagatgagaaaagtgtgtgtcatgaaggtgtttagccgtaaaagagctgagtcatgggcttcagttcgtgatgaagtggacaaaatggtccggtcggtctcttgtaacgttggtaagcctataaacgtcggggagcaaatttttgcactgacccgcaacataacttaccgggcagcgtttgggtcagcctgcgagaagggacaagacgagttcataagaatcttacaagagttctctaagctttttggagccttcaacgtagcggatttcataccatatttcgggtggatcgatccgcaagggataaacaagcggctcgtgaaggcccgtaatgatctagacggatttattgacgatattatcgatgaacatatgaagaagaaggagaatcaaaacgctgtggatgatggggatgttgtcgataccgatatggttgatgatcttcttgctttttacagtgaagaggccaaattagtcagtgagacagcggatcttcaaaattccatcaaacttacccgtgacaatatcaaagcaatcatcatggacgttatgtttggaggaacggaaacggtagcgtcggcgatagagtgggccttaacggagttattacggagccccgaggatctaaaacgggtccaacaagaactcgccgaagtcgttggacttgacagacgagttgaagaatccgacatcgagaagttgacttatctcaaatgcacactcaaagaaaccctaaggatgcacccaccgatccctctcctcctccacgaaaccgcggaggacactagtatcgacggtttcttcattcccaagaaatctcgtgtgatgatcaacgcgtttgccataggacgcgacccaacctcttggactgacccggacacgtttagaccatcgaggtttttggaaccgggcgtaccggatttcaaagggagcaatttcgagtttataccgttcgggtcgggtcgtagatcgtgcccgggtatgcaactagggttatacgcgcttgacttagccgtggctcatatattacattgcttcacgtggaaattacctgatgggatgaaaccaagtgagctcgacatgaatgatgtgtttggtctcacggctcctaaagccacgcggcttttcgccgtgccaaccacgcgcctcatctgtgctctttaagtttatggttcgagtcacgtggcagggggtttggtatggtgaaaactgaaaagtttgaagttgccctcatcgaggatttgtggatgtcatatgtatgtatgtgtatacacgtgtgttctgatgaaaacagatttggctctttgtttgccctttttttttttttctttaatggggattttccttgaatgaaatgtaacagtaaaaataagatttttttcaataagtaatttagcatgttgc

SEQ ID NO: 83369 - protein, 525 aa, Arabidopsis thaliana
  peptide (1)..(525): Ceres Seq. ID no. 12670003
  misc_feature (6)..(525): Homolog of NCBI NO: 15234332 NR Description: ferulate-5-hydroxylase (FAH1); protein id:
  misc_feature (6)..(525): Homolog of NCBI NO: 12578893 NR Description: ferulate-5-hydroxylase [Arabidopsis thaliana]
  misc_feature (6)..(525): Homolog of NCBI NO: 12578901 NR Description: ferulate-5-hydroxylase [Arabidopsis thaliana]
  misc_feature (6)..(525): Homolog of NCBI NO: 10197650 NR Description: cytochrome p450-dependent monooxygenase [Brassica
  misc_feature (6)..(525): Homolog of NCBI NO: 10197652 NR Description: cytochrome p450-dependent monooxygenase [Brassica
  misc_feature (12)..(525): Homolog of NCBI NO: 10197654 NR Description: cytochrome p450-dependent monooxygenase [Brassica
  misc_feature (6)..(458): Homolog of NCBI NO: 12578913 NR Description: ferulate-5-hydroxylase [Arabidopsis lyrata subsp.
  misc_feature (9)..(525): Homolog of NCBI NO: 6688937 NR Description: ferulate-5-hydroxylase [Populus balsamifera
  misc_feature (6)..(525): Homolog of NCBI NO: 5731998 NR Description: aldehyde 5-hydroxylase [Liquidambar styraciflua]
  misc_feature (4)..(525): Homolog of NCBI NO: 5002354 NR Description: ferulate-5-hydroxylase [Lycopersicon esculentum x
KKTLNMESSISQTLSKLSDPTTSLVIVVSLFIFISFITRRRRPPYPPGPRGWPIIGNMLMMDQLTHRGLANLAKKYGGLCHLRMGFLHMYAVSSPEVARQVLQVQDSVFSNRPATIAISYLTYDRADMAFAHYGPFWRQMRKVCVMKVFSRKRAESWASVRDEVDKMVRSVSCNVGKPINVGEQIFALTRNITYRAAFGSACEKGQDEFIRILQEFSKLFGAFNVADFIPYFGWIDPQGINKRLVKARNDLDGFIDDIIDEHMKKKENQNAVDDGDVVDTDMVDDLLAFYSEEAKLVSETADLQNSIKLTRDNIKAIIMDVMFGGTETVASAIEWALTELLRSPEDLKRVQQELAEVVGLDRRVEESDIEKLTYLKCTLKETLRMHPPIPLLLHETAEDTSIDGFFIPKKSRVMINAFAIGRDPTSWTDPDTFRPSRFLEPGVPDFKGSNFEFIPFGSGRRSCPGMQLGLYALDLAVAHILHCFTWKLPDGMKPSELDMNDVFGLTAPKATRLFAVPTTRLICAL

SEQ ID NO: 83370 - protein, 520 aa, Arabidopsis thaliana
  peptide (1)..(520): Ceres Seq. ID no. 12670004
  misc_feature (1)..(520): Homolog of NCBI NO: 15234332 NR Description: ferulate-5-hydroxylase (FAH1); protein id:
  misc_feature (1)..(520): Homolog of NCBI NO: 12578893 NR Description: ferulate-5-hydroxylase [Arabidopsis thaliana]
  misc_feature (1)..(520): Homolog of NCBI NO: 12578901 NR Description: ferulate-5-hydroxylase [Arabidopsis thaliana]
  misc_feature (1)..(520): Homolog of NCBI NO: 10197650 NR Description: cytochrome p450-dependent monooxygenase [Brassica
  misc_feature (1)..(520): Homolog of NCBI NO: 10197652 NR Description: cytochrome p450-dependent monooxygenase [Brassica
  misc_feature (7)..(520): Homolog of NCBI NO: 10197654 NR Description: cytochrome p450-dependent monooxygenase [Brassica
  misc_feature (1)..(453): Homolog of NCBI NO: 12578913 NR Description: ferulate-5-hydroxylase [Arabidopsis lyrata subsp.
  misc_feature (4)..(520): Homolog of NCBI NO: 6688937 NR Description: ferulate-5-hydroxylase [Populus balsamifera
  misc_feature (1)..(520): Homolog of NCBI NO: 5731998 NR Description: aldehyde 5-hydroxylase [Liquidambar styraciflua]
  misc_feature (1)..(520): Homolog of NCBI NO: 5002354 NR Description: ferulate-5-hydroxylase [Lycopersicon esculentum x
MESSISQTLSKLSDPTTSLVIVVSLFIFISFITRRRRPPYPPGPRGWPIIGNMLMMDQLTHRGLANLAKKYGGLCHLRMGFLHMYAVSSPEVARQVLQVQDSVFSNRPATIAISYLTYDRADMAFAHYGPFWRQMRKVCVMKVFSRKRAESWASVRDEVDKMVRSVSCNVGKPINVGEQIFALTRNITYRAAFGSACEKGQDEFIRILQEFSKLFGAFNVADFIPYFGWIDPQGINKRLVKARNDLDGFIDDIIDEHMKKKENQNAVDDGDVVDTDMVDDLLAFYSEEAKLVSETADLQNSIKLTRDNIKAIIMDVMFGGTETVASAIEWALTELLRSPEDLKRVQQELAEVVGLDRRVEESDIEKLTYLKCTLKETLRMHPPIPLLLHETAEDTSIDGFFIPKKSRVMINAFAIGRDPTSWTDPDTFRPSRFLEPGVPDFKGSNFEFIPFGSGRRSCPGMQLGLYALDLAVAHILHCFTWKLPDGMKPSELDMNDVFGLTAPKATRLFAVPTTRLICAL

SEQ ID NO: 83371 - protein, 468 aa, Arabidopsis thaliana
  peptide (1)..(468): Ceres Seq. ID no. 12670005
  misc_feature (1)..(468): Homolog of NCBI NO: 15234332 NR Description: ferulate-5-hydroxylase (FAH1); protein id:
  misc_feature (1)..(468): Homolog of NCBI NO: 12578893 NR Description: ferulate-5-hydroxylase [Arabidopsis thaliana]
  misc_feature (1)..(468): Homolog of NCBI NO: 12578901 NR Description: ferulate-5-hydroxylase [Arabidopsis thaliana]
  misc_feature (1)..(468): Homolog of NCBI NO: 10197650 NR Description: cytochrome p450-dependent monooxygenase [Brassica
  misc_feature (1)..(468): Homolog of NCBI NO: 10197652 NR Description: cytochrome p450-dependent monooxygenase [Brassica
  misc_feature (1)..(468): Homolog of NCBI NO: 10197654 NR Description: cytochrome p450-dependent monooxygenase [Brassica
  misc_feature (1)..(401): Homolog of NCBI NO: 12578913 NR Description: ferulate-5-hydroxylase [Arabidopsis lyrata subsp.
  misc_feature (1)..(468): Homolog of NCBI NO: 6688937 NR Description: ferulate-5-hydroxylase [Populus balsamifera
  misc_feature (1)..(468): Homolog of NCBI NO: 5731998 NR Description: aldehyde 5-hydroxylase [Liquidambar styraciflua]
  misc_feature (1)..(468): Homolog of NCBI NO: 5002354 NR Description: ferulate-5-hydroxylase [Lycopersicon esculentum x
MLMMDQLTHRGLANLAKKYGGLCHLRMGFLHMYAVSSPEVARQVLQVQDSVFSNRPATIAISYLTYDRADMAFAHYGPFWRQMRKVCVMKVFSRKRAESWASVRDEVDKMVRSVSCNVGKPINVGEQIFALTRNITYRAAFGSACEKGQDEFIRILQEFSKLFGAFNVADFIPYFGWIDPQGINKRLVKARNDLDGFIDDIIDEHMKKKENQNAVDDGDVVDTDMVDDLLAFYSEEAKLVSETADLQNSIKLTRDNIKAIIMDVMFGGTETVASAIEWALTELLRSPEDLKRVQQELAEVVGLDRRVEESDIEKLTYLKCTLKETLRMHPPIPLLLHETAEDTSIDGFFIPKKSRVMINAFAIGRDPTSWTDPDTFRPSRFLEPGVPDFKGSNFEFIPFGSGRRSCPGMQLGLYALDLAVAHILHCFTWKLPDGMKPSELDMNDVFGLTAPKATRLFAVPTTRLICAL

SEQ ID NO: 83372 - DNA, 1925 bp, Arabidopsis thaliana
  misc_feature (1)..(1925): Ceres Seq. ID no. 12670016
  misc_feature: MA Experiment ID: 20000185 Result: Up-regulated in Transcription
  misc_feature: MA Experiment 20000185 PARAMETER Experiment Name: At_Roots__P Parameter: Age (day) Value: 7 vs. 21
  misc_feature: MA Experiment 20000185 PARAMETER Experiment Name: At_Roots__P Parameter: Organism Value: A. thaliana
  misc_feature: MA Experiment 20000185 PARAMETER Experiment Name: At_Roots__P Parameter: Tissue Value: Roots vs. Whole Plant
  misc_feature: MA Experiment ID: 20000264 Result: Up-regulated in Transcription
  misc_feature: MA Experiment 20000264 PARAMETER Experiment Name: At_Open_Flower_P Parameter: Age (day) Value: 21
  misc_feature: MA Experiment 20000264 PARAMETER Experiment Name: At_Open_Flower_P Parameter: Plant Line Value: WS
  misc_feature: MA Experiment 20000264 PARAMETER Experiment Name: At_Open_Flower_P Parameter: Tissue Value: Open Flower vs. Whole Plant
  misc_feature: MA Experiment ID: 20000439 Result: Up-regulated in Transcription
  misc_feature: MA Experiment 20000439 PARAMETER Experiment Name: At_Roots__P Parameter: Age (day) Value: 14 vs. 21
  misc_feature: MA Experiment 20000439 PARAMETER Experiment Name: At_Roots__P Parameter: Organism Value: A. thaliana
  misc_feature: MA Experiment 20000439 PARAMETER Experiment Name: At_Roots__P Parameter: Tissue Value: Roots vs. Whole Plant
  misc_feature: MA Experiment ID: 20000527 Result: Up-regulated in Transcription
  misc_feature: MA Experiment 20000527 PARAMETER Experiment Name: At_10percent_PEG_P Parameter: Age (day) Value: 20
  misc_feature: MA Experiment 20000527 PARAMETER Experiment Name: At_10percent_PEG_P Parameter: Organism Value: A. thaliana
  misc_feature: MA Experiment 20000527 PARAMETER Experiment Name: At_10percent_PEG_P Parameter: Plant Line Value: WS
  misc_feature: MA Experiment 20000527 PARAMETER Experiment Name: At_10percent_PEG_P Parameter: Timepoint (day) Value: 20
  misc_feature: MA Experiment 20000527 PARAMETER Experiment Name: At_10percent_PEG_P Parameter: Tissue Value: Whole Plant
  misc_feature: MA Experiment 20000527 PARAMETER Experiment Name: At_10percent_PEG_P Parameter: Treatment Value: 10percent PEG vs. No Treatment
  misc_feature: MA Experiment ID: 20000794 Result: Up-regulated in Transcription
  misc_feature: MA Experiment 20000794 PARAMETER Experiment Name: At_Petals_P Parameter: Age (day) Value: 23-25 days
  misc_feature: MA Experiment 20000794 PARAMETER Experiment Name: At_Petals_P Parameter: Plant Line Value: WS
  misc_feature: MA Experiment 20000794 PARAMETER Experiment Name: At_Petals_P Parameter: Tissue Value: Petals vs. Whole plant
tgtgcttaggcatatagttattcccaagaaaccggtttaactgtttacgtatgcaacctccggcaagcgcaggacttttccggtcgccggaaaatctcccttggccttataattacatggattatttggtcgctggtttcttggttttgacggccggaatacttctccgtccatggctctggttacgtctacgaaactcgaaaacgaaagatggagatgaagaagaagataatgaggagaagaagaagggaatgattccaaacggaagcttaggctggccggtgatcggagaaaccctaaacttcatcgcttgtggttattcttctcggcctgttaccttcatggacaaacgaaagtctttatacgggaaagtgttcaaaacgaacataatagggacaccaatcataatatcaaccgatgcagaggtgaataaagtggtgctccaaaaccatgggaacacatttgtccctgcataccctaaatcaattacggaactacttggagaaaactctattctcagcatcaatggacctcatcaaaaaaggcttcacacgctcattggcgcgttcctcagatctcctcacctcaaagaccggatcactcgagacattgaggcctcggttgttctcactttggcgtcttgggctcaacttccattggttcatgttcaggatgagatcaaaaagatgacgtttgagatattagtaaaagtgttgatgagcacatctcctggtgaagatatgaacattctcaaacttgagttcgaagaattcatcaaaggtttgatttgtatcccaatcaaattccctggcactagactctacaaatccttaaaggcgaaagagaggttaataaagatggtaaaaaaggttgtggaggagagacaagtggcgatgacaacgacgtctccggcaaatgacgtggtggacgtacttctaagagacggtggtgattcagagaagcaatctcaaccgtcagatttcgtcagcggaaagatcgtagagatgatgatacccggagaggaaacaatgccaacggcgatgaccttggctgtcaaattcttaagtgacaaccccgtcgctctagccaaactcgtggaggagaatatggagatgaagaggcgtaaattggaattgggagaagaatacaagtggaccgattatatgtctctctcttttactcaaaatgtgataaacgaaacgcttagaatggctaacattattaacggggtgtggaggaaagctctcaaggatgtagaaattaaaggttacttaataccgaaaggatggtgtgtattggcatcattcatatcggttcacatggatgaagacatttatgataatccctatcaattcgatccgtggagatgggacagaattaatggatcggcaaacagcagtatttgcttcacaccctttggtggtgggcaaaggctatgtcctggtttagagctgtcgaagctcgaaatatccatctttcttcaccaccttgtaacccggtacagttggacggctgaggaagacgagatagtgtcatttccgactgtgaagatgaagcggaggctcccgatccgagtggctactgtagatgatagtgcttctccgatctcacttgaagatcattaatagatcatttcaaagaacaaaactgtttgtgcaaagaggaagcagagaagtaaacaaatgatcttattaacaaatagtagagaagagaagcaaacaagattggtgggtaagacagaaagagccatacgtacagctagtgatggctcaaagatgagagattctaattataattttttttgtttgtcatgtcaaattataagcgttggttaggttgtccctttctcttttatttatcgtaccaaacgcaagttgagatatgattccatatatatggatgatagatatgtatattaatatata

SEQ ID NO: 83373 - protein, 524 aa, Arabidopsis thaliana
  peptide (1)..(524): Ceres Seq. ID no. 12670017
  misc_feature (1)..(524): Homolog of NCBI NO: 18419825 NR Description: rotundifolia3 (rot3); protein id: At4g36380.1,
  misc_feature (1)..(524): Homolog of NCBI NO: 13878393 NR Description: Cytochrome P450 90C1 (ROTUNDIFOLIA3)
  misc_feature (68)..(524): Homolog of NCBI NO: 25282635 NR Description: cytochrome P450 like protein [imported] - thaliana >gi|4006922|emb|CAB16850.1| cytochrome P450 like protein thaliana] >gi|7270586|emb|CAB80304.1| cytochrome P450 like
  misc_feature (270)..(524): Homolog of NCBI NO: 7484897 NR Description: cytochrome P450 homolog F23E13.220 - Arabidopsis >gi|2961392|emb|CAA18139.1| cytochrome P450 like protein
  misc_feature (69)..(514): Homolog of NCBI NO: 34903584 NR Description: cytochrome P450-like protein [Oryza sativa
  misc_feature (50)..(512): Homolog of NCBI NO: 18400142 NR Description: cytochrome P450, putative; protein id: supported by cDNA: gi_14971016 [Arabidopsis thaliana] CYP90D [Arabidopsis thaliana] >gi|28393374|gb|AAO42111.1|
  misc_feature (50)..(484): Homolog of NCBI NO: 9294019 NR Description: cytochrome P450-like protein [Arabidopsis
  misc_feature (64)..(509): Homolog of NCBI NO: 9587211 NR Description: cytochrome P450 [Vigna radiata]
  misc_feature (69)..(513): Homolog of NCBI NO: 15239203 NR Description: cytochrome p450, putative; protein id: supported by cDNA: 36334., supported by cDNA: gi_14596098, by cDNA: gi_15450716, supported by cDNA: gi_17380617, supported
  misc_feature (64)..(514): Homolog of NCBI NO: 34902330 NR Description: Putative steroid 22-alpha-hydroxylase [Oryza
MQPPASAGLFRSPENLPWPYNYMDYLVAGFLVLTAGILLRPWLWLRLRNSKTKDGDEEEDNEEKKKGMIPNGSLGWPVIGETLNFIACGYSSRPVTFMDKRKSLYGKVFKTNIIGTPIIISTDAEVNKVVLQNHGNTFVPAYPKSITELLGENSILSINGPHQKRLHTLIGAFLRSPHLKDRITRDIEASVVLTLASWAQLPLVHVQDEIKKMTFEILVKVLMSTSPGEDMNILKLEFEEFIKGLICIPIKFPGTRLYKSLKAKERLIKMVKKVVEERQVAMTTTSPANDVVDVLLRDGGDSEKQSQPSDFVSGKIVEMMIPGEETMPTAMTLAVKFLSDNPVALAKLVEENMEMKRRKLELGEEYKWTDYMSLSFTQNVINETLRMANIINGVWRKALKDVEIKGYLIPKGWCVLASFISVHMDEDIYDNPYQFDPWRWDRINGSANSSICFTPFGGGQRLCPGLELSKLEISIFLHHLVTRYSWTAEEDEIVSFPTVKMKRRLPIRVATVDDSASPISLEDH

SEQ ID NO: 83374 - protein, 502 aa, Arabidopsis thaliana
  peptide (1)..(502): Ceres Seq. ID no. 12670018
  misc_feature (1)..(502): Homolog of NCBI NO: 18419825 NR Description: rotundifolia3 (rot3); protein id: At4g36380.1,
  misc_feature (1)..(502): Homolog of NCBI NO: 13878393 NR Description: Cytochrome P450 90C1 (ROTUNDIFOLIA3)
  misc_feature (46)..(502): Homolog of NCBI NO: 25282635 NR Description: cytochrome P450 like protein [imported] - thaliana >gi|4006922|emb|CAB16850.1| cytochrome P450 like protein thaliana] >gi|7270586|emb|CAB80304.1| cytochrome P450 like
  misc_feature (248)..(502): Homolog of NCBI NO: 7484897 NR Description: cytochrome P450 homolog F23E13.220 - Arabidopsis >gi|2961392|emb|CAA18139.1| cytochrome P450 like protein
  misc_feature (47)..(492): Homolog of NCBI NO: 34903584 NR Description: cytochrome P450-like protein [Oryza sativa
  misc_feature (28)..(490): Homolog of NCBI NO: 18400142 NR Description: cytochrome P450, putative; protein id: supported by cDNA: gi_14971016 [Arabidopsis thaliana] CYP90D [Arabidopsis thaliana] >gi|28393374|gb|AAO42111.1|
  misc_feature (28)..(462): Homolog of NCBI NO: 9294019 NR Description: cytochrome P450-like protein [Arabidopsis
  misc_feature (42)..(487): Homolog of NCBI NO: 9587211 NR Description: cytochrome P450 [Vigna radiata]
  misc_feature (47)..(491): Homolog of NCBI NO: 15239203 NR Description: cytochrome p450, putative; protein id: supported by cDNA: 36334., supported by cDNA: gi_14596098, by cDNA: gi_15450716, supported by cDNA: gi_17380617, supported
  misc_feature (42)..(492): Homolog of NCBI NO: 34902330 NR Description: Putative steroid 22-alpha-hydroxylase [Oryza
MDYLVAGFLVLTAGILLRPWLWLRLRNSKTKDGDEEEDNEEKKKGMIPNGSLGWPVIGETLNFIACGYSSRPVTFMDKRKSLYGKVFKTNIIGTPIIISTDAEVNKVVLQNHGNTFVPAYPKSITELLGENSILSINGPHQKRLHTLIGAFLRSPHLKDRITRDIEASVVLTLASWAQLPLVHVQDEIKKMTFEILVKVLMSTSPGEDMNILKLEFEEFIKGLICIPIKFPGTRLYKSLKAKERLIKMVKKVVEERQVAMTTTSPANDVVDVLLRDGGDSEKQSQPSDFVSGKIVEMMIPGEETMPTAMTLAVKFLSDNPVALAKLVEENMEMKRRKLELGEEYKWTDYMSLSFTQNVINETLRMANIINGVWRKALKDVEIKGYLIPKGWCVLASFISVHMDEDIYDNPYQFDPWRWDRINGSANSSICFTPFGGGQRLCPGLELSKLEISIFLHHLVTRYSWTAEEDEIVSFPTVKMKRRLPIRVATVDDSASPISLEDH

SEQ ID NO: 83375 - protein, 457 aa, Arabidopsis thaliana
  peptide (1)..(457): Ceres Seq. ID no. 12670019
  misc_feature (1)..(457): Homolog of NCBI NO: 18419825 NR Description: rotundifolia3 (rot3); protein id: At4g36380.1,
  misc_feature (1)..(457): Homolog of NCBI NO: 13878393 NR Description: Cytochrome P450 90C1 (ROTUNDIFOLIA3)
  misc_feature (1)..(457): Homolog of NCBI NO: 25282635 NR Description: cytochrome P450 like protein [imported] - thaliana >gi|4006922|emb|CAB16850.1| cytochrome P450 like protein thaliana] >gi|7270586|emb|CAB80304.1| cytochrome P450 like
  misc_feature (203)..(457): Homolog of NCBI NO: 7484897 NR Description: cytochrome P450 homolog F23E13.220 - Arabidopsis >gi|2961392|emb|CAA18139.1| cytochrome P450 like protein
  misc_feature (2)..(447): Homolog of NCBI NO: 34903584 NR Description: cytochrome P450-like protein [Oryza sativa
  misc_feature (1)..(445): Homolog of NCBI NO: 18400142 NR Description: cytochrome P450, putative; protein id: supported by cDNA: gi_14971016 [Arabidopsis thaliana] CYP90D [Arabidopsis thaliana] >gi|28393374|gb|AAO42111.1|
  misc_feature (1)..(417): Homolog of NCBI NO: 9294019 NR Description: cytochrome P450-like protein [Arabidopsis
  misc_feature (1)..(442): Homolog of NCBI NO: 9587211 NR Description: cytochrome P450 [Vigna radiata]
  misc_feature (2)..(446): Homolog of NCBI NO: 15239203 NR Description: cytochrome p450, putative; protein id: supported by cDNA: 36334., supported by cDNA: gi_14596098, by cDNA: gi_15450716, supported by cDNA: gi_17380617, supported
  misc_feature (1)..(447): Homolog of NCBI NO: 34902330 NR Description: Putative steroid 22-alpha-hydroxylase [Oryza
MIPNGSLGWPVIGETLNFIACGYSSRPVTFMDKRKSLYGKVFKTNIIGTPIIISTDAEVNKVVLQNHGNTFVPAYPKSITELLGENSILSINGPHQKRLHTLIGAFLRSPHLKDRITRDIEASVVLTLASWAQLPLVHVQDEIKKMTFEILVKVLMSTSPGEDMNILKLEFEEFIKGLICIPIKFPGTRLYKSLKAKERLIKMVKKVVEERQVAMTTTSPANDVVDVLLRDGGDSEKQSQPSDFVSGKIVEMMIPGEETMPTAMTLAVKFLSDNPVALAKLVEENMEMKRRKLELGEEYKWTDYMSLSFTQNVINETLRMANIINGVWRKALKDVEIKGYLIPKGWCVLASFISVHMDEDIYDNPYQFDPWRWDRINGSANSSICFTPFGGGQRLCPGLELSKLEISIFLHHLVTRYSWTAEEDEIVSFPTVKMKRRLPIRVATVDDSASPISLEDH

SEQ ID NO: 83376 - DNA, 1086 bp, Arabidopsis thaliana
  misc_feature (1)..(1086): Ceres Seq. ID no. 12670024
  misc_feature: MA Experiment ID: 20000315 Result: Down-regulated in Transcription
  misc_feature: MA Experiment 20000315 PARAMETER Experiment Name: At_14day_Shoots-Roots_Sub_P Parameter: Age (day) Value: 14
  misc_feature: MA Experiment 20000315 PARAMETER Experiment Name: At_14day_Shoots-Roots_Sub_P Parameter: Organism Value: A. thaliana
  misc_feature: MA Experiment 20000315 PARAMETER Experiment Name: At_14day_Shoots-Roots_Sub_P Parameter: Plant Line Value: WS
  misc_feature: MA Experiment 20000315 PARAMETER Experiment Name: At_14day_Shoots-Roots_Sub_P Parameter: Tissue Value: Shoots vs. Whole Plant
  misc_feature: MA Experiment ID: 20000347 Result: Up-regulated in Transcription
  misc_feature: MA Experiment 20000347 PARAMETER Experiment Name: At_2mM_SA_Sub_P Parameter: Age (day) Value: 14
  misc_feature: MA Experiment 20000347 PARAMETER Experiment Name: At_2mM_SA_Sub_P Parameter: Organism Value: A. thaliana
  misc_feature: MA Experiment 20000347 PARAMETER Experiment Name: At_2mM_SA_Sub_P Parameter: Plant Line Value: WS
  misc_feature: MA Experiment 20000347 PARAMETER Experiment Name: At_2mM_SA_Sub_P Parameter: Timepoint (hr) Value: 6
  misc_feature: MA Experiment 20000347 PARAMETER Experiment Name: At_2mM_SA_Sub_P Parameter: Tissue Value: Aerial
  misc_feature: MA Experiment 20000347 PARAMETER Experiment Name: At_2mM_SA_Sub_P Parameter: Treatment Value: 2mM SA vs. No Treatment
  misc_feature: MA Experiment ID: 20000355 Result: Down-regulated in Transcription
  misc_feature: MA Experiment 20000355 PARAMETER Experiment Name: At_Siliques_Sub_P Parameter: Age (day) Value: 21
  misc_feature: MA Experiment 20000355 PARAMETER Experiment Name: At_Siliques_Sub_P Parameter: Organism Value: A. thaliana
  misc_feature: MA Experiment 20000355 PARAMETER Experiment Name: At_Siliques_Sub_P Parameter: Plant Line Value: WS
  misc_feature: MA Experiment 20000355 PARAMETER Experiment Name: At_Siliques_Sub_P Parameter: Tissue Value: Less Than 5mm Siliques vs. Whole Plant
atggcgatgctagttgatcctccaaatgggataagacaagaagggaaacattactacacgatgtggcaaacattattcgaaatcgacactaagtatgttccgattaagccgattggaagaggagcttatggtgtggtttgttcttcaatcaacagcgaaaccaatgagagagttgctattaagaagatccacaatgtgtttgagaatcgcatcgatgctttgagaacattgagagagcttaagcttttaaggcatgtgagacacgaaaacgttatctcccttaaggatgttatgctgcctactcacaggtacagcttcagagatgtttatttggtctatgagcttatggattctgatttgaatcagatcatcaaatcctctcagtctctctccgatgatcactgcaagtacttcttgtttcagttgctaagaggattgaagtatcttcactcagcaaacatccttcatcgcgatttaaagccagggaatctcttagtgaatgctaattgtgatctaaagatttgtgatttcgggcttgcgagaacttatgaacagtttatgacagagtatgtggtcactcgttggtaccgagcacctgagcttcttctctgttgtgataactacggaacctccattgatgtttggtcggtaggatgcatattcgcagagattcttggaagaaaaccgatattcccgggaacagaatgtctcaaccaactaaagctaatcataaatgttgttggtagccaacaagactgggatctccagttcatagataaccagaaagctaggagatttataaagtctcttcctttctcaaagggtactcacttttctcatatttacccgcacgcaaatccgctggcgatagatttgttacagaggatgcttgtgtttgatccaaccaagagaatatcggtcagcgatgcgcttttacacccctacatggagggactgttggaaccggaatgtaacccgtcggaaaatgttccggtcagtagtttggagatagatgagaacatggaaggagatatgatcagggagatgatgtgggaagagatgcttcattacctcccccgagcttaa

SEQ ID NO: 83377 - protein, 361 aa, Arabidopsis thaliana
  peptide (1)..(361): Ceres Seq. ID no. 12670025
  misc_feature (32)..(316): Pfam Name: Protein kinase domain Pfam Description: Protein kinase domain
  misc_feature (1)..(361): Homolog of NCBI NO: 15234397 NR Description: MAP kinase like protein; protein id: At4g36450.1
  misc_feature (1)..(361): Homolog of NCBI NO: 15224120 NR Description: MAP kinase (ATMPK7); protein id: At2g18170.1, by cDNA: gi_457405 [Arabidopsis thaliana]
  misc_feature (1)..(361): Homolog of NCBI NO: 629548 NR Description: mitogen-activated protein kinase 7 (EC 2.7.1.-) - thaliana >gi|457406|dbj|BAA04870.1| MAP kinase [Arabidopsis
  misc_feature (1)..(361): Homolog of NCBI NO: 4887127 NR Description: putative mitogen-activated protein kinase MAPK
  misc_feature (1)..(359): Homolog of NCBI NO: 7341300 NR Description: MAP kinase MAPK2 [Oryza sativa]
  misc_feature (1)..(361): Homolog of NCBI NO: 15218451 NR Description: putative mitogen-activated protein kinase, MAP
  misc_feature (1)..(361): Homolog of NCBI NO: 2499614 NR Description: MITOGEN-ACTIVATED PROTEIN KINASE HOMOLOG NTF3
  misc_feature (1)..(361): Homolog of NCBI NO: 2499612 NR Description: MITOGEN-ACTIVATED PROTEIN KINASE HOMOLOG 1 (PMEK1)
  misc_feature (1)..(359): Homolog of NCBI NO: 8132347 NR Description: MAP kinase PsMAPK2 [Pisum sativum]
  misc_feature (1)..(359): Homolog of NCBI NO: 11869994 NR Description: MAP kinase 2 [Oryza sativa]
MAMLVDPPNGIRQEGKHYYTMWQTLFEIDTKYVPIKPIGRGAYGVVCSSINSETNERVAIKKIHNVFENRIDALRTLRELKLLRHVRHENVISLKDVMLPTHRYSFRDVYLVYELMDSDLNQIIKSSQSLSDDHCKYFLFQLLRGLKYLHSANILHRDLKPGNLLVNANCDLKICDFGLARTYEQFMTEYVVTRWYRAPELLLCCDNYGTSIDVWSVGCIFAEILGRKPIFPGTECLNQLKLIINVVGSQQDWDLQFIDNQKARRFIKSLPFSKGTHFSHIYPHANPLAIDLLQRMLVFDPTKRISVSDALLHPYMEGLLEPECNPSENVPVSSLEIDENMEGDMIREMMWEEMLHYLPRA

SEQ ID NO: 83378 - protein, 359 aa, Arabidopsis thaliana
  peptide (1)..(359): Ceres Seq. ID no. 12670026
  misc_feature (30)..(314): Pfam Name: Protein kinase domain Pfam Description: Protein kinase domain
  misc_feature (1)..(359): Homolog of NCBI NO: 15234397 NR Description: MAP kinase like protein; protein id: At4g36450.1
  misc_feature (1)..(359): Homolog of NCBI NO: 15224120 NR Description: MAP kinase (ATMPK7); protein id: At2g18170.1, by cDNA: gi_457405 [Arabidopsis thaliana]
  misc_feature (1)..(359): Homolog of NCBI NO: 629548 NR Description: mitogen-activated protein kinase 7 (EC 2.7.1.-) - thaliana >gi|457406|dbj|BAA04870.1| MAP kinase [Arabidopsis
  misc_feature (1)..(359): Homolog of NCBI NO: 4887127 NR Description: putative mitogen-activated protein kinase MAPK
  misc_feature (1)..(357): Homolog of NCBI NO: 7341300 NR Description: MAP kinase MAPK2 [Oryza sativa]
  misc_feature (1)..(359): Homolog of NCBI NO: 15218451 NR Description: putative mitogen-activated protein kinase, MAP
  misc_feature (1)..(359): Homolog of NCBI NO: 2499614 NR Description: MITOGEN-ACTIVATED PROTEIN KINASE HOMOLOG NTF3
  misc_feature (1)..(359): Homolog of NCBI NO: 2499612 NR Description: MITOGEN-ACTIVATED PROTEIN KINASE HOMOLOG 1 (PMEK1)
  misc_feature (1)..(357): Homolog of NCBI NO: 8132347 NR Description: MAP kinase PsMAPK2 [Pisum sativum]
  misc_feature (1)..(357): Homolog of NCBI NO: 11869994 NR Description: MAP kinase 2 [Oryza sativa]
MLVDPPNGIRQEGKHYYTMWQTLFEIDTKYVPIKPIGRGAYGVVCSSINSETNERVAIKKIHNVFENRIDALRTLRELKLLRHVRHENVISLKDVMLPTHRYSFRDVYLVYELMDSDLNQIIKSSQSLSDDHCKYFLFQLLRGLKYLHSANILHRDLKPGNLLVNANCDLKICDFGLARTYEQFMTEYVVTRWYRAPELLLCCDNYGTSIDVWSVGCIFAEILGRKPIFPGTECLNQLKLIINVVGSQQDWDLQFIDNQKARRFIKSLPFSKGTHFSHIYPHANPLAIDLLQRMLVFDPTKRISVSDALLHPYMEGLLEPECNPSENVPVSSLEIDENMEGDMIREMMWEEMLHYLPRA

SEQ ID NO: 83379 - protein, 341 aa, Arabidopsis thaliana
  peptide (1)..(341): Ceres Seq. ID no. 12670027
  misc_feature (12)..(296): Pfam Name: Protein kinase domain Pfam Description: Protein kinase domain
  misc_feature (1)..(341): Homolog of NCBI NO: 15234397 NR Description: MAP kinase like protein; protein id: At4g36450.1
  misc_feature (1)..(341): Homolog of NCBI NO: 15224120 NR Description: MAP kinase (ATMPK7); protein id: At2g18170.1, by cDNA: gi_457405 [Arabidopsis thaliana]
  misc_feature (1)..(341): Homolog of NCBI NO: 629548 NR Description: mitogen-activated protein kinase 7 (EC 2.7.1.-) - thaliana >gi|457406|dbj|BAA04870.1| MAP kinase [Arabidopsis
  misc_feature (1)..(341): Homolog of NCBI NO: 4887127 NR Description: putative mitogen-activated protein kinase MAPK
  misc_feature (1)..(339): Homolog of NCBI NO: 7341300 NR Description: MAP kinase MAPK2 [Oryza sativa]
  misc_feature (1)..(341): Homolog of NCBI NO: 15218451 NR Description: putative mitogen-activated protein kinase, MAP
  misc_feature (1)..(341): Homolog of NCBI NO: 2499614 NR Description: MITOGEN-ACTIVATED PROTEIN KINASE HOMOLOG NTF3
  misc_feature (1)..(341): Homolog of NCBI NO: 2499612 NR Description: MITOGEN-ACTIVATED PROTEIN KINASE HOMOLOG 1 (PMEK1)
  misc_feature (1)..(339): Homolog of NCBI NO: 8132347 NR Description: MAP kinase PsMAPK2 [Pisum sativum]
  misc_feature (1)..(339): Homolog of NCBI NO: 11869994 NR Description: MAP kinase 2 [Oryza sativa]
MWQTLFEIDTKYVPIKPIGRGAYGVVCSSINSETNERVAIKKIHNVFENRIDALRTLRELKLLRHVRHENVISLKDVMLPTHRYSFRDVYLVYELMDSDLNQIIKSSQSLSDDHCKYFLFQLLRGLKYLHSANILHRDLKPGNLLVNANCDLKICDFGLARTYEQFMTEYVVTRWYRAPELLLCCDNYGTSIDVWSVGCIFAEILGRKPIFPGTECLNQLKLIINVVGSQQDWDLQFIDNQKARRFIKSLPFSKGTHFSHIYPHANPLAIDLLQRMLVFDPTKRISVSDALLHPYMEGLLEPECNPSENVPVSSLEIDENMEGDMIREMMWEEMLHYLPRA

SEQ ID NO: 83380 - DNA, 2098 bp, Arabidopsis thaliana
  misc_feature (1)..(2098): Ceres Seq. ID no. 12670028
  misc_feature: MA Experiment ID: 20000495 Result: Up-regulated in Transcription
  misc_feature: MA Experiment 20000495 PARAMETER Experiment Name: At_Guard_Cells_P Parameter: Harvest Date Value: 8/2/2002
  misc_feature: MA Experiment 20000495 PARAMETER Experiment Name: At_Guard_Cells_P Parameter: Organism Value: A. thaliana
  misc_feature: MA Experiment 20000495 PARAMETER Experiment Name: At_Guard_Cells_P Parameter: Tissue Value: Guard Cells vs. Leaves
tacttttttttttttctctctgaaattgattttttttttttgccgtctgcgttatcaaaaatctcgaaaaaacgttgaaagtcaatctttttgcatcgccgaatttgaacaacactcctcgtgtgtttgacactcttgtgggcacgataccttctgctccttgtccattttgccacccaaaatccaattgggatcaggttttcccaaagttgagctagcttctcttatgctcgattcgtcgagcaaattaatactatagaagaaaaaagtacagagctttattaaagcaaattagcaatggcttcgaatctcgtggaaatgtttaatgctgctttgaattgggttactatgattctggagagtccttcagctagagttgtcttgtttggtgtcccaatccgagggcacttctttgtggaagggttgttgggtgttgtcattatcattctcctcactcggaagagttataaacctcccaagcgaccattgaccgagcaggaaatagatgagttgtgtgatgagtgggttcctgaacctcttataccgccaattactgaagacatgaagcatgagccaccagttcttgaaagtgctgctggaccgcatacaacagttaatggaaaagatgtggtgaattttgcctcagctaattatcttgggctcattggccacgagaagttgctggaatcatgtacttctgcattagaaaaatatggggtcggttcttgtgggcctcgtggattctatggtacaattgatgtccaccttgactgcgaaaccagaatatccaaatttttgggtactcctgattcaatcctttactcttatggactttccacaatgttcagcacaattccttgtttctgtaagaaaggcgatgtcattgttgctgatgagggtgttcactggggaatacaaaatggacttcagctttcaagaagtacaattgtgtacttcaagcacaatgacatggaatcccttcgaattacccttgagaaaatcatgacaaagtacaagcgctcaaagaacttgaggcgttatattgtagctgaagctgtatatcaaaattcaggtcaaattgcgcctctggatgagattgtaaaactaaaagagaagtatcggtttcgtgttatattggatgaaagcaactcttttggtgtgcttggccgttctgggagaggtcttgcagagcatcatagtgtccctattgagaagatagatgttgtgactgctgcaatgggccatgcattagccacagaaggtggattttgcactgggaatgcccgcatcatcgattaccagagacttagcagttcaggatatgtgttctctgcttctttaccaccataccttgcaagtgctgctatcaccgccattgatgtcattgatcaaaaccctgatatgttagttaagctgaagcaaaatgttgctctgttatggaaaggattgtcagatatcaaggggatgtcattaacaagcaaccgggaatcacctattgttttcttaaaattagagaaatctagcggttcagctaaagatgatttgcttctacttgagaaaatggctgaccgtgctctgaaggaagactcattgttggttgtgagttctaaaagatcatttcttgataaatgccggttacctgtgggaatcaaactctacgtctcagcgggacattcggaatccgatcttcttaaagcgtcggagtcactgaagagacttgcttcagagcttctactcaagtcctgaaacaccgaaactcttttttcttcaagaacaacaacactgaagggaactctttgaacacatccgtgtgagatagtagacaacagaatccgcagagtcagtagcttgaagatgttcatagcagattcctaaactggttctccactttcagtgatgggcttgtggttgatctgaagctcaattgacgaaggaggattatcgaagacaatggcttcttgttcttacatttatttcatttgatcatctgagttctttttttttttttcctactcatacccttcaatgatcaagtagcttagtgttgttgccgaaattcaaaaactttcaatttatgggaaacaaaaaagttcatgtg

SEQ ID NO: 83381 - protein, 482 aa, Arabidopsis thaliana
  peptide (1)..(482): Ceres Seq. ID no. 12670029
  misc_feature (141)..(475): Pfam Name: Aminotransferase class I and II Pfam Description: Aminotransferase class I and II
  misc_feature (1)..(482): Homolog of NCBI NO: 18419845 NR Description: serine C-palmitoyltransferase like protein; id: At4g36480.1, supported by cDNA: gi_14488274 [Arabidopsis >gi|14488275|dbj|BAB60898.1| serine palmitoyltransferase
  misc_feature (1)..(482): Homolog of NCBI NO: 25407728 NR Description: serine C-palmitoyltransferase like protein
  misc_feature (11)..(479): Homolog of NCBI NO: 37531898 NR Description: putative serine palmitoyltransferase [Oryza
  misc_feature (1)..(479): Homolog of NCBI NO: 15451568 NR Description: Putative serine palmitoyltransferase [Oryza
  misc_feature (8)..(480): Homolog of NCBI NO: 5454084 NR Description: serine palmitoyltransferase, long chain base Serine palmitoyltransferase 1 (Long chain base biosynthesis
  misc_feature (8)..(480): Homolog of NCBI NO: 6685592 NR Description: Serine palmitoyltransferase 1 (Long chain base
  misc_feature (8)..(480): Homolog of NCBI NO: 26354158 NR Description: unnamed protein product [Mus musculus]
  misc_feature (8)..(480): Homolog of NCBI NO: 29244577 NR Description: serine palmitoyltransferase subunit 1 [Mus >gi|26343307|dbj|BAC35310.1| unnamed protein product [Mus >gi|26348084|dbj|BAC37690.1| unnamed protein product [Mus
  misc_feature (8)..(480): Homolog of NCBI NO: 2853289 NR Description: serine palmitoyltransferase LCB1 subunit [Mus
  misc_feature (8)..(480): Homolog of NCBI NO: 6685595 NR Description: Serine palmitoyltransferase 1 (Long chain base
MASNLVEMFNAALNWVTMILESPSARVVLFGVPIRGHFFVEGLLGVVIIILLTRKSYKPPKRPLTEQEIDELCDEWVPEPLIPPITEDMKHEPPVLESAAGPHTTVNGKDVVNFASANYLGLIGHEKLLESCTSALEKYGVGSCGPRGFYGTIDVHLDCETRISKFLGTPDSILYSYGLSTMFSTIPCFCKKGDVIVADEGVHWGIQNGLQLSRSTIVYFKHNDMESLRITLEKIMTKYKRSKNLRRYIVAEAVYQNSGQIAPLDEIVKLKEKYRFRVILDESNSFGVLGRSGRGLAEHHSVPIEKIDVVTAAMGHALATEGGFCTGNARIIDYQRLSSSGYVFSASLPPYLASAAITAIDVIDQNPDMLVKLKQNVALLWKGLSDIKGMSLTSNRESPIVFLKLEKSSGSAKDDLLLLEKMADRALKEDSLLVVSSKRSFLDKCRLPVGIKLYVSAGHSESDLLKASESLKRLASELLLKS

SEQ ID NO: 83382 - protein, 475 aa, Arabidopsis thaliana
  peptide (1)..(475): Ceres Seq. ID no. 12670030
  misc_feature (134)..(468): Pfam Name: Aminotransferase class I and II Pfam Description: Aminotransferase class I and II
  misc_feature (1)..(475): Homolog of NCBI NO: 18419845 NR Description: serine C-palmitoyltransferase like protein; id: At4g36480.1, supported by cDNA: gi_14488274 [Arabidopsis >gi|14488275|dbj|BAB60898.1| serine palmitoyltransferase
  misc_feature (1)..(475): Homolog of NCBI NO: 25407728 NR Description: serine C-palmitoyltransferase like protein
  misc_feature (4)..(472): Homolog of NCBI NO: 37531898 NR Description: putative serine palmitoyltransferase [Oryza
  misc_feature (1)..(472): Homolog of NCBI NO: 15451568 NR Description: Putative serine palmitoyltransferase [Oryza
  misc_feature (1)..(473): Homolog of NCBI NO: 5454084 NR Description: serine palmitoyltransferase, long chain base Serine palmitoyltransferase 1 (Long chain base biosynthesis
  misc_feature (1)..(473): Homolog of NCBI NO: 6685592 NR Description: Serine palmitoyltransferase 1 (Long chain base
  misc_feature (1)..(473): Homolog of NCBI NO: 26354158 NR Description: unnamed protein product [Mus musculus]
  misc_feature (1)..(473): Homolog of NCBI NO: 29244577 NR Description: serine palmitoyltransferase subunit 1 [Mus >gi|26343307|dbj|BAC35310.1| unnamed protein product [Mus >gi|26348084|dbj|BAC37690.1| unnamed protein product [Mus
  misc_feature (1)..(473): Homolog of NCBI NO: 2853289 NR Description: serine palmitoyltransferase LCB1 subunit [Mus
  misc_feature (1)..(473): Homolog of NCBI NO: 6685595 NR Description: Serine palmitoyltransferase 1 (Long chain base
MFNAALNWVTMILESPSARVVLFGVPIRGHFFVEGLLGVVIIILLTRKSYKPPKRPLTEQEIDELCDEWVPEPLIPPITEDMKHEPPVLESAAGPHTTVNGKDVVNFASANYLGLIGHEKLLESCTSALEKYGVGSCGPRGFYGTIDVHLDCETRISKFLGTPDSILYSYGLSTMFSTIPCFCKKGDVIVADEGVHWGIQNGLQLSRSTIVYFKHNDMESLRITLEKIMTKYKRSKNLRRYIVAEAVYQNSGQIAPLDEIVKLKEKYRFRVILDESNSFGVLGRSGRGLAEHHSVPIEKIDVVTAAMGHALATEGGFCTGNARIIDYQRLSSSGYVFSASLPPYLASAAITAIDVIDQNPDMLVKLKQNVALLWKGLSDIKGMSLTSNRESPIVFLKLEKSSGSAKDDLLLLEKMADRALKEDSLLVVSSKRSFLDKCRLPVGIKLYVSAGHSESDLLKASESLKRLASELLLKS

SEQ ID NO: 83383 - protein, 465 aa, Arabidopsis thaliana
  peptide (1)..(465): Ceres Seq. ID no. 12670031
  misc_feature (124)..(458): Pfam Name: Aminotransferase class I and II Pfam Description: Aminotransferase class I and II
  misc_feature (1)..(465): Homolog of NCBI NO: 18419845 NR Description: serine C-palmitoyltransferase like protein; id: At4g36480.1, supported by cDNA: gi_14488274 [Arabidopsis >gi|14488275|dbj|BAB60898.1| serine palmitoyltransferase
  misc_feature (1)..(465): Homolog of NCBI NO: 25407728 NR Description: serine C-palmitoyltransferase like protein
  misc_feature (1)..(462): Homolog of NCBI NO: 37531898 NR Description: putative serine palmitoyltransferase [Oryza
  misc_feature (1)..(462): Homolog of NCBI NO: 15451568 NR Description: Putative serine palmitoyltransferase [Oryza
  misc_feature (1)..(463): Homolog of NCBI NO: 5454084 NR Description: serine palmitoyltransferase, long chain base Serine palmitoyltransferase 1 (Long chain base biosynthesis
  misc_feature (1)..(463): Homolog of NCBI NO: 6685592 NR Description: Serine palmitoyltransferase 1 (Long chain base
  misc_feature (1)..(463): Homolog of NCBI NO: 26354158 NR Description: unnamed protein product [Mus musculus]
  misc_feature (1)..(463): Homolog of NCBI NO: 29244577 NR Description: serine palmitoyltransferase subunit 1 [Mus >gi|26343307|dbj|BAC35310.1| unnamed protein product [Mus >gi|26348084|dbj|BAC37690.1| unnamed protein product [Mus
  misc_feature (1)..(463): Homolog of NCBI NO: 2853289 NR Description: serine palmitoyltransferase LCB1 subunit [Mus
  misc_feature (1)..(463): Homolog of NCBI NO: 6685595 NR Description: Serine palmitoyltransferase 1 (Long chain base
MILESPSARVVLFGVPIRGHFFVEGLLGVVIIILLTRKSYKPPKRPLTEQEIDELCDEWVPEPLIPPITEDMKHEPPVLESAAGPHTTVNGKDVVNFASANYLGLIGHEKLLESCTSALEKYGVGSCGPRGFYGTIDVHLDCETRISKFLGTPDSILYSYGLSTMFSTIPCFCKKGDVIVADEGVHWGIQNGLQLSRSTIVYFKHNDMESLRITLEKIMTKYKRSKNLRRYIVAEAVYQNSGQIAPLDEIVKLKEKYRFRVILDESNSFGVLGRSGRGLAEHHSVPIEKIDVVTAAMGHALATEGGFCTGNARIIDYQRLSSSGYVFSASLPPYLASAAITAIDVIDQNPDMLVKLKQNVALLWKGLSDIKGMSLTSNRESPIVFLKLEKSSGSAKDDLLLLEKMADRALKEDSLLVVSSKRSFLDKCRLPVGIKLYVSAGHSESDLLKASESLKRLASELLLKS

SEQ ID NO: 83384 - DNA, 636 bp, Arabidopsis thaliana
  misc_feature (1)..(636): Ceres Seq. ID no. 12670039
  misc_feature: MA Experiment ID: 20000286 Result: Up-regulated in Transcription
  misc_feature: MA Experiment 20000286 PARAMETER Experiment Name: At_Open_Flower_P Parameter: Age (day) Value: 21
  misc_feature: MA Experiment 20000286 PARAMETER Experiment Name: At_Open_Flower_P Parameter: Plant Line Value: WS
  misc_feature: MA Experiment 20000286 PARAMETER Experiment Name: At_Open_Flower_P Parameter: Tissue Value: Half Open vs. Whole Plant
atgggtttctcaatgttcttctcccccgaaaacgacgtcagccatcattcctctccatatgcttctgttgactgcactctctcacttggaactccctccactcgcctctgcaacgaggatgatgaacgtagattctcgtctcatacctccgacaccataggctgggacttcttgaacggttccaagaaaggcggtggaggcggcggacataacctcctcgctcgccgttgcgccaactgcgacaccacttctactcctctttggagaaacggtccaagaggtcccaagtcgttgtgtaatgcgtgtggaatccgattcaagaaagaagagagacgtgcatcgaccgccagaaactcgacctccggcggaggatcaactgcagctggagttccaactttggatcatcaagcaagtgcaaattattattataacaataataaccaatatgcttcatcgtcgccttggcaccatcagcataatacgcagagagttccatattactcgccggccaataacgaatactcatacgttgatgatgtcagagttgttgatcatgacgtcacaaccgacccgttcttgtcttggaggcttaacgtcgccgaccggaccggccttgtccacgattttacgatgtga

SEQ ID NO: 83385 - protein, 211 aa, Arabidopsis thaliana
  peptide (1)..(211): Ceres Seq. ID no. 12670040
  misc_feature (1)..(211): Homolog of NCBI NO: 15234463 NR Description: GATA zinc finger protein; protein id: At4g36620.1
  misc_feature (60)..(210): Homolog of NCBI NO: 7488381 NR Description: transcription factor homolog F18B3.150 -
  misc_feature (60)..(210): Homolog of NCBI NO: 18409199 NR Description: GATA zinc finger protein; protein id:
  misc_feature (60)..(210): Homolog of NCBI NO: 21555178 NR Description: transcription factor-like protein [Arabidopsis
  misc_feature (1)..(79): Homolog of NCBI NO: 7488381 NR Description: transcription factor homolog F18B3.150 -
  misc_feature (1)..(79): Homolog of NCBI NO: 18409199 NR Description: GATA zinc finger protein; protein id:
  misc_feature (1)..(79): Homolog of NCBI NO: 21555178 NR Description: transcription factor-like protein [Arabidopsis
  misc_feature (3)..(195): Homolog of NCBI NO: 15224164 NR Description: GATA zinc finger protein; protein id: At2g18380.1
  misc_feature (12)..(136): Homolog of NCBI NO: 34912080 NR Description: P0671D01.19 [Oryza sativa (japonica
  misc_feature (60)..(96): Homolog of NCBI NO: 5091599 NR Description: 10A19I.2 [Oryza sativa]
MGFSMFFSPENDVSHHSSPYASVDCTLSLGTPSTRLCNEDDERRFSSHTSDTIGWDFLNGSKKGGGGGGHNLLARRCANCDTTSTPLWRNGPRGPKSLCNACGIRFKKEERRASTARNSTSGGGSTAAGVPTLDHQASANYYYNNNNQYASSSPWHHQHNTQRVPYYSPANNEYSYVDDVRVVDHDVTTDPFLSWRLNVADRTGLVHDFTM

SEQ ID NO: 83386 - protein, 207 aa, Arabidopsis thaliana
  peptide (1)..(207): Ceres Seq. ID no. 12670041
  misc_feature (1)..(207): Homolog of NCBI NO: 15234463 NR Description: GATA zinc finger protein; protein id: At4g36620.1
  misc_feature (56)..(206): Homolog of NCBI NO: 7488381 NR Description: transcription factor homolog F18B3.150 -
  misc_feature (56)..(206): Homolog of NCBI NO: 18409199 NR Description: GATA zinc finger protein; protein id:
  misc_feature (56)..(206): Homolog of NCBI NO: 21555178 NR Description: transcription factor-like protein [Arabidopsis
  misc_feature (1)..(75): Homolog of NCBI NO: 7488381 NR Description: transcription factor homolog F18B3.150 -
  misc_feature (1)..(75): Homolog of NCBI NO: 21555178 NR Description: transcription factor-like protein [Arabidopsis
  misc_feature (1)..(75): Homolog of NCBI NO: 18409199 NR Description: GATA zinc finger protein; protein id:
  misc_feature (1)..(191): Homolog of NCBI NO: 15224164 NR Description: GATA zinc finger protein; protein id: At2g18380.1
  misc_feature (8)..(132): Homolog of NCBI NO: 34912080 NR Description: P0671D01.19 [Oryza sativa (japonica
  misc_feature (56)..(92): Homolog of NCBI NO: 5091599 NR Description: 10A19I.2 [Oryza sativa]
MFFSPENDVSHHSSPYASVDCTLSLGTPSTRLCNEDDERRFSSHTSDTIGWDFLNGSKKGGGGGGHNLLARRCANCDTTSTPLWRNGPRGPKSLCNACGIRFKKEERRASTARNSTSGGGSTAAGVPTLDHQASANYYYNNNNQYASSSPWHHQHNTQRVPYYSPANNEYSYVDDVRVVDHDVTTDPFLSWRLNVADRTGLVHDFTM

SEQ ID NO: 83387 - protein, 112 aa, Arabidopsis thaliana
  peptide (1)..(112): Ceres Seq. ID no. 12670042
MRVESDSRKKRDVHRPPETRPPAEDQLQLEFQLWIIKQVQIIIITIITNMLHRRLGTISIIRREFHITRRPITNTHTLMMSELLIMTSQPTRSCLGGLTSPTGPALSTILRC

SEQ ID NO: 83388 - DNA, 1611 bp, Arabidopsis thaliana
  misc_feature (1)..(1611): Ceres Seq. ID no. 12670072
  misc_feature: MA Experiment ID: 20000328 Result: Up-regulated in Transcription
  misc_feature: MA Experiment 20000328 PARAMETER Experiment Name: At_42deg_Heat_Sub_P Parameter: Age (day) Value: 14
  misc_feature: MA Experiment 20000328 PARAMETER Experiment Name: At_42deg_Heat_Sub_P Parameter: Organism Value: A. thaliana
  misc_feature: MA Experiment 20000328 PARAMETER Experiment Name: At_42deg_Heat_Sub_P Parameter: Plant Line Value: WS
  misc_feature: MA Experiment 20000328 PARAMETER Experiment Name: At_42deg_Heat_Sub_P Parameter: Temperature (deg C) Value: 42 vs. 22
  misc_feature: MA Experiment 20000328 PARAMETER Experiment Name: At_42deg_Heat_Sub_P Parameter: Timepoint (hr) Value: 6
  misc_feature: MA Experiment 20000328 PARAMETER Experiment Name: At_42deg_Heat_Sub_P Parameter: Tissue Value: Aerial
atgggtctctgtttctcgtctcctaaagccaccagacgtggcaccggtagtcggaaccctaatcctgattctccgacgcaggggaaggcgagtgagaaggttagtaataaaaacaagaagaatacgaagaagatccaattgaggcaccaaggagggatcccgtacggtaaacgcatcgattttgggtacgctaaggatttcgataaccgatacaccattgggaaattgctcggacatggccagtttggctttacctacgtcgccaccgataacaacaatggcaatcgcgttgcagtcaagagaatcgacaaggccaagatgactcaaccgattgaagtggaagatgtgaagcgagaggttaagatactacaagctttaggtgggcatgagaatgtggtaggctttcacaatgcatttgaggacaagacctatatttacattgtcatggagttatgtgacggtggtgaattgctagatcgaatactagctaaccgttacaccgagaaagatgcagcggttgtggtgagacaaatgctgaaagttgcagctgaatgtcatttacgaggtctagttcaccgcgacatgaagccagagaattttctgttcaaatcaaccgaagaaggttcatctctaaaggctacagattttggtctgtcggacttcataaagccaggagtgaaatttcaggatatagtaggaagcgcatactacgttgcacctgaagtgttgaaacgtaggtcaggacctgaatcagacgtttggagtattggtgtcatcacttacattctgctctgcgggagaagacccttctgggataagactcaagacggaatattcaatgaggtcatgaggaaaaaacctgatttcagagaagtcccatggccaaccattagcaacggtgccaaagatttcgtgaagaagttgttagttaaggagcctcgggcacggttaacagcagctcaagcgctatcacattcatgggtgaaagaaggaggtgaggcctcagaggttccaatagacatatctgttcttaacaatatgcgtcagtttgtgaaattcagccgtctgaagcagattgcacttagggctctggcgaaaacaattaatgaggatgagctggatgatctcagagaccagtttgatgcgattgacattgacaagaacggttctataagccttgaggaaatgaggcaggctcttgcgaaagatgttccttggaaactcaaagatgcaagagttgcagagattctccaagcgaatgatagcaacactgatggtttggtggatttcactgagtttgtggtggctgctttgcacgtgaaccaattggaggagcatgactctgagaagtggcaacagaggtcaagagcagcatttgacaagtttgacatagacggagatgggtttataactcccgaagaacttagattgaatcaatgtttgcagcaaacgggtttaaaaggctccatcgaaccacttcttgaagaggccgacgtagatgaagatgggagaatcagcatcaatgagtttcgcagacttttgagaagtgcaagcctcaagtcaaaaaatgttaaaagccctcctggttaccagctttcacaaaagatgtaa

SEQ ID NO: 83389 - protein, 536 aa, Arabidopsis thaliana
  peptide (1)..(536): Ceres Seq. ID no. 12670073
  misc_feature (71)..(328): Pfam Name: Protein kinase domain Pfam Description: Protein kinase domain
  misc_feature (1)..(536): Homolog of NCBI NO: 15234291 NR Description: Calcium-dependent serine/threonine protein
  misc_feature (12)..(536): Homolog of NCBI NO: 15227920 NR Description: putative Ca2+-dependent ser/thr protein kinase;
  misc_feature (1)..(531): Homolog of NCBI NO: 15239300 NR Description: calcium-dependent protein kinase; protein id: supported by cDNA: 18901. [Arabidopsis thaliana]
  misc_feature (1)..(531): Homolog of NCBI NO: 21553971 NR Description: calcium-dependent protein kinase [Arabidopsis
  misc_feature (29)..(527): Homolog of NCBI NO: 16904224 NR Description: calcium/calmodulin-dependent protein kinase CaMK2
  misc_feature (17)..(529): Homolog of NCBI NO: 3779218 NR Description: protein kinase CPK1 [Solanum tuberosum]
  misc_feature (1)..(527): Homolog of NCBI NO: 12592069 NR Description: calcium-dependent protein kinase [Oryza sativa]
  misc_feature (1)..(525): Homolog of NCBI NO: 6689920 NR Description: calcium-dependent protein kinase [Oryza sativa]
  misc_feature (9)..(527): Homolog of NCBI NO: 34902680 NR Description: similar to calcium-dependent protein kinase
  misc_feature (51)..(526): Homolog of NCBI NO: 15229785 NR Description: CDPK-related protein kinase; protein id: supported by cDNA: gi_16904213 [Arabidopsis thaliana]
MGLCFSSPKATRRGTGSRNPNPDSPTQGKASEKVSNKNKKNTKKIQLRHQGGIPYGKRIDFGYAKDFDNRYTIGKLLGHGQFGFTYVATDNNNGNRVAVKRIDKAKMTQPIEVEDVKREVKILQALGGHENVVGFHNAFEDKTYIYIVMELCDGGELLDRILANRYTEKDAAVVVRQMLKVAAECHLRGLVHRDMKPENFLFKSTEEGSSLKATDFGLSDFIKPGVKFQDIVGSAYYVAPEVLKRRSGPESDVWSIGVITYILLCGRRPFWDKTQDGIFNEVMRKKPDFREVPWPTISNGAKDFVKKLLVKEPRARLTAAQALSHSWVKEGGEASEVPIDISVLNNMRQFVKFSRLKQIALRALAKTINEDELDDLRDQFDAIDIDKNGSISLEEMRQALAKDVPWKLKDARVAEILQANDSNTDGLVDFTEFVVAALHVNQLEEHDSEKWQQRSRAAFDKFDIDGDGFITPEELRLNQCLQQTGLKGSIEPLLEEADVDEDGRISINEFRRLLRSASLKSKNVKSPPGYQLSQKM

SEQ ID NO: 83390 - protein, 430 aa, Arabidopsis thaliana
  peptide (1)..(430): Ceres Seq. ID no. 12670074
  misc_feature (1)..(222): Pfam Name: Protein kinase domain Pfam Description: Protein kinase domain
  misc_feature (1)..(430): Homolog of NCBI NO: 15234291 NR Description: Calcium-dependent serine/threonine protein
  misc_feature (1)..(430): Homolog of NCBI NO: 15227920 NR Description: putative Ca2+-dependent ser/thr protein kinase;
  misc_feature (1)..(425): Homolog of NCBI NO: 15239300 NR Description: calcium-dependent protein kinase; protein id: supported by cDNA: 18901. [Arabidopsis thaliana]
  misc_feature (1)..(425): Homolog of NCBI NO: 21553971 NR Description: calcium-dependent protein kinase [Arabidopsis
  misc_feature (1)..(421): Homolog of NCBI NO: 16904224 NR Description: calcium/calmodulin-dependent protein kinase CaMK2
  misc_feature (1)..(423): Homolog of NCBI NO: 3779218 NR Description: protein kinase CPK1 [Solanum tuberosum]
  misc_feature (1)..(421): Homolog of NCBI NO: 12592069 NR Description: calcium-dependent protein kinase [Oryza sativa]
  misc_feature (1)..(419): Homolog of NCBI NO: 6689920 NR Description: calcium-dependent protein kinase [Oryza sativa]
  misc_feature (1)..(421): Homolog of NCBI NO: 34902680 NR Description: similar to calcium-dependent protein kinase
  misc_feature (1)..(420): Homolog of NCBI NO: 15229785 NR Description: CDPK-related protein kinase; protein id: supported by cDNA: gi_16904213 [Arabidopsis thaliana]
MTQPIEVEDVKREVKILQALGGHENVVGFHNAFEDKTYIYIVMELCDGGELLDRILANRYTEKDAAVVVRQMLKVAAECHLRGLVHRDMKPENFLFKSTEEGSSLKATDFGLSDFIKPGVKFQDIVGSAYYVAPEVLKRRSGPESDVWSIGVITYILLCGRRPFWDKTQDGIFNEVMRKKPDFREVPWPTISNGAKDFVKKLLVKEPRARLTAAQALSHSWVKEGGEASEVPIDISVLNNMRQFVKFSRLKQIALRALAKTINEDELDDLRDQFDAIDIDKNGSISLEEMRQALAKDVPWKLKDARVAEILQANDSNTDGLVDFTEFVVAALHVNQLEEHDSEKWQQRSRAAFDKFDIDGDGFITPEELRLNQCLQQTGLKGSIEPLLEEADVDEDGRISINEFRRLLRSASLKSKNVKSPPGYQLSQKM

SEQ ID NO: 83391 - protein, 388 aa, Arabidopsis thaliana
  peptide (1)..(388): Ceres Seq. ID no. 12670075
  misc_feature (1)..(180): Pfam Name: Protein kinase domain Pfam Description: Protein kinase domain
  misc_feature (1)..(388): Homolog of NCBI NO: 15234291 NR Description: Calcium-dependent serine/threonine protein
  misc_feature (1)..(388): Homolog of NCBI NO: 15227920 NR Description: putative Ca2+-dependent ser/thr protein kinase;
  misc_feature (1)..(383): Homolog of NCBI NO: 15239300 NR Description: calcium-dependent protein kinase; protein id: supported by cDNA: 18901. [Arabidopsis thaliana]
  misc_feature (1)..(383): Homolog of NCBI NO: 21553971 NR Description: calcium-dependent protein kinase [Arabidopsis
  misc_feature (1)..(379): Homolog of NCBI NO: 16904224 NR Description: calcium/calmodulin-dependent protein kinase CaMK2
  misc_feature (1)..(381): Homolog of NCBI NO: 3779218 NR Description: protein kinase CPK1 [Solanum tuberosum]
  misc_feature (1)..(379): Homolog of NCBI NO: 12592069 NR Description: calcium-dependent protein kinase [Oryza sativa]
  misc_feature (1)..(377): Homolog of NCBI NO: 6689920 NR Description: calcium-dependent protein kinase [Oryza sativa]
  misc_feature (1)..(379): Homolog of NCBI NO: 34902680 NR Description: similar to calcium-dependent protein kinase
  misc_feature (1)..(378): Homolog of NCBI NO: 15229785 NR Description: CDPK-related protein kinase; protein id: supported by cDNA: gi_16904213 [Arabidopsis thaliana]
MELCDGGELLDRILANRYTEKDAAVVVRQMLKVAAECHLRGLVHRDMKPENFLFKSTEEGSSLKATDFGLSDFIKPGVKFQDIVGSAYYVAPEVLKRRSGPESDVWSIGVITYILLCGRRPFWDKTQDGIFNEVMRKKPDFREVPWPTISNGAKDFVKKLLVKEPRARLTAAQALSHSWVKEGGEASEVPIDISVLNNMRQFVKFSRLKQIALRALAKTINEDELDDLRDQFDAIDIDKNGSISLEEMRQALAKDVPWKLKDARVAEILQANDSNTDGLVDFTEFVVAALHVNQLEEHDSEKWQQRSRAAFDKFDIDGDGFITPEELRLNQCLQQTGLKGSIEPLLEEADVDEDGRISINEFRRLLRSASLKSKNVKSPPGYQLSQKM

SEQ ID NO: 83392 - DNA, 1116 bp, Arabidopsis thaliana
  misc_feature (1)..(1116): Ceres Seq. ID no. 12670080
  misc_feature: MA Experiment ID: 20000264 Result: Down-regulated in Transcription
  misc_feature: MA Experiment 20000264 PARAMETER Experiment Name: At_Open_Flower_P Parameter: Age (day) Value: 21
  misc_feature: MA Experiment 20000264 PARAMETER Experiment Name: At_Open_Flower_P Parameter: Plant Line Value: WS
  misc_feature: MA Experiment 20000264 PARAMETER Experiment Name: At_Open_Flower_P Parameter: Tissue Value: Open Flower vs. Whole Plant
atggataagaaggatatggagagagagttttacatgacaggaggagatggaaaaactagttatgccagaaactcttccctccagaagaaagcatctgatacggcaaagcacataacactagagacacttcaacaactctacaaagagacaagaccaaagagtttaggaatagctgatctaggatgttcttcaggaccaaacactctctccaccattacagacttcatcaaaaccgtccaagttgctcaccaccgcgagatcccaatccagcccttaccagaattcagcatcttccttaacgatctccctggaaatgatttcaacttcatattcaagtcattaccagactttcacatagagctcaagagagacaacaacaatggtgattgcccttcagttttcattgcagcttaccctgggtcattttatggaagactcttccctgaaaacaccatccactttgtctatgcctctcatagcttacactggctttccaaggttcctacagctttatatgacgagcaaggcaagtccataaacaaaggttgtgttagtatctgctccttaagctctgaagctgtttccaaagcttactgcagtcaattcaaggaagatttctccattttcctccggtgtagatcaaaagagatggtttctgcaggaagaatggtgcttattatactcggaagagaaggtcctgatcatgtcgatagaggaaactctttcttttgggaacttctctcaagatccatagcagatcttgttgcacagggagagactgaggaagagaagcttgattcttacgatatgcacttctacgctccgagtgctgatgagatagaaggtgaagtggacaaagaagggtcttttgaattagagaggttagagatgttagaagtgaagaaggacaaagggaataccgagggtgatataagttatggtaaggcggttgcaaagacggtaagagcagttcaagaatcaatgcttgttcaacactttggggaaaagattcttgacaagctctttgatacatattgtagaatggttgacgatgagttagctaaggaagacataagacccatcacatttgttgttgtcctaagaaagaagctctga

SEQ ID NO: 83393 - protein, 371 aa, Arabidopsis thaliana
  peptide (1)..(371): Ceres Seq. ID no. 12670081
  misc_feature (39)..(370): Pfam Name: SAM dependent carboxyl methyltransferase Pfam Description: SAM dependent carboxyl methyltransferase
  misc_feature (1)..(371): Homolog of NCBI NO: 15234420 NR Description: S-adenosyl-L-methionine:carboxyl family; protein id: At4g36470.1 [Arabidopsis thaliana]
  misc_feature (5)..(369): Homolog of NCBI NO: 34911486 NR Description: putative S-adenosyl-L-methionine:salicylic acid
  misc_feature (5)..(369): Homolog of NCBI NO: 34911508 NR Description: putative S-adenosyl-L-methionine:salicylic acid
  misc_feature (5)..(366): Homolog of NCBI NO: 6651395 NR Description: floral nectary-specific protein [Brassica rapa
  misc_feature (5)..(370): Homolog of NCBI NO: 34809619 NR Description: Chain X, Crystal Structure Of Salicylic Acid
  misc_feature (11)..(370): Homolog of NCBI NO: 23957318 NR Description: S-adenosyl-L-methionine:salicylic acid
  misc_feature (11)..(371): Homolog of NCBI NO: 13235641 NR Description: S-adenosyl-L-methionine:salicylic acid carboxyl
  misc_feature (5)..(351): Homolog of NCBI NO: 13676829 NR Description: S-adenosyl-L-methionine:jasmonic acid carboxyl
  misc_feature (5)..(351): Homolog of NCBI NO: 15223601 NR Description: S-adenosyl-L-methionine:jasmonic acid carboxyl (JMT); protein id: At1g19640.1, supported by cDNA: gi_13676828
  misc_feature (2)..(370): Homolog of NCBI NO: 37904506 NR Description: methyl transferase [Arabidopsis lyrata subsp.
MDKKDMEREFYMTGGDGKTSYARNSSLQKKASDTAKHITLETLQQLYKETRPKSLGIADLGCSSGPNTLSTITDFIKTVQVAHHREIPIQPLPEFSIFLNDLPGNDFNFIFKSLPDFHIELKRDNNNGDCPSVFIAAYPGSFYGRLFPENTIHFVYASHSLHWLSKVPTALYDEQGKSINKGCVSICSLSSEAVSKAYCSQFKEDFSIFLRCRSKEMVSAGRMVLIILGREGPDHVDRGNSFFWELLSRSIADLVAQGETEEEKLDSYDMHFYAPSADEIEGEVDKEGSFELERLEMLEVKKDKGNTEGDISYGKAVAKTVRAVQESMLVQHFGEKILDKLFDTYCRMVDDELAKEDIRPITFVVVLRKKL

SEQ ID NO: 83394 - protein, 366 aa, Arabidopsis thaliana
  peptide (1)..(366): Ceres Seq. ID no. 12670082
  misc_feature (34)..(365): Pfam Name: SAM dependent carboxyl methyltransferase Pfam Description: SAM dependent carboxyl methyltransferase
  misc_feature (1)..(366): Homolog of NCBI NO: 15234420 NR Description: S-adenosyl-L-methionine:carboxyl family; protein id: At4g36470.1 [Arabidopsis thaliana]
  misc_feature (1)..(364): Homolog of NCBI NO: 34911486 NR Description: putative S-adenosyl-L-methionine:salicylic acid
  misc_feature (1)..(364): Homolog of NCBI NO: 34911508 NR Description: putative S-adenosyl-L-methionine:salicylic acid
  misc_feature (1)..(361): Homolog of NCBI NO: 6651395 NR Description: floral nectary-specific protein [Brassica rapa
  misc_feature (1)..(365): Homolog of NCBI NO: 34809619 NR Description: Chain X, Crystal Structure Of Salicylic Acid
  misc_feature (6)..(365): Homolog of NCBI NO: 23957318 NR Description: S-adenosyl-L-methionine:salicylic acid
  misc_feature (6)..(366): Homolog of NCBI NO: 13235641 NR Description: S-adenosyl-L-methionine:salicylic acid carboxyl
  misc_feature (1)..(346): Homolog of NCBI NO: 13676829 NR Description: S-adenosyl-L-methionine:jasmonic acid carboxyl
  misc_feature (1)..(346): Homolog of NCBI NO: 15223601 NR Description: S-adenosyl-L-methionine:jasmonic acid carboxyl (JMT); protein id: At1g19640.1, supported by cDNA: gi_13676828
  misc_feature (1)..(365): Homolog of NCBI NO: 37904506 NR Description: methyl transferase [Arabidopsis lyrata subsp.
MEREFYMTGGDGKTSYARNSSLQKKASDTAKHITLETLQQLYKETRPKSLGIADLGCSSGPNTLSTITDFIKTVQVAHHREIPIQPLPEFSIFLNDLPGNDFNFIFKSLPDFHIELKRDNNNGDCPSVFIAAYPGSFYGRLFPENTIHFVYASHSLHWLSKVPTALYDEQGKSINKGCVSICSLSSEAVSKAYCSQFKEDFSIFLRCRSKEMVSAGRMVLIILGREGPDHVDRGNSFFWELLSRSIADLVAQGETEEEKLDSYDMHFYAPSADEIEGEVDKEGSFELERLEMLEVKKDKGNTEGDISYGKAVAKTVRAVQESMLVQHFGEKILDKLFDTYCRMVDDELAKEDIRPITFVVVLRKKL

SEQ ID NO: 83395 - protein, 360 aa, Arabidopsis thaliana
  peptide (1)..(360): Ceres Seq. ID no. 12670083
  misc_feature (28)..(359): Pfam Name: SAM dependent carboxyl methyltransferase Pfam Description: SAM dependent carboxyl methyltransferase
  misc_feature (1)..(360): Homolog of NCBI NO: 15234420 NR Description: S-adenosyl-L-methionine:carboxyl family; protein id: At4g36470.1 [Arabidopsis thaliana]
  misc_feature (1)..(358): Homolog of NCBI NO: 34911486 NR Description: putative S-adenosyl-L-methionine:salicylic acid
  misc_feature (1)..(358): Homolog of NCBI NO: 34911508 NR Description: putative S-adenosyl-L-methionine:salicylic acid
  misc_feature (1)..(355): Homolog of NCBI NO: 6651395 NR Description: floral nectary-specific protein [Brassica rapa
  misc_feature (1)..(359): Homolog of NCBI NO: 34809619 NR Description: Chain X, Crystal Structure Of Salicylic Acid
  misc_feature (1)..(359): Homolog of NCBI NO: 23957318 NR Description: S-adenosyl-L-methionine:salicylic acid
  misc_feature (1)..(360): Homolog of NCBI NO: 13235641 NR Description: S-adenosyl-L-methionine:salicylic acid carboxyl
  misc_feature (1)..(340): Homolog of NCBI NO: 13676829 NR Description: S-adenosyl-L-methionine:jasmonic acid carboxyl
  misc_feature (1)..(340): Homolog of NCBI NO: 15223601 NR Description: S-adenosyl-L-methionine:jasmonic acid carboxyl (JMT); protein id: At1g19640.1, supported by cDNA: gi_13676828
  misc_feature (1)..(359): Homolog of NCBI NO: 37904506 NR Description: methyl transferase [Arabidopsis lyrata subsp.
MTGGDGKTSYARNSSLQKKASDTAKHITLETLQQLYKETRPKSLGIADLGCSSGPNTLSTITDFIKTVQVAHHREIPIQPLPEFSIFLNDLPGNDFNFIFKSLPDFHIELKRDNNNGDCPSVFIAAYPGSFYGRLFPENTIHFVYASHSLHWLSKVPTALYDEQGKSINKGCVSICSLSSEAVSKAYCSQFKEDFSIFLRCRSKEMVSAGRMVLIILGREGPDHVDRGNSFFWELLSRSIADLVAQGETEEEKLDSYDMHFYAPSADEIEGEVDKEGSFELERLEMLEVKKDKGNTEGDISYGKAVAKTVRAVQESMLVQHFGEKILDKLFDTYCRMVDDELAKEDIRPITFVVVLRKKL

SEQ ID NO: 83396 - DNA, 1537 bp, Arabidopsis thaliana
  misc_feature (1)..(1537): Ceres Seq. ID no. 12670084
  misc_feature: MA Experiment ID: 20000180 Result: Down-regulated in Transcription
  misc_feature: MA Experiment 20000180 PARAMETER Experiment Name: At_Germinating_Seeds_P Parameter: Age (hr) Value: 24 vs. 0
  misc_feature: MA Experiment 20000180 PARAMETER Experiment Name: At_Germinating_Seeds_P Parameter: Tissue Value: Germinating Seeds
  misc_feature: MA Experiment ID: 20000227 Result: Up-regulated in Transcription
  misc_feature: MA Experiment 20000227 PARAMETER Experiment Name: At_Root-Tips-vs-Tops_P Parameter: Tissue Value: Root Tips vs. Root Tops
  misc_feature: MA Experiment ID: 20001557 Result: Up-regulated in Transcription
  misc_feature: MA Experiment 20001557 PARAMETER Experiment Name: At_Drought_Soil_Dry_P Parameter: Age (day) Value: 27
  misc_feature: MA Experiment 20001557 PARAMETER Experiment Name: At_Drought_Soil_Dry_P Parameter: Organism Value: A. thaliana
  misc_feature: MA Experiment 20001557 PARAMETER Experiment Name: At_Drought_Soil_Dry_P Parameter: Plant Line Value: WS
  misc_feature: MA Experiment 20001557 PARAMETER Experiment Name: At_Drought_Soil_Dry_P Parameter: Post Timepoint (hr) Value: 3
  misc_feature: MA Experiment 20001557 PARAMETER Experiment Name: At_Drought_Soil_Dry_P Parameter: Post-Treatment Value: Re-Water vs. No Drought
  misc_feature: MA Experiment 20001557 PARAMETER Experiment Name: At_Drought_Soil_Dry_P Parameter: Timepoint (day) Value: 13
  misc_feature: MA Experiment 20001557 PARAMETER Experiment Name: At_Drought_Soil_Dry_P Parameter: Treatment Value: Drought vs. No Drought
gcgtctccttttctcgccaccactctccacaatacccatttctgcaaaatggcttcttctcgtatttctctccgccttgttcgccgatttgcctcagccgccgctgacggtacgaccaccgctccctcttcaggcaaaatctctgtctccaaagctaagtccactctccggaaagaacacgatcccgacaaagctcttaagatctacgccaatgtctccgatcactcagcctctcctgtttcatctcgctacgcccaagagctcactgttcgtcgcctcgccaagtgtcgccgtttctcagacatcgaaaccctaattgaatcccacaaaaatgatcccaaaatcaaagaagaacctttctactctacgcttatcagatcttacggccaagcctctatgtttaatcacgccatgagaaccttcgagcagatggatcaatacggcacacccagatcagctgtttccttcaacgccttgctcaacgcttgtctccattccaagaatttcgataaagtcccccaactgttcgacgaaattcctcagaggtacaataagatcatccctgacaaaatctcttacggtatattgattaagtcatactgtgactctggtacccctgaaaaagccattgagattatgagacagatgcaaggtaaaggcatggaagttactaccattgctttcaccaccattttgagttcattgtataagaaaggtgagctcgaggtagctgataacttgtggaatgagatggtgaagaaaggctgtgaattggataatgcagcgtataatgttcgtataatgagtgctcaaaaggaaagccctgaaagagttaaggagttgattgaagaaatgagtagtatgggattgaaacctgatacgattagctataactatcttatgactgcgtattgtgagagaggaatgttggacgaagctaagaaagtgtatgaaggacttgaaggtaacaactgtgctcccaacgcagctacttttaggacattgatatttcatctttgttatagccgattgtacgagcaaggctatgcgatcttcaagaagagtgtgtatatgcacaagattccagatttcaacactttgaagcatttggttgtgggattggtggagaacaagaaaagagatgacgctaaagggttgattagaacggtgaagaagaaattccctccgagtttcttgaatgcgtggaagaaactcgaggaggaactcgggctgtattcaaaaaccgatgcttttccatcttctgcaaaagaggctgctgctgcttaatagctcaagagcatttcgattgaacatcttattttgttgcttgaagacttgttgaaaactatgatctagtatgcaggtttatttataagctgctcctgcatttttctttcctcataaattagcttgtaaaagcttgacggtttgttgttggaatctctagaattccatagtcaacaattttcaggttcatatagttcactgctttgttctacacacttgtgcttcatgatgaattcaagtttctttcagt

SEQ ID NO: 83397 - protein, 428 aa, Arabidopsis thaliana
  peptide (1)..(428): Ceres Seq. ID no. 12670085
  misc_feature (295)..(329): Pfam Name: PPR repeat Pfam Description: PPR repeat
  misc_feature (1)..(428): Homolog of NCBI NO: 25455786 NR Description: membrane-associated salt-inducible protein like
  misc_feature (17)..(428): Homolog of NCBI NO: 15234493 NR Description: salt-inducible like protein; protein id: supported by cDNA: gi_17381285 [Arabidopsis thaliana]
  misc_feature (17)..(417): Homolog of NCBI NO: 18398767 NR Description: expressed protein; protein id: At2g18520.1, by cDNA: 8441. [Arabidopsis thaliana] >gi|25411874|pir||C84565
  misc_feature (31)..(409): Homolog of NCBI NO: 18407365 NR Description: expressed protein; protein id: At1g61870.1, by cDNA: 16387., supported by cDNA: gi_16226402, supported by
  misc_feature (27)..(409): Homolog of NCBI NO: 21553755 NR Description: putative membrane-associated salt-inducible
  misc_feature (22)..(402): Homolog of NCBI NO: 25406637 NR Description: hypothetical protein F18B13.23 [imported] - thaliana >gi|5902386|gb|AAD55488.1|AC009322_28 Hypothetical
  misc_feature (27)..(391): Homolog of NCBI NO: 15222796 NR Description: unknown protein; protein id: At1g55890.1, by cDNA: gi_18650653 [Arabidopsis thaliana]
  misc_feature (22)..(396): Homolog of NCBI NO: 15220068 NR Description: hypothetical protein; protein id: At1g80150.1
  misc_feature (22)..(396): Homolog of NCBI NO: 26453140 NR Description: unknown protein [Arabidopsis thaliana]
  misc_feature (28)..(391): Homolog of NCBI NO: 18399887 NR Description: Expressed protein; protein id: At3g13160.1, by cDNA: 93242. [Arabidopsis thaliana]
ASPFLATTLHNTHFCKMASSRISLRLVRRFASAAADGTTTAPSSGKISVSKAKSTLRKEHDPDKALKIYANVSDHSASPVSSRYAQELTVRRLAKCRRFSDIETLIESHKNDPKIKEEPFYSTLIRSYGQASMFNHAMRTFEQMDQYGTPRSAVSFNALLNACLHSKNFDKVPQLFDEIPQRYNKIIPDKISYGILIKSYCDSGTPEKAIEIMRQMQGKGMEVTTIAFTTILSSLYKKGELEVADNLWNEMVKKGCELDNAAYNVRIMSAQKESPERVKELIEEMSSMGLKPDTISYNYLMTAYCERGMLDEAKKVYEGLEGNNCAPNAATFRTLIFHLCYSRLYEQGYAIFKKSVYMHKIPDFNTLKHLVVGLVENKKRDDAKGLIRTVKKKFPPSFLNAWKKLEEELGLYSKTDAFPSSAKEAAAA

SEQ ID NO: 83398 - protein, 412 aa, Arabidopsis thaliana
  peptide (1)..(412): Ceres Seq. ID no. 12670086
  misc_feature (279)..(313): Pfam Name: PPR repeat Pfam Description: PPR repeat
  misc_feature (1)..(412): Homolog of NCBI NO: 25455786 NR Description: membrane-associated salt-inducible protein like
  misc_feature (1)..(412): Homolog of NCBI NO: 15234493 NR Description: salt-inducible like protein; protein id: supported by cDNA: gi_17381285 [Arabidopsis thaliana]
  misc_feature (1)..(401): Homolog of NCBI NO: 18398767 NR Description: expressed protein; protein id: At2g18520.1, by cDNA: 8441. [Arabidopsis thaliana] >gi|25411874|pir||C84565
  misc_feature (15)..(393): Homolog of NCBI NO: 18407365 NR Description: expressed protein; protein id: At1g61870.1, by cDNA: 16387., supported by cDNA: gi_16226402, supported by
  misc_feature (11)..(393): Homolog of NCBI NO: 21553755 NR Description: putative membrane-associated salt-inducible
  misc_feature (6)..(386): Homolog of NCBI NO: 25406637 NR Description: hypothetical protein F18B13.23 [imported] - thaliana >gi|5902386|gb|AAD55488.1|AC009322_28 Hypothetical
  misc_feature (11)..(375): Homolog of NCBI NO: 15222796 NR Description: unknown protein; protein id: At1g55890.1, by cDNA: gi_18650653 [Arabidopsis thaliana]
  misc_feature (6)..(380): Homolog of NCBI NO: 15220068 NR Description: hypothetical protein; protein id: At1g80150.1
  misc_feature (6)..(380): Homolog of NCBI NO: 26453140 NR Description: unknown protein [Arabidopsis thaliana]
  misc_feature (12)..(375): Homolog of NCBI NO: 18399887 NR Description: Expressed protein; protein id: At3g13160.1, by cDNA: 93242. [Arabidopsis thaliana]
MASSRISLRLVRRFASAAADGTTTAPSSGKISVSKAKSTLRKEHDPDKALKIYANVSDHSASPVSSRYAQELTVRRLAKCRRFSDIETLIESHKNDPKIKEEPFYSTLIRSYGQASMFNHAMRTFEQMDQYGTPRSAVSFNALLNACLHSKNFDKVPQLFDEIPQRYNKIIPDKISYGILIKSYCDSGTPEKAIEIMRQMQGKGMEVTTIAFTTILSSLYKKGELEVADNLWNEMVKKGCELDNAAYNVRIMSAQKESPERVKELIEEMSSMGLKPDTISYNYLMTAYCERGMLDEAKKVYEGLEGNNCAPNAATFRTLIFHLCYSRLYEQGYAIFKKSVYMHKIPDFNTLKHLVVGLVENKKRDDAKGLIRTVKKKFPPSFLNAWKKLEEELGLYSKTDAFPSSAKEAAAA

SEQ ID NO: 83399 - protein, 296 aa, Arabidopsis thaliana
  peptide (1)..(296): Ceres Seq. ID no. 12670087
  misc_feature (163)..(197): Pfam Name: PPR repeat Pfam Description: PPR repeat
  misc_feature (1)..(296): Homolog of NCBI NO: 25455786 NR Description: membrane-associated salt-inducible protein like
  misc_feature (1)..(296): Homolog of NCBI NO: 15234493 NR Description: salt-inducible like protein; protein id: supported by cDNA: gi_17381285 [Arabidopsis thaliana]
  misc_feature (1)..(285): Homolog of NCBI NO: 18398767 NR Description: expressed protein; protein id: At2g18520.1, by cDNA: 8441. [Arabidopsis thaliana] >gi|25411874|pir||C84565
  misc_feature (1)..(277): Homolog of NCBI NO: 18407365 NR Description: expressed protein; protein id: At1g61870.1, by cDNA: 16387., supported by cDNA: gi_16226402, supported by
  misc_feature (1)..(277): Homolog of NCBI NO: 21553755 NR Description: putative membrane-associated salt-inducible
  misc_feature (1)..(270): Homolog of NCBI NO: 25406637 NR Description: hypothetical protein F18B13.23 [imported] - thaliana >gi|5902386|gb|AAD55488.1|AC009322_28 Hypothetical
  misc_feature (1)..(259): Homolog of NCBI NO: 15222796 NR Description: unknown protein; protein id: At1g55890.1, by cDNA: gi_18650653 [Arabidopsis thaliana]
  misc_feature (1)..(264): Homolog of NCBI NO: 15220068 NR Description: hypothetical protein; protein id: At1g80150.1
  misc_feature (1)..(264): Homolog of NCBI NO: 26453140 NR Description: unknown protein [Arabidopsis thaliana]
  misc_feature (1)..(259): Homolog of NCBI NO: 18399887 NR Description: Expressed protein; protein id: At3g13160.1, by cDNA: 93242. [Arabidopsis thaliana]
MFNHAMRTFEQMDQYGTPRSAVSFNALLNACLHSKNFDKVPQLFDEIPQRYNKIIPDKISYGILIKSYCDSGTPEKAIEIMRQMQGKGMEVTTIAFTTILSSLYKKGELEVADNLWNEMVKKGCELDNAAYNVRIMSAQKESPERVKELIEEMSSMGLKPDTISYNYLMTAYCERGMLDEAKKVYEGLEGNNCAPNAATFRTLIFHLCYSRLYEQGYAIFKKSVYMHKIPDFNTLKHLVVGLVENKKRDDAKGLIRTVKKKFPPSFLNAWKKLEEELGLYSKTDAFPSSAKEAAAA

SEQ ID NO: 83400 - DNA, 913 bp, Arabidopsis thaliana
  misc_feature (1)..(913): Ceres Seq. ID no. 12670094
  misc_feature: MA Experiment ID: 20000315 Result: Down-regulated in Transcription
  misc_feature: MA Experiment 20000315 PARAMETER Experiment Name: At_14day_Shoots-Roots_Sub_P Parameter: Age (day) Value: 14
  misc_feature: MA Experiment 20000315 PARAMETER Experiment Name: At_14day_Shoots-Roots_Sub_P Parameter: Organism Value: A. thaliana
  misc_feature: MA Experiment 20000315 PARAMETER Experiment Name: At_14day_Shoots-Roots_Sub_P Parameter: Plant Line Value: WS
  misc_feature: MA Experiment 20000315 PARAMETER Experiment Name: At_14day_Shoots-Roots_Sub_P Parameter: Tissue Value: Shoots vs. Whole Plant
  misc_feature: MA Experiment ID: 20000328 Result: Down-regulated in Transcription
  misc_feature: MA Experiment 20000328 PARAMETER Experiment Name: At_42deg_Heat_Sub_P Parameter: Age (day) Value: 14
  misc_feature: MA Experiment 20000328 PARAMETER Experiment Name: At_42deg_Heat_Sub_P Parameter: Organism Value: A. thaliana
  misc_feature: MA Experiment 20000328 PARAMETER Experiment Name: At_42deg_Heat_Sub_P Parameter: Plant Line Value: WS
  misc_feature: MA Experiment 20000328 PARAMETER Experiment Name: At_42deg_Heat_Sub_P Parameter: Temperature (deg C) Value: 42 vs. 22
  misc_feature: MA Experiment 20000328 PARAMETER Experiment Name: At_42deg_Heat_Sub_P Parameter: Timepoint (hr) Value: 6
  misc_feature: MA Experiment 20000328 PARAMETER Experiment Name: At_42deg_Heat_Sub_P Parameter: Tissue Value: Aerial
  misc_feature: MA Experiment ID: 20000347 Result: Up-regulated in Transcription
  misc_feature: MA Experiment 20000347 PARAMETER Experiment Name: At_2mM_SA_Sub_P Parameter: Age (day) Value: 14
  misc_feature: MA Experiment 20000347 PARAMETER Experiment Name: At_2mM_SA_Sub_P Parameter: Organism Value: A. thaliana
  misc_feature: MA Experiment 20000347 PARAMETER Experiment Name: At_2mM_SA_Sub_P Parameter: Plant Line Value: WS
  misc_feature: MA Experiment 20000347 PARAMETER Experiment Name: At_2mM_SA_Sub_P Parameter: Timepoint (hr) Value: 6
  misc_feature: MA Experiment 20000347 PARAMETER Experiment Name: At_2mM_SA_Sub_P Parameter: Tissue Value: Aerial
  misc_feature: MA Experiment 20000347 PARAMETER Experiment Name: At_2mM_SA_Sub_P Parameter: Treatment Value: 2mM SA vs. No Treatment
  misc_feature: MA Experiment ID: 20000355 Result: Down-regulated in Transcription
  misc_feature: MA Experiment 20000355 PARAMETER Experiment Name: At_Siliques_Sub_P Parameter: Age (day) Value: 21
  misc_feature: MA Experiment 20000355 PARAMETER Experiment Name: At_Siliques_Sub_P Parameter: Organism Value: A. thaliana
  misc_feature: MA Experiment 20000355 PARAMETER Experiment Name: At_Siliques_Sub_P Parameter: Plant Line Value: WS
  misc_feature: MA Experiment 20000355 PARAMETER Experiment Name: At_Siliques_Sub_P Parameter: Tissue Value: Less Than 5mm Siliques vs. Whole Plant
  misc_feature: MA Experiment ID: 20000440 Result: Down-regulated in Transcription
  misc_feature: MA Experiment 20000440 PARAMETER Experiment Name: At_Closed-Flower__Sub_P Parameter: Tissue Value: Closed Flower vs. Whole Plant
aagtttgtgtgcgaccgagtcatcgtcgtcgtgctctccttcttcttcatcgtcgagacctaagaaagacgagactctgattcttctgatctttgaatcacactttttctttttttccttcttcttccaacggaacggaacatatggcttcggtttcacctttggcaaagtttaaactggtgttcttaggagaccaatctgtcggaaaaaccagcatcatcactcgtttcatgtatgacaaattcgacaccacgtaccagcctaccattggaatcgattttctatcgaaaacaatgtacctcgaagatcgaacagttcgtttgcagctatgggatactgctggacaagaaagattcaggagtctaatcccaagttacatcagagattcttctgttgccattgttgtatacgatgtatccaataggcaaacgtttctgaatacctcgaaatggattgaggatgttcacagagaaagaggtcaaagcaatgttatcatcgttcttgttggaaacaaaactgatcttgttgaaaaacggcaagtatcaatcagtgaaggagaagacaagggtaaagagtatggagtgatgttcattgagaccagtgccaaagaaaacttcaacattaaggctttgttccggaagattgctgcagctttacccggggtagactcatattcattggcaacaaaatcagatgacatggttgatgtgaatctaaagaccacttcaaattcatcacaaggtgagcaacaaggaggagcaggtggtggtggaggctgttcttgttgattcaaaaatacataattccaaaacttgtgaagcaaacaaaagggatcacgttagttttgtggttttcatcttattaactgacacagaatataaaacatcaaagagaaaaggattactatttttac

SEQ ID NO: 83401 - protein, 214 aa, Arabidopsis thaliana
  peptide (1)..(214): Ceres Seq. ID no. 12670095
  misc_feature (11)..(173): Pfam Name: Ras family Pfam Description: Ras family
  misc_feature (1)..(214): Homolog of NCBI NO: 15236081 NR Description: GTP-binding protein, putative; protein id: supported by cDNA: gi_13272476, supported by cDNA: gi_14423429
  misc_feature (1)..(214): Homolog of NCBI NO: 15227173 NR Description: GTP-binding protein, putative; protein id:
  misc_feature (1)..(214): Homolog of NCBI NO: 15238112 NR Description: Ras family GTP-binding protein, putative; protein
  misc_feature (1)..(214): Homolog of NCBI NO: 34901804 NR Description: putative ras-related protein Rab-6A [Oryza sativa
  misc_feature (1)..(214): Homolog of NCBI NO: 15224916 NR Description: GTP-binding protein, putative; protein id:
  misc_feature (1)..(214): Homolog of NCBI NO: 7438385 NR Description: GTP-binding protein Rab6 - common tobacco
  misc_feature (5)..(214): Homolog of NCBI NO: 17137220 NR Description: Rab-protein 6 CG6601-PA [Drosophila melanogaster]
  misc_feature (5)..(214): Homolog of NCBI NO: 13195674 NR Description: RAB6, member RAS oncogene family [Mus musculus]
  misc_feature (5)..(214): Homolog of NCBI NO: 38679888 NR Description: RAB6A, member RAS oncogene family isoform b;
  misc_feature (5)..(214): Homolog of NCBI NO: 28302338 NR Description: Similar to RAB6A, member RAS oncogene family
MASVSPLAKFKLVFLGDQSVGKTSIITRFMYDKFDTTYQPTIGIDFLSKTMYLEDRTVRLQLWDTAGQERFRSLIPSYIRDSSVAIVVYDVSNRQTFLNTSKWIEDVHRERGQSNVIIVLVGNKTDLVEKRQVSISEGEDKGKEYGVMFIETSAKENFNIKALFRKIAAALPGVDSYSLATKSDDMVDVNLKTTSNSSQGEQQGGAGGGGGCSC

SEQ ID NO: 83402 - protein, 185 aa, Arabidopsis thaliana
  peptide (1)..(185): Ceres Seq. ID no. 12670096
  misc_feature (1)..(144): Pfam Name: Ras family Pfam Description: Ras family
  misc_feature (1)..(185): Homolog of NCBI NO: 15236081 NR Description: GTP-binding protein, putative; protein id: supported by cDNA: gi_13272476, supported by cDNA: gi_14423429
  misc_feature (1)..(185): Homolog of NCBI NO: 15227173 NR Description: GTP-binding protein, putative; protein id:
  misc_feature (1)..(185): Homolog of NCBI NO: 15238112 NR Description: Ras family GTP-binding protein, putative; protein
  misc_feature (1)..(185): Homolog of NCBI NO: 34901804 NR Description: putative ras-related protein Rab-6A [Oryza sativa
  misc_feature (1)..(185): Homolog of NCBI NO: 15224916 NR Description: GTP-binding protein, putative; protein id:
  misc_feature (1)..(185): Homolog of NCBI NO: 7438385 NR Description: GTP-binding protein Rab6 - common tobacco
  misc_feature (1)..(185): Homolog of NCBI NO: 17137220 NR Description: Rab-protein 6 CG6601-PA [Drosophila melanogaster]
  misc_feature (1)..(185): Homolog of NCBI NO: 13195674 NR Description: RAB6, member RAS oncogene family [Mus musculus]
  misc_feature (1)..(185): Homolog of NCBI NO: 38679888 NR Description: RAB6A, member RAS oncogene family isoform b;
  misc_feature (1)..(185): Homolog of NCBI NO: 28302338 NR Description: Similar to RAB6A, member RAS oncogene family
MYDKFDTTYQPTIGIDFLSKTMYLEDRTVRLQLWDTAGQERFRSLIPSYIRDSSVAIVVYDVSNRQTFLNTSKWIEDVHRERGQSNVIIVLVGNKTDLVEKRQVSISEGEDKGKEYGVMFIETSAKENFNIKALFRKIAAALPGVDSYSLATKSDDMVDVNLKTTSNSSQGEQQGGAGGGGGCSC

SEQ ID NO: 83403 - protein, 164 aa, Arabidopsis thaliana
  peptide (1)..(164): Ceres Seq. ID no. 12670097
  misc_feature (1)..(123): Pfam Name: Ras family Pfam Description: Ras family
  misc_feature (1)..(164): Homolog of NCBI NO: 15236081 NR Description: GTP-binding protein, putative; protein id: supported by cDNA: gi_13272476, supported by cDNA: gi_14423429
  misc_feature (1)..(164): Homolog of NCBI NO: 15227173 NR Description: GTP-binding protein, putative; protein id:
  misc_feature (1)..(164): Homolog of NCBI NO: 15238112 NR Description: Ras family GTP-binding protein, putative; protein
  misc_feature (1)..(164): Homolog of NCBI NO: 34901804 NR Description: putative ras-related protein Rab-6A [Oryza sativa
  misc_feature (1)..(164): Homolog of NCBI NO: 15224916 NR Description: GTP-binding protein, putative; protein id:
  misc_feature (1)..(164): Homolog of NCBI NO: 7438385 NR Description: GTP-binding protein Rab6 - common tobacco
  misc_feature (1)..(164): Homolog of NCBI NO: 17137220 NR Description: Rab-protein 6 CG6601-PA [Drosophila melanogaster]
  misc_feature (1)..(164): Homolog of NCBI NO: 13195674 NR Description: RAB6, member RAS oncogene family [Mus musculus]
  misc_feature (1)..(164): Homolog of NCBI NO: 38679888 NR Description: RAB6A, member RAS oncogene family isoform b;
  misc_feature (1)..(164): Homolog of NCBI NO: 28302338 NR Description: Similar to RAB6A, member RAS oncogene family
MYLEDRTVRLQLWDTAGQERFRSLIPSYIRDSSVAIVVYDVSNRQTFLNTSKWIEDVHRERGQSNVIIVLVGNKTDLVEKRQVSISEGEDKGKEYGVMFIETSAKENFNIKALFRKIAAALPGVDSYSLATKSDDMVDVNLKTTSNSSQGEQQGGAGGGGGCSC

SEQ ID NO: 83404 - DNA, 1779 bp, Arabidopsis thaliana
  misc_feature (1)..(1779): Ceres Seq. ID no. 12670115
  misc_feature: MA Experiment ID: 20000306 Result: Down-regulated in Transcription
  misc_feature: MA Experiment 20000306 PARAMETER Experiment Name: At_Germinating_Seeds_Sub_P Parameter: Age (hr) Value: 6 vs. 0
  misc_feature: MA Experiment 20000306 PARAMETER Experiment Name: At_Germinating_Seeds_Sub_P Parameter: Organism Value: A. thaliana
  misc_feature: MA Experiment 20000306 PARAMETER Experiment Name: At_Germinating_Seeds_Sub_P Parameter: Plant Line Value: WS
  misc_feature: MA Experiment 20000306 PARAMETER Experiment Name: At_Germinating_Seeds_Sub_P Parameter: Tissue Value: Germinating Seeds
  misc_feature: MA Experiment ID: 20000307 Result: Down-regulated in Transcription
  misc_feature: MA Experiment 20000307 PARAMETER Experiment Name: At_Germinating_Seeds_Sub_P Parameter: Age (hr) Value: 24 vs. 0
  misc_feature: MA Experiment 20000307 PARAMETER Experiment Name: At_Germinating_Seeds_Sub_P Parameter: Organism Value: A. thaliana
  misc_feature: MA Experiment 20000307 PARAMETER Experiment Name: At_Germinating_Seeds_Sub_P Parameter: Plant Line Value: WS
  misc_feature: MA Experiment 20000307 PARAMETER Experiment Name: At_Germinating_Seeds_Sub_P Parameter: Tissue Value: Germinating Seeds
atggacgtccgaagtctaccaagcaacggcgtcgcaacaatccaagactccgctcccaccgccgcaaccatactcggctcctctgcagcgactcttggacgtcacttatcccgccgtcttgtccaagccggagtcaccgacattttcactgttcccggtgatttcaacctatctctgcttgaccagctcatcgccaacccggagctcaacaacatcgggtgctgtaacgagctaaacgccggttacgccgccgatggatacgctcgatctcgtggagtcggtgcttgcgtcgtgactttcaccgttggtggactcagcgttttgaacgctatcgctggtgcgtacagtgagaacctaccagttatatgtatcgttggaggtcctaactccaacgattttggcactaaccggattcttcatcacaccattggtttacctgattttagccaagagcttaggtgtttccaaactgttacttgctatcaggctgtggtgaaccatttagaggatgctcatgaacagatcgacaaggcgatagcaacagctctgagagagagcaagcctgtgtacattagcatcagctgtaacttagctgccattcctcatcctacatttgctagttatcctgtcccttttgacctaactccaaggttgagcaacaaggattgtttagaagctgccgtggaagcaacattggagtttctaaacaaggccgtgaagcccgttatggtcggtggtcccaagttgcgtgtggctaaagctagggatgcctttgtggagctagctgatgcttcaggctaccccgtggcagtgatgccatctgccaaaggctttgtcccagagaaccatcctcatttcattggcacttactggggagcagtgagcactcttttctgctctgagattgtcgagtccgcggatgcttacatcttcgcaggtccaatcttcaacgactacagctccgttggttactcacttctcctcaagaaagaaaaagccatcattgtgcatcctgatagtgtcgttgtggctaatggtcctacctttggttgcgttcggatgagcgaattcttcagggagttggctaagagggtgaaacctaacaagacggcttatgagaactaccatagaatctttgtccctgaaggtaagcctttgaaatgcaaaccaagagagcctttgagaatcaacgcaatgttccaacacattcagaagatgctctctaatgaaaccgctgtgattgctgaaactggtgattcttggttcaattgtcagaaacttaagctgcctaaaggatgtgggtacgagtttcaaatgcagtatggatcaattggttggtctgttggtgcgactctaggatacgctcaagcaacaccggagaagagagtgttgtctttcattggagacggaagtttccaagtgacggctcaggacgtttccacaatgattcgtaacggacagaagaccatcatcttcctgatcaacaacggtggctacaccattgaagttgagattcatgatggtccttacaatgtgatcaagaattggaactacactggtcttgtcgatgctattcataatggtgaaggcaaatgctggaccacaaaggtgagatacgaggaggagttagtggaagcgattaacacggcgacattggagaagaaagatagtctttgtttcattgaagtgattgttcacaaggatgatacgagcaaagagttgcttgagtggggctctcgcgtctcagctgctaatggtcgtcctcccaatcctcagtag

SEQ ID NO: 83405 - protein, 592 aa, Arabidopsis thaliana
  peptide (1)..(592): Ceres Seq. ID no. 12670116
  misc_feature (2)..(592): Homolog of NCBI NO: 15240950 NR Description: pyruvate decarboxylase-like protein; protein id:
  misc_feature (30)..(592): Homolog of NCBI NO: 28393679 NR Description: putative pyruvate decarboxylase [Arabidopsis
  misc_feature (2)..(592): Homolog of NCBI NO: 15234062 NR Description: pyruvate decarboxylase-1 (Pdc1); protein id: supported by cDNA: gi_17979050 [Arabidopsis thaliana]
  misc_feature (2)..(592): Homolog of NCBI NO: 1616785 NR Description: pyruvate decarboxylase [Arabidopsis thaliana]
  misc_feature (2)..(592): Homolog of NCBI NO: 10121330 NR Description: pyruvate decarboxylase [Fragaria x ananassa]
  misc_feature (2)..(592): Homolog of NCBI NO: 17225598 NR Description: pyruvate decarboxylase [Fragaria x ananassa]
  misc_feature (8)..(592): Homolog of NCBI NO: 29373077 NR Description: pyruvate decarboxylase 1 [Lotus corniculatus]
  misc_feature (2)..(592): Homolog of NCBI NO: 24745919 NR Description: pyruvate decarboxylase [Solanum tuberosum]
  misc_feature (21)..(592): Homolog of NCBI NO: 10732644 NR Description: pyruvate decarboxylase 1 [Vitis vinifera]
  misc_feature (51)..(592): Homolog of NCBI NO: 1706328 NR Description: Pyruvate decarboxylase isozyme 2 (PDC)
MDVRSLPSNGVATIQDSAPTAATILGSSAATLGRHLSRRLVQAGVTDIFTVPGDFNLSLLDQLIANPELNNIGCCNELNAGYAADGYARSRGVGACVVTFTVGGLSVLNAIAGAYSENLPVICIVGGPNSNDFGTNRILHHTIGLPDFSQELRCFQTVTCYQAVVNHLEDAHEQIDKAIATALRESKPVYISISCNLAAIPHPTFASYPVPFDLTPRLSNKDCLEAAVEATLEFLNKAVKPVMVGGPKLRVAKARDAFVELADASGYPVAVMPSAKGFVPENHPHFIGTYWGAVSTLFCSEIVESADAYIFAGPIFNDYSSVGYSLLLKKEKAIIVHPDSVVVANGPTFGCVRMSEFFRELAKRVKPNKTAYENYHRIFVPEGKPLKCKPREPLRINAMFQHIQKMLSNETAVIAETGDSWFNCQKLKLPKGCGYEFQMQYGSIGWSVGATLGYAQATPEKRVLSFIGDGSFQVTAQDVSTMIRNGQKTIIFLINNGGYTIEVEIHDGPYNVIKNWNYTGLVDAIHNGEGKCWTTKVRYEEELVEAINTATLEKKDSLCFIEVIVHKDDTSKELLEWGSRVSAANGRPPNPQ

SEQ ID NO: 83406 - protein, 350 aa, Arabidopsis thaliana
  peptide (1)..(350): Ceres Seq. ID no. 12670117
  misc_feature (1)..(350): Homolog of NCBI NO: 15240950 NR Description: pyruvate decarboxylase-like protein; protein id:
  misc_feature (1)..(350): Homolog of NCBI NO: 28393679 NR Description: putative pyruvate decarboxylase [Arabidopsis
  misc_feature (1)..(350): Homolog of NCBI NO: 15234062 NR Description: pyruvate decarboxylase-1 (Pdc1); protein id: supported by cDNA: gi_17979050 [Arabidopsis thaliana]
  misc_feature (1)..(350): Homolog of NCBI NO: 1616785 NR Description: pyruvate decarboxylase [Arabidopsis thaliana]
  misc_feature (1)..(350): Homolog of NCBI NO: 10121330 NR Description: pyruvate decarboxylase [Fragaria x ananassa]
  misc_feature (1)..(350): Homolog of NCBI NO: 17225598 NR Description: pyruvate decarboxylase [Fragaria x ananassa]
  misc_feature (1)..(350): Homolog of NCBI NO: 29373077 NR Description: pyruvate decarboxylase 1 [Lotus corniculatus]
  misc_feature (1)..(350): Homolog of NCBI NO: 24745919 NR Description: pyruvate decarboxylase [Solanum tuberosum]
  misc_feature (1)..(350): Homolog of NCBI NO: 10732644 NR Description: pyruvate decarboxylase 1 [Vitis vinifera]
  misc_feature (1)..(350): Homolog of NCBI NO: 1706328 NR Description: Pyruvate decarboxylase isozyme 2 (PDC)
MVGGPKLRVAKARDAFVELADASGYPVAVMPSAKGFVPENHPHFIGTYWGAVSTLFCSEIVESADAYIFAGPIFNDYSSVGYSLLLKKEKAIIVHPDSVVVANGPTFGCVRMSEFFRELAKRVKPNKTAYENYHRIFVPEGKPLKCKPREPLRINAMFQHIQKMLSNETAVIAETGDSWFNCQKLKLPKGCGYEFQMQYGSIGWSVGATLGYAQATPEKRVLSFIGDGSFQVTAQDVSTMIRNGQKTIIFLINNGGYTIEVEIHDGPYNVIKNWNYTGLVDAIHNGEGKCWTTKVRYEEELVEAINTATLEKKDSLCFIEVIVHKDDTSKELLEWGSRVSAANGRPPNPQ

SEQ ID NO: 83407 - protein, 321 aa, Arabidopsis thaliana
  peptide (1)..(321): Ceres Seq. ID no. 12670118
  misc_feature (1)..(321): Homolog of NCBI NO: 15240950 NR Description: pyruvate decarboxylase-like protein; protein id:
  misc_feature (1)..(321): Homolog of NCBI NO: 28393679 NR Description: putative pyruvate decarboxylase [Arabidopsis
  misc_feature (1)..(321): Homolog of NCBI NO: 15234062 NR Description: pyruvate decarboxylase-1 (Pdc1); protein id: supported by cDNA: gi_17979050 [Arabidopsis thaliana]
  misc_feature (1)..(321): Homolog of NCBI NO: 1616785 NR Description: pyruvate decarboxylase [Arabidopsis thaliana]
  misc_feature (1)..(321): Homolog of NCBI NO: 10121330 NR Description: pyruvate decarboxylase [Fragaria x ananassa]
  misc_feature (1)..(321): Homolog of NCBI NO: 17225598 NR Description: pyruvate decarboxylase [Fragaria x ananassa]
  misc_feature (1)..(321): Homolog of NCBI NO: 29373077 NR Description: pyruvate decarboxylase 1 [Lotus corniculatus]
  misc_feature (1)..(321): Homolog of NCBI NO: 24745919 NR Description: pyruvate decarboxylase [Solanum tuberosum]
  misc_feature (1)..(321): Homolog of NCBI NO: 10732644 NR Description: pyruvate decarboxylase 1 [Vitis vinifera]
  misc_feature (1)..(321): Homolog of NCBI NO: 1706328 NR Description: Pyruvate decarboxylase isozyme 2 (PDC)
MPSAKGFVPENHPHFIGTYWGAVSTLFCSEIVESADAYIFAGPIFNDYSSVGYSLLLKKEKAIIVHPDSVVVANGPTFGCVRMSEFFRELAKRVKPNKTAYENYHRIFVPEGKPLKCKPREPLRINAMFQHIQKMLSNETAVIAETGDSWFNCQKLKLPKGCGYEFQMQYGSIGWSVGATLGYAQATPEKRVLSFIGDGSFQVTAQDVSTMIRNGQKTIIFLINNGGYTIEVEIHDGPYNVIKNWNYTGLVDAIHNGEGKCWTTKVRYEEELVEAINTATLEKKDSLCFIEVIVHKDDTSKELLEWGSRVSAANGRPPNPQ

SEQ ID NO: 83408 - DNA, 1287 bp, Arabidopsis thaliana
  misc_feature (1)..(1287): Ceres Seq. ID no. 12670123
  misc_feature: MA Experiment ID: 20000184 Result: Down-regulated in Transcription
  misc_feature: MA Experiment 20000184 PARAMETER Experiment Name: At_Shoots__P Parameter: Age (day) Value: 7
  misc_feature: MA Experiment 20000184 PARAMETER Experiment Name: At_Shoots__P Parameter: Tissue Value: Shoots vs. Whole Plant
atgtctctaccggattctctcccatcttcttcttcttctccgcctgtgacccgtgaagaaaccggctttcatcgctttgaacatcacggcaacgattccggttttgatcatcgtgatcgtccaccgtggaatcgttctgagtacgattatcgccatggaagcgttgttgcatctgagaacgtcaggaacaattccacttctgaagacccttggtcttgcgttgtcgtcgttgctaccttctgtatctttggtaatgtcgatgactttgattctggggctttatggaacaacgaatgtctggtggaagaattagggaacaagggatctggtttgatactgtatggattgaaccaagccccacagcttgatgttctgactaaatggtccgaagttcactatctagctgtgcctaatgattcttacaagtattggatacagtatttgaacaaggggtcacgcgtaaaagtttcatacaacgttgaatctgtgggttcttccttataccttgtgatagcccaaggtgtggatgggctctctgagtgggtacaagatccgacgcgtccagacactacactgtcgtggcatataatctctggcaagtgtccaagtggttatattgagcaggacataactaagtcgtcgagttattatgttgcagtaggcaacgtatacctgaatgaagtgaaggcgacgattgacattcaagttgagggggtattgtatgatactacaaatgcttattacaattgctctttccctaacgacaagtgcactctaagtgttccattatttggaactaatgctgctgtactaacctcaccaggtccaaagctgaacaattctaagaatgagttctgcgcaaaactctcatatgaaccaaggtggattgcatacatagtttgcatgggtgtagtgacagcactcttgttaattgtctcgagtctcttcaataaacgacaaccagtcactgaagatgaaaccgttgatgaaaatgatgatgtagctcctctaattccgggaaaagacgatgataactcaagctggtgctcgtcctacagttctattttgacgagtacagaggaattggaaggtgcacatggtgaaggccacagtagtacaagatatctatgtgcaatttgctatgatgcgcctagagactgtttcttcctctcttgtggacactgcgttgcttgcttccagtgcgggacacggatagctgaaacttcgggtttttgtccggtatgccgtaagaagatcaggaaggtcaagaagatcttcaatgtctaa

SEQ ID NO: 83409 - protein, 428 aa, Arabidopsis thaliana
  peptide (1)..(428): Ceres Seq. ID no. 12670124
  misc_feature (377)..(415): Pfam Name: Zinc finger, C3HC4 type (RING finger) Pfam Description: Zinc finger, C3HC4 type (RING finger)
  misc_feature (1)..(428): Homolog of NCBI NO: 11357966 NR Description: hypothetical protein T10O8.160 - Arabidopsis >gi|7320723|emb|CAB81928.1| putative protein [Arabidopsis
  misc_feature (100)..(428): Homolog of NCBI NO: 30679266 NR Description: expressed protein [Arabidopsis thaliana]
  misc_feature (1)..(83): Homolog of NCBI NO: 30679266 NR Description: expressed protein [Arabidopsis thaliana]
  misc_feature (309)..(428): Homolog of NCBI NO: 15224462 NR Description: unknown protein; protein id: At2g38190.1
  misc_feature (371)..(426): Homolog of NCBI NO: 29648940 NR Description: hypothetical protein [Arabidopsis thaliana]
  misc_feature (189)..(332): Homolog of NCBI NO: 15224464 NR Description: hypothetical protein; protein id: At2g38200.1
  misc_feature (101)..(232): Homolog of NCBI NO: 29648951 NR Description: hypothetical protein [Arabidopsis thaliana]
  misc_feature (198)..(298): Homolog of NCBI NO: 15224468 NR Description: hypothetical protein; protein id: At2g38220.1
MSLPDSLPSSSSSPPVTREETGFHRFEHHGNDSGFDHRDRPPWNRSEYDYRHGSVVASENVRNNSTSEDPWSCVVVVATFCIFGNVDDFDSGALWNNECLVEELGNKGSGLILYGLNQAPQLDVLTKWSEVHYLAVPNDSYKYWIQYLNKGSRVKVSYNVESVGSSLYLVIAQGVDGLSEWVQDPTRPDTTLSWHIISGKCPSGYIEQDITKSSSYYVAVGNVYLNEVKATIDIQVEGVLYDTTNAYYNCSFPNDKCTLSVPLFGTNAAVLTSPGPKLNNSKNEFCAKLSYEPRWIAYIVCMGVVTALLLIVSSLFNKRQPVTEDETVDENDDVAPLIPGKDDDNSSWCSSYSSILTSTEELEGAHGEGHSSTRYLCAICYDAPRDCFFLSCGHCVACFQCGTRIAETSGFCPVCRKKIRKVKKIFNV

SEQ ID NO: 83410 - DNA, 3034 bp, Arabidopsis thaliana
  misc_feature (1)..(3034): Ceres Seq. ID no. 12670125
  misc_feature: MA Experiment ID: 20000171 Result: Down-regulated in Transcription
  misc_feature: MA Experiment 20000171 PARAMETER Experiment Name: At_42deg_Heat_P Parameter: Age (day) Value: 14
  misc_feature: MA Experiment 20000171 PARAMETER Experiment Name: At_42deg_Heat_P Parameter: Organism Value: A. thaliana
  misc_feature: MA Experiment 20000171 PARAMETER Experiment Name: At_42deg_Heat_P Parameter: Plant Line Value: WS
  misc_feature: MA Experiment 20000171 PARAMETER Experiment Name: At_42deg_Heat_P Parameter: Temperature (deg C) Value: 42 vs. 22
  misc_feature: MA Experiment 20000171 PARAMETER Experiment Name: At_42deg_Heat_P Parameter: Timepoint (hr) Value: 1
  misc_feature: MA Experiment 20000171 PARAMETER Experiment Name: At_42deg_Heat_P Parameter: Tissue Value: Aerial
  misc_feature: MA Experiment ID: 20000179 Result: Up-regulated in Transcription
  misc_feature: MA Experiment 20000179 PARAMETER Experiment Name: At_Germinating_Seeds_P Parameter: Age (hr) Value: 6 vs. 0
  misc_feature: MA Experiment 20000179 PARAMETER Experiment Name: At_Germinating_Seeds_P Parameter: Tissue Value: Germinating Seeds
  misc_feature: MA Experiment ID: 20000180 Result: Up-regulated in Transcription
  misc_feature: MA Experiment 20000180 PARAMETER Experiment Name: At_Germinating_Seeds_P Parameter: Age (hr) Value: 24 vs. 0
  misc_feature: MA Experiment 20000180 PARAMETER Experiment Name: At_Germinating_Seeds_P Parameter: Tissue Value: Germinating Seeds
  misc_feature: MA Experiment ID: 20000441 Result: Up-regulated in Transcription
  misc_feature: MA Experiment 20000441 PARAMETER Experiment Name: At_1uM_BR-BRZ__P Parameter: Tissue Value: Shoot Apices
  misc_feature: MA Experiment 20000441 PARAMETER Experiment Name: At_1uM_BR-BRZ__P Parameter: Treatment Value: 1uM BR vs. No Treatment
  misc_feature: MA Experiment ID: 20000443 Result: Up-regulated in Transcription
  misc_feature: MA Experiment 20000443 PARAMETER Experiment Name: At_1uM_BR-BRZ__P Parameter: Tissue Value: Shoot Apices
  misc_feature: MA Experiment 20000443 PARAMETER Experiment Name: At_1uM_BR-BRZ__P Parameter: Treatment Value: 1uM BRZ vs. No Treatment
  misc_feature: MA Experiment ID: 20000445 Result: Up-regulated in Transcription
  misc_feature: MA Experiment 20000445 PARAMETER Experiment Name: At_100uM_NAA__P Parameter: Age (day) Value: 14
  misc_feature: MA Experiment 20000445 PARAMETER Experiment Name: At_100uM_NAA__P Parameter: Organism Value: A. thaliana
  misc_feature: MA Experiment 20000445 PARAMETER Experiment Name: At_100uM_NAA__P Parameter: Plant Line Value: WS
  misc_feature: MA Experiment 20000445 PARAMETER Experiment Name: At_100uM_NAA__P Parameter: Timepoint (hr) Value: 6
  misc_feature: MA Experiment 20000445 PARAMETER Experiment Name: At_100uM_NAA__P Parameter: Tissue Value: Aerial
  misc_feature: MA Experiment 20000445 PARAMETER Experiment Name: At_100uM_NAA__P Parameter: Treatment Value: 100uM NAA vs. No Treatment
  misc_feature: MA Experiment ID: 20000573 Result: Up-regulated in Transcription
  misc_feature: MA Experiment 20000573 PARAMETER Experiment Name: At_100uM_ABA_Mutants__P Parameter: Organism Value: A. thaliana
  misc_feature: MA Experiment 20000573 PARAMETER Experiment Name: At_100uM_ABA_Mutants__P Parameter: Plant Line Value: CS22 vs. Ler wt
  misc_feature: MA Experiment 20000573 PARAMETER Experiment Name: At_100uM_ABA_Mutants__P Parameter: Timepoint (hr) Value: N/A
  misc_feature: MA Experiment 20000573 PARAMETER Experiment Name: At_100uM_ABA_Mutants__P Parameter: Tissue Value: Whole Plant
  misc_feature: MA Experiment 20000573 PARAMETER Experiment Name: At_100uM_ABA_Mutants__P Parameter: Treatment Value: None
  misc_feature: MA Experiment ID: 20000574 Result: Up-regulated in Transcription
  misc_feature: MA Experiment 20000574 PARAMETER Experiment Name: At_100uM_ABA_Mutants__P Parameter: Organism Value: A. thaliana
  misc_feature: MA Experiment 20000574 PARAMETER Experiment Name: At_100uM_ABA_Mutants__P Parameter: Plant Line Value: CS23 vs. Ler wt
  misc_feature: MA Experiment 20000574 PARAMETER Experiment Name: At_100uM_ABA_Mutants__P Parameter: Timepoint (hr) Value: N/A
  misc_feature: MA Experiment 20000574 PARAMETER Experiment Name: At_100uM_ABA_Mutants__P Parameter: Tissue Value: Whole Plant
  misc_feature: MA Experiment 20000574 PARAMETER Experiment Name: At_100uM_ABA_Mutants__P Parameter: Treatment Value: None
  misc_feature: MA Experiment ID: 20000794 Result: Up-regulated in Transcription
  misc_feature: MA Experiment 20000794 PARAMETER Experiment Name: At_Petals_P Parameter: Age (day) Value: 23-25 days
  misc_feature: MA Experiment 20000794 PARAMETER Experiment Name: At_Petals_P Parameter: Plant Line Value: WS
  misc_feature: MA Experiment 20000794 PARAMETER Experiment Name: At_Petals_P Parameter: Tissue Value: Petals vs. Whole plant
  misc_feature: MA Experiment ID: 20001451 Result: Down-regulated in Transcription
  misc_feature: MA Experiment 20001451 PARAMETER Experiment Name: At_Far-red-induction_P Parameter: Age (day) Value: 7
  misc_feature: MA Experiment 20001451 PARAMETER Experiment Name: At_Far-red-induction_P Parameter: Light Value: Far-red vs. White
  misc_feature: MA Experiment 20001451 PARAMETER Experiment Name: At_Far-red-induction_P Parameter: Organism Value: A. thaliana
  misc_feature: MA Experiment 20001451 PARAMETER Experiment Name: At_Far-red-induction_P Parameter: Plant Line Value: Columbia
  misc_feature: MA Experiment 20001451 PARAMETER Experiment Name: At_Far-red-induction_P Parameter: Timepoint (hr) Value: 24
  misc_feature: MA Experiment 20001451 PARAMETER Experiment Name: At_Far-red-induction_P Parameter: Tissue Value: Whole Plant
agagagagaaacaagtggctagctagctcgccaaacttcttcaacaatggcggtttcctagggtttgatgtttatatgatcgggaaactctctcatctagatcgcgataactctcttttccatggaaatgcccggtagaagatctaattacactttgcttagtcaattttctgacgatcaggtgtcagtttccgtcaccggagctcctccgcctcactatgattccttgtcgagcgaaaacaggagcaaccataacagcgggaacaccgggaaagctaaggcggagagaggcggatttgattgggatcctagcggtggtggtggtggtgatcataggttgaataatcaaccgaatcgggttgggaataatatgtatgcttcgtctctagggttgcaaaggcaatccagtgggagtagtttcggtgagagctctttgtctggggattattacatgcctacgctttctgcggcggctaacgagatcgaatctgttggatttcctcaagatgatgggtttaggcttggatttggtggtggtggaggagatttgaggatacagatggcggcggactccgctggagggtcttcatctgggaagagctgggcgcagcagacggaggagagttatcagctgcagcttgcattggcgttaaggctttcgtcggaggctacttgtgccgacgatccgaactttctggatcctgtaccggacgagtctgctttacggacttcgccaagttcagccgaaaccgtttcacatcgtttctgggttaatggctgcttatcgtactatgataaagttcctgatgggttttatatgatgaatggtctggatccctatatttggaccttatgcatcgacctgcatgaaagtggtcgcatcccttcaattgaatcattaagagctgttgattctggtgttgattcttcgcttgaagcgatcatagttgataggcgtagtgatccagccttcaaggaacttcacaatagagtccacgacatatcttgtagctgcattaccacaaaagaggttgttgatcagctggcaaagcttatctgcaatcgtatggggggtccagttatcatgggggaagatgagttggttcccatgtggaaggagtgcattgatggtctaaaagaaatctttaaagtggtggttcccataggtagcctctctgttggactctgcagacatcgagctttactcttcaaagtactggctgacataattgatttaccctgtcgaattgccaaaggatgtaaatattgtaatagagacgatgccgcttcgtgccttgtcaggtttgggcttgatagggagtacctggttgatttagtaggaaagccaggtcacttatgggagcctgattccttgctaaatggtccttcatctatctcaatttcttctcctctgcggtttccacgaccaaagccagttgaacccgcagtcgattttaggttactagccaaacaatatttctccgatagccagtctcttaatcttgttttcgatcctgcatcagatgatatgggattctcaatgtttcataggcaatatgataatccgggtggagagaatgacgcattggcagaaaatggtggtgggtctttgccacccagtgctaatatgcctccacagaacatgatgcgtgcgtcaaatcaaattgaagcagcacctatgaatgccccaccaatcagtcagccagttccaaacagggcaaatagggaacttggacttgatggtgatgatatggacatcccgtggtgtgatcttaatataaaagaaaagattggagcaggttcctttggcactgtccaccgtgctgagtggcatggctcggatgttgctgtgaaaattctcatggagcaagacttccatgctgagcgtgttaatgagttcttaagagaggttgcgataatgaaacgccttcgccaccctaacattgttctcttcatgggtgcggtcactcaacctccaaatttgtcaatagtgacagaatatttgtcaagaggtagtttatacagacttttgcataaaagtggagcaagggagcaattagatgagagacgtcgcctgagtatggcttatgatgtggctaagggaatgaattatcttcacaatcgcaatcctccaattgtgcatagagatctaaaatctccaaacttattggttgacaaaaaatatacagtcaaggtttgtgattttggtctctcgcgattgaaggccagcacgtttctttcctcgaagtcagcagctggaacccccgagtggatggcaccagaagtcctgcgagatgagccgtctaatgaaaagtcagatgtgtacagcttcggggtcatcttgtgggagcttgctacattgcaacaaccatggggtaacttaaatccggctcaggttgtagctgcggttggtttcaagtgtaaacggctggagatcccgcgtaatctgaatcctcaggttgcagccataatcgagggttgttggaccaatgagccatggaagcgtccatcatttgcaactataatggacttgctaagaccattgatcaaatcagcggttcctccgcccaaccgctcggatttgtaaaatacccccggtccattcaaaagttgttataatcatgatatgcacatatactctcagcattcttttgctgcccaggagggagacactagttaagatatagctttaaaggtacattcctcatgagctatcaatcatatcctacagaatcccatggtttttatacatgtattatttttgcgatctttgtctgctgttttgttccctttttaatgttgcagattgttaaaatgtacatgactattgtcacagggaggaaaaaaaaatgtagtaatggaaacaatgtgagggatataatctatctatctagtcccaaagggtaagcaatattttgttgttatgtctttgtagcaatgcactgaaagctatatttaattacattgctgtacatttataccgctaaattagttactaagcgaaggtaaaaaagagcagctggtaaatgctgtc

SEQ ID NO: 83411 - protein, 821 aa, Arabidopsis thaliana
  peptide (1)..(821): Ceres Seq. ID no. 12670126
  misc_feature (551)..(805): Pfam Name: Protein kinase domain Pfam Description: Protein kinase domain
  misc_feature (1)..(495): Homolog of NCBI NO: 13936371 NR Description: CTR1-like protein kinase [Rosa hybrid cultivar]
  misc_feature (445)..(821): Homolog of NCBI NO: 13936371 NR Description: CTR1-like protein kinase [Rosa hybrid cultivar]
  misc_feature (154)..(467): Homolog of NCBI NO: 7446384 NR Description: probable protein kinase - tomato
  misc_feature (534)..(821): Homolog of NCBI NO: 7446384 NR Description: probable protein kinase - tomato
  misc_feature (3)..(120): Homolog of NCBI NO: 7446384 NR Description: probable protein kinase - tomato
  misc_feature (154)..(467): Homolog of NCBI NO: 4193948 NR Description: ethylene-inducible CTR1-like protein kinase;
  misc_feature (534)..(821): Homolog of NCBI NO: 4193948 NR Description: ethylene-inducible CTR1-like protein kinase;
  misc_feature (3)..(120): Homolog of NCBI NO: 4193948 NR Description: ethylene-inducible CTR1-like protein kinase;
  misc_feature (154)..(449): Homolog of NCBI NO: 4193950 NR Description: ethylene-inducible CTR1-like protein kinase;
  misc_feature (534)..(821): Homolog of NCBI NO: 4193950 NR Description: ethylene-inducible CTR1-like protein kinase;
MEMPGRRSNYTLLSQFSDDQVSVSVTGAPPPHYDSLSSENRSNHNSGNTGKAKAERGGFDWDPSGGGGGDHRLNNQPNRVGNNMYASSLGLQRQSSGSSFGESSLSGDYYMPTLSAAANEIESVGFPQDDGFRLGFGGGGGDLRIQMAADSAGGSSSGKSWAQQTEESYQLQLALALRLSSEATCADDPNFLDPVPDESALRTSPSSAETVSHRFWVNGCLSYYDKVPDGFYMMNGLDPYIWTLCIDLHESGRIPSIESLRAVDSGVDSSLEAIIVDRRSDPAFKELHNRVHDISCSCITTKEVVDQLAKLICNRMGGPVIMGEDELVPMWKECIDGLKEIFKVVVPIGSLSVGLCRHRALLFKVLADIIDLPCRIAKGCKYCNRDDAASCLVRFGLDREYLVDLVGKPGHLWEPDSLLNGPSSISISSPLRFPRPKPVEPAVDFRLLAKQYFSDSQSLNLVFDPASDDMGFSMFHRQYDNPGGENDALAENGGGSLPPSANMPPQNMMRASNQIEAAPMNAPPISQPVPNRANRELGLDGDDMDIPWCDLNIKEKIGAGSFGTVHRAEWHGSDVAVKILMEQDFHAERVNEFLREVAIMKRLRHPNIVLFMGAVTQPPNLSIVTEYLSRGSLYRLLHKSGAREQLDERRRLSMAYDVAKGMNYLHNRNPPIVHRDLKSPNLLVDKKYTVKVCDFGLSRLKASTFLSSKSAAGTPEWMAPEVLRDEPSNEKSDVYSFGVILWELATLQQPWGNLNPAQVVAAVGFKCKRLEIPRNLNPQVAAIIEGCWTNEPWKRPSFATIMDLLRPLIKSAVPPPNRSDL

SEQ ID NO: 83412 - protein, 819 aa, Arabidopsis thaliana
  peptide (1)..(819): Ceres Seq. ID no. 12670127
  misc_feature (549)..(803): Pfam Name: Protein kinase domain Pfam Description: Protein kinase domain
  misc_feature (1)..(493): Homolog of NCBI NO: 13936371 NR Description: CTR1-like protein kinase [Rosa hybrid cultivar]
  misc_feature (443)..(819): Homolog of NCBI NO: 13936371 NR Description: CTR1-like protein kinase [Rosa hybrid cultivar]
  misc_feature (152)..(465): Homolog of NCBI NO: 7446384 NR Description: probable protein kinase - tomato
  misc_feature (532)..(819): Homolog of NCBI NO: 7446384 NR Description: probable protein kinase - tomato
  misc_feature (1)..(118): Homolog of NCBI NO: 7446384 NR Description: probable protein kinase - tomato
  misc_feature (152)..(465): Homolog of NCBI NO: 4193948 NR Description: ethylene-inducible CTR1-like protein kinase;
  misc_feature (532)..(819): Homolog of NCBI NO: 4193948 NR Description: ethylene-inducible CTR1-like protein kinase;
  misc_feature (1)..(118): Homolog of NCBI NO: 4193948 NR Description: ethylene-inducible CTR1-like protein kinase;
  misc_feature (152)..(447): Homolog of NCBI NO: 4193950 NR Description: ethylene-inducible CTR1-like protein kinase;
  misc_feature (532)..(819): Homolog of NCBI NO: 4193950 NR Description: ethylene-inducible CTR1-like protein kinase;
MPGRRSNYTLLSQFSDDQVSVSVTGAPPPHYDSLSSENRSNHNSGNTGKAKAERGGFDWDPSGGGGGDHRLNNQPNRVGNNMYASSLGLQRQSSGSSFGESSLSGDYYMPTLSAAANEIESVGFPQDDGFRLGFGGGGGDLRIQMAADSAGGSSSGKSWAQQTEESYQLQLALALRLSSEATCADDPNFLDPVPDESALRTSPSSAETVSHRFWVNGCLSYYDKVPDGFYMMNGLDPYIWTLCIDLHESGRIPSIESLRAVDSGVDSSLEAIIVDRRSDPAFKELHNRVHDISCSCITTKEVVDQLAKLICNRMGGPVIMGEDELVPMWKECIDGLKEIFKVVVPIGSLSVGLCRHRALLFKVLADIIDLPCRIAKGCKYCNRDDAASCLVRFGLDREYLVDLVGKPGHLWEPDSLLNGPSSISISSPLRFPRPKPVEPAVDFRLLAKQYFSDSQSLNLVFDPASDDMGFSMFHRQYDNPGGENDALAENGGGSLPPSANMPPQNMMRASNQIEAAPMNAPPISQPVPNRANRELGLDGDDMDIPWCDLNIKEKIGAGSFGTVHRAEWHGSDVAVKILMEQDFHAERVNEFLREVAIMKRLRHPNIVLFMGAVTQPPNLSIVTEYLSRGSLYRLLHKSGAREQLDERRRLSMAYDVAKGMNYLHNRNPPIVHRDLKSPNLLVDKKYTVKVCDFGLSRLKASTFLSSKSAAGTPEWMAPEVLRDEPSNEKSDVYSFGVILWELATLQQPWGNLNPAQVVAAVGFKCKRLEIPRNLNPQVAAIIEGCWTNEPWKRPSFATIMDLLRPLIKSAVPPPNRSDL

SEQ ID NO: 83413 - protein, 738 aa, Arabidopsis thaliana
  peptide (1)..(738): Ceres Seq. ID no. 12670128
  misc_feature (468)..(722): Pfam Name: Protein kinase domain Pfam Description: Protein kinase domain
  misc_feature (1)..(412): Homolog of NCBI NO: 13936371 NR Description: CTR1-like protein kinase [Rosa hybrid cultivar]
  misc_feature (362)..(738): Homolog of NCBI NO: 13936371 NR Description: CTR1-like protein kinase [Rosa hybrid cultivar]
  misc_feature (71)..(384): Homolog of NCBI NO: 7446384 NR Description: probable protein kinase - tomato
  misc_feature (451)..(738): Homolog of NCBI NO: 7446384 NR Description: probable protein kinase - tomato
  misc_feature (1)..(37): Homolog of NCBI NO: 7446384 NR Description: probable protein kinase - tomato
  misc_feature (71)..(384): Homolog of NCBI NO: 4193948 NR Description: ethylene-inducible CTR1-like protein kinase;
  misc_feature (451)..(738): Homolog of NCBI NO: 4193948 NR Description: ethylene-inducible CTR1-like protein kinase;
  misc_feature (1)..(37): Homolog of NCBI NO: 4193948 NR Description: ethylene-inducible CTR1-like protein kinase;
  misc_feature (71)..(366): Homolog of NCBI NO: 4193950 NR Description: ethylene-inducible CTR1-like protein kinase;
  misc_feature (451)..(738): Homolog of NCBI NO: 4193950 NR Description: ethylene-inducible CTR1-like protein kinase;
MYASSLGLQRQSSGSSFGESSLSGDYYMPTLSAAANEIESVGFPQDDGFRLGFGGGGGDLRIQMAADSAGGSSSGKSWAQQTEESYQLQLALALRLSSEATCADDPNFLDPVPDESALRTSPSSAETVSHRFWVNGCLSYYDKVPDGFYMMNGLDPYIWTLCIDLHESGRIPSIESLRAVDSGVDSSLEAIIVDRRSDPAFKELHNRVHDISCSCITTKEVVDQLAKLICNRMGGPVIMGEDELVPMWKECIDGLKEIFKVVVPIGSLSVGLCRHRALLFKVLADIIDLPCRIAKGCKYCNRDDAASCLVRFGLDREYLVDLVGKPGHLWEPDSLLNGPSSISISSPLRFPRPKPVEPAVDFRLLAKQYFSDSQSLNLVFDPASDDMGFSMFHRQYDNPGGENDALAENGGGSLPPSANMPPQNMMRASNQIEAAPMNAPPISQPVPNRANRELGLDGDDMDIPWCDLNIKEKIGAGSFGTVHRAEWHGSDVAVKILMEQDFHAERVNEFLREVAIMKRLRHPNIVLFMGAVTQPPNLSIVTEYLSRGSLYRLLHKSGAREQLDERRRLSMAYDVAKGMNYLHNRNPPIVHRDLKSPNLLVDKKYTVKVCDFGLSRLKASTFLSSKSAAGTPEWMAPEVLRDEPSNEKSDVYSFGVILWELATLQQPWGNLNPAQVVAAVGFKCKRLEIPRNLNPQVAAIIEGCWTNEPWKRPSFATIMDLLRPLIKSAVPPPNRSDL

SEQ ID NO: 83414 - DNA, 1065 bp, Arabidopsis thaliana
  misc_feature (1)..(1065): Ceres Seq. ID no. 12670129
  misc_feature: MA Experiment ID: 20000306 Result: Up-regulated in Transcription
  misc_feature: MA Experiment 20000306 PARAMETER Experiment Name: At_Germinating_Seeds_Sub_P Parameter: Age (hr) Value: 6 vs. 0
  misc_feature: MA Experiment 20000306 PARAMETER Experiment Name: At_Germinating_Seeds_Sub_P Parameter: Organism Value: A. thaliana
  misc_feature: MA Experiment 20000306 PARAMETER Experiment Name: At_Germinating_Seeds_Sub_P Parameter: Plant Line Value: WS
  misc_feature: MA Experiment 20000306 PARAMETER Experiment Name: At_Germinating_Seeds_Sub_P Parameter: Tissue Value: Germinating Seeds
atgaagatgtttattataatgttgatgaccttttcggttatcgcctgtttctacgccggcgttgggaccggtgagccacttgtaccggctctaatcataatgggagattcagttgtcgatgccggcaacaacaaccgcctcaataccctcatcaaagccaattttcctccctatggacgtgacttcttagcccacaatgccactggccgtttctctaacggaaaacttgccacagactttaccgctgagagtttagggttcacttcttacccggtgccgtatcttagccaagaagctaatgggacaaatctgttaaccggagccaatttcgcctctggtgcttccggttatgacgacggaactgccatattttacaatgcaataacattgaaccaacagctgaaaaactacaaagagtaccaaaacaaggtgacaaacattgttggaagcgaaagagcaaataaaatattctcaggcgcgattcatcttctaagcacgggatcaagcgattttcttcaaagctattacatcaacccgatccttaaccggatattcacgcctgatcaatactcagatcgtctcatgaaaccctattccacctttgtccaaaatttgtatgatttaggagctagaaagattggagtgacgacgttaccgccattgggttgtttaccggcggcgataaccttgtttggtgaaaccgggaacaataatacctgcgtggaaagactaaaccaggatgcggtttccttcaataccaaactcaacaacacgtctatgaacttaaccaacaatcttcccggtctgaaattggtcgtctttgacatctataatcctctcttaaacatggccatgaaccctgtcgagaatgggttttttgaatcaagaagagcatgttgtggaaccggaacagtggaaacgtcgtttctatgtaatgcaagatcggtgggtacatgttcgaatgctacgaattacgtgttttgggatggttttcatccatccgaagcagccaatcgtgttatcgcaaataatcttcttgtccaaggaatacccctcatctcttaa

SEQ ID NO: 83415 - protein, 354 aa, Arabidopsis thaliana
  peptide (1)..(354): Ceres Seq. ID no. 12670130
  misc_feature (31)..(345): Pfam Name: GDSL-like Lipase/Acylhydrolase Pfam Description: GDSL-like Lipase/Acylhydrolase
  misc_feature (1)..(354): Homolog of NCBI NO: 15237531 NR Description: putative protein; protein id: At5g03820.1
  misc_feature (1)..(354): Homolog of NCBI NO: 9758010 NR Description: proline-rich protein APG-like [Arabidopsis
  misc_feature (34)..(354): Homolog of NCBI NO: 15237528 NR Description: putative protein; protein id: At5g03810.1
  misc_feature (25)..(354): Homolog of NCBI NO: 15237137 NR Description: GDSL-motif lipase/hydrolase-like protein; protein
  misc_feature (2)..(354): Homolog of NCBI NO: 30693763 NR Description: GDSL-motif lipase/hydrolase protein [Arabidopsis
  misc_feature (19)..(354): Homolog of NCBI NO: 13174242 NR Description: putative proline-rich protein [Oryza sativa]
  misc_feature (3)..(353): Homolog of NCBI NO: 15228189 NR Description: putative APG protein; protein id: At3g16370.1,
  misc_feature (35)..(353): Homolog of NCBI NO: 2062167 NR Description: Proline-rich protein APG isolog [Arabidopsis
  misc_feature (27)..(354): Homolog of NCBI NO: 10638955 NR Description: putative proline-rich protein APG isolog [Cicer
  misc_feature (13)..(292): Homolog of NCBI NO: 11280580 NR Description: hypothetical protein T4D2.30 - Arabidopsis >gi|6630730|emb|CAB64213.1| putative protein [Arabidopsis
MKMFIIMLMTFSVIACFYAGVGTGEPLVPALIIMGDSVVDAGNNNRLNTLIKANFPPYGRDFLAHNATGRFSNGKLATDFTAESLGFTSYPVPYLSQEANGTNLLTGANFASGASGYDDGTAIFYNAITLNQQLKNYKEYQNKVTNIVGSERANKIFSGAIHLLSTGSSDFLQSYYINPILNRIFTPDQYSDRLMKPYSTFVQNLYDLGARKIGVTTLPPLGCLPAAITLFGETGNNNTCVERLNQDAVSFNTKLNNTSMNLTNNLPGLKLVVFDIYNPLLNMAMNPVENGFFESRRACCGTGTVETSFLCNARSVGTCSNATNYVFWDGFHPSEAANRVIANNLLVQGIPLIS

SEQ ID NO: 83416 - protein, 352 aa, Arabidopsis thaliana
  peptide (1)..(352): Ceres Seq. ID no. 12670131
  misc_feature (29)..(343): Pfam Name: GDSL-like Lipase/Acylhydrolase Pfam Description: GDSL-like Lipase/Acylhydrolase
  misc_feature (1)..(352): Homolog of NCBI NO: 15237531 NR Description: putative protein; protein id: At5g03820.1
  misc_feature (1)..(352): Homolog of NCBI NO: 9758010 NR Description: proline-rich protein APG-like [Arabidopsis
  misc_feature (32)..(352): Homolog of NCBI NO: 15237528 NR Description: putative protein; protein id: At5g03810.1
  misc_feature (23)..(352): Homolog of NCBI NO: 15237137 NR Description: GDSL-motif lipase/hydrolase-like protein; protein
  misc_feature (1)..(352): Homolog of NCBI NO: 30693763 NR Description: GDSL-motif lipase/hydrolase protein [Arabidopsis
  misc_feature (17)..(352): Homolog of NCBI NO: 13174242 NR Description: putative proline-rich protein [Oryza sativa]
  misc_feature (1)..(351): Homolog of NCBI NO: 15228189 NR Description: putative APG protein; protein id: At3g16370.1,
  misc_feature (33)..(351): Homolog of NCBI NO: 2062167 NR Description: Proline-rich protein APG isolog [Arabidopsis
  misc_feature (25)..(352): Homolog of NCBI NO: 10638955 NR Description: putative proline-rich protein APG isolog [Cicer
  misc_feature (11)..(290): Homolog of NCBI NO: 11280580 NR Description: hypothetical protein T4D2.30 - Arabidopsis >gi|6630730|emb|CAB64213.1| putative protein [Arabidopsis
MFIIMLMTFSVIACFYAGVGTGEPLVPALIIMGDSVVDAGNNNRLNTLIKANFPPYGRDFLAHNATGRFSNGKLATDFTAESLGFTSYPVPYLSQEANGTNLLTGANFASGASGYDDGTAIFYNAITLNQQLKNYKEYQNKVTNIVGSERANKIFSGAIHLLSTGSSDFLQSYYINPILNRIFTPDQYSDRLMKPYSTFVQNLYDLGARKIGVTTLPPLGCLPAAITLFGETGNNNTCVERLNQDAVSFNTKLNNTSMNLTNNLPGLKLVVFDIYNPLLNMAMNPVENGFFESRRACCGTGTVETSFLCNARSVGTCSNATNYVFWDGFHPSEAANRVIANNLLVQGIPLIS

SEQ ID NO: 83417 - protein, 348 aa, Arabidopsis thaliana
  peptide (1)..(348): Ceres Seq. ID no. 12670132
  misc_feature (25)..(339): Pfam Name: GDSL-like Lipase/Acylhydrolase Pfam Description: GDSL-like Lipase/Acylhydrolase
  misc_feature (1)..(348): Homolog of NCBI NO: 15237531 NR Description: putative protein; protein id: At5g03820.1
  misc_feature (1)..(348): Homolog of NCBI NO: 9758010 NR Description: proline-rich protein APG-like [Arabidopsis
  misc_feature (28)..(348): Homolog of NCBI NO: 15237528 NR Description: putative protein; protein id: At5g03810.1
  misc_feature (19)..(348): Homolog of NCBI NO: 15237137 NR Description: GDSL-motif lipase/hydrolase-like protein; protein
  misc_feature (1)..(348): Homolog of NCBI NO: 30693763 NR Description: GDSL-motif lipase/hydrolase protein [Arabidopsis
  misc_feature (13)..(348): Homolog of NCBI NO: 13174242 NR Description: putative proline-rich protein [Oryza sativa]
  misc_feature (1)..(347): Homolog of NCBI NO: 15228189 NR Description: putative APG protein; protein id: At3g16370.1,
  misc_feature (29)..(347): Homolog of NCBI NO: 2062167 NR Description: Proline-rich protein APG isolog [Arabidopsis
  misc_feature (21)..(348): Homolog of NCBI NO: 10638955 NR Description: putative proline-rich protein APG isolog [Cicer
  misc_feature (7)..(286): Homolog of NCBI NO: 11280580 NR Description: hypothetical protein T4D2.30 - Arabidopsis >gi|6630730|emb|CAB64213.1| putative protein [Arabidopsis
MLMTFSVIACFYAGVGTGEPLVPALIIMGDSVVDAGNNNRLNTLIKANFPPYGRDFLAHNATGRFSNGKLATDFTAESLGFTSYPVPYLSQEANGTNLLTGANFASGASGYDDGTAIFYNAITLNQQLKNYKEYQNKVTNIVGSERANKIFSGAIHLLSTGSSDFLQSYYINPILNRIFTPDQYSDRLMKPYSTFVQNLYDLGARKIGVTTLPPLGCLPAAITLFGETGNNNTCVERLNQDAVSFNTKLNNTSMNLTNNLPGLKLVVFDIYNPLLNMAMNPVENGFFESRRACCGTGTVETSFLCNARSVGTCSNATNYVFWDGFHPSEAANRVIANNLLVQGIPLIS

SEQ ID NO: 83418 - DNA, 2417 bp, Arabidopsis thaliana
  misc_feature (1)..(2417): Ceres Seq. ID no. 12670159
  misc_feature: MA Experiment ID: 20000173 Result: Down-regulated in Transcription
  misc_feature: MA Experiment 20000173 PARAMETER Experiment Name: At_42deg_Heat_P Parameter: Age (day) Value: 14
  misc_feature: MA Experiment 20000173 PARAMETER Experiment Name: At_42deg_Heat_P Parameter: Organism Value: A. thaliana
  misc_feature: MA Experiment 20000173 PARAMETER Experiment Name: At_42deg_Heat_P Parameter: Plant Line Value: WS
  misc_feature: MA Experiment 20000173 PARAMETER Experiment Name: At_42deg_Heat_P Parameter: Temperature (deg C) Value: 42 vs. 22
  misc_feature: MA Experiment 20000173 PARAMETER Experiment Name: At_42deg_Heat_P Parameter: Timepoint (hr) Value: 6
  misc_feature: MA Experiment 20000173 PARAMETER Experiment Name: At_42deg_Heat_P Parameter: Tissue Value: Aerial
  misc_feature: MA Experiment ID: 20000182 Result: Down-regulated in Transcription
  misc_feature: MA Experiment 20000182 PARAMETER Experiment Name: At_2mM_SA_P Parameter: Age (day) Value: 14
  misc_feature: MA Experiment 20000182 PARAMETER Experiment Name: At_2mM_SA_P Parameter: Organism Value: A. thaliana
  misc_feature: MA Experiment 20000182 PARAMETER Experiment Name: At_2mM_SA_P Parameter: Plant Line Value: WS
  misc_feature: MA Experiment 20000182 PARAMETER Experiment Name: At_2mM_SA_P Parameter: Timepoint (hr) Value: 6
  misc_feature: MA Experiment 20000182 PARAMETER Experiment Name: At_2mM_SA_P Parameter: Tissue Value: Aerial
  misc_feature: MA Experiment 20000182 PARAMETER Experiment Name: At_2mM_SA_P Parameter: Treatment Value: 2mM SA vs. No Treatment
  misc_feature: MA Experiment ID: 20000185 Result: Down-regulated in Transcription
  misc_feature: MA Experiment 20000185 PARAMETER Experiment Name: At_Roots__P Parameter: Age (day) Value: 7 vs. 21
  misc_feature: MA Experiment 20000185 PARAMETER Experiment Name: At_Roots__P Parameter: Organism Value: A. thaliana
  misc_feature: MA Experiment 20000185 PARAMETER Experiment Name: At_Roots__P Parameter: Tissue Value: Roots vs. Whole Plant
  misc_feature: MA Experiment ID: 20000227 Result: Down-regulated in Transcription
  misc_feature: MA Experiment 20000227 PARAMETER Experiment Name: At_Root-Tips-vs-Tops_P Parameter: Tissue Value: Root Tips vs. Root Tops
  misc_feature: MA Experiment ID: 20000264 Result: Down-regulated in Transcription
  misc_feature: MA Experiment 20000264 PARAMETER Experiment Name: At_Open_Flower_P Parameter: Age (day) Value: 21
  misc_feature: MA Experiment 20000264 PARAMETER Experiment Name: At_Open_Flower_P Parameter: Plant Line Value: WS
  misc_feature: MA Experiment 20000264 PARAMETER Experiment Name: At_Open_Flower_P Parameter: Tissue Value: Open Flower vs. Whole Plant
  misc_feature: MA Experiment ID: 20000265 Result: Down-regulated in Transcription
  misc_feature: MA Experiment 20000265 PARAMETER Experiment Name: At_Open_Flower_P Parameter: Age (day) Value: 21
  misc_feature: MA Experiment 20000265 PARAMETER Experiment Name: At_Open_Flower_P Parameter: Plant Line Value: WS
  misc_feature: MA Experiment 20000265 PARAMETER Experiment Name: At_Open_Flower_P Parameter: Tissue Value: Closed Flower vs. Whole Plant
  misc_feature: MA Experiment ID: 20000286 Result: Down-regulated in Transcription
  misc_feature: MA Experiment 20000286 PARAMETER Experiment Name: At_Open_Flower_P Parameter: Age (day) Value: 21
  misc_feature: MA Experiment 20000286 PARAMETER Experiment Name: At_Open_Flower_P Parameter: Plant Line Value: WS
  misc_feature: MA Experiment 20000286 PARAMETER Experiment Name: At_Open_Flower_P Parameter: Tissue Value: Half Open vs. Whole Plant
  misc_feature: MA Experiment ID: 20000439 Result: Down-regulated in Transcription
  misc_feature: MA Experiment 20000439 PARAMETER Experiment Name: At_Roots__P Parameter: Age (day) Value: 14 vs. 21
  misc_feature: MA Experiment 20000439 PARAMETER Experiment Name: At_Roots__P Parameter: Organism Value: A. thaliana
  misc_feature: MA Experiment 20000439 PARAMETER Experiment Name: At_Roots__P Parameter: Tissue Value: Roots vs. Whole Plant
  misc_feature: MA Experiment ID: 20000451 Result: Up-regulated in Transcription
  misc_feature: MA Experiment 20000451 PARAMETER Experiment Name: At_CS6879_Shoots-Roots_P Parameter: Age (day) Value: 14
  misc_feature: MA Experiment 20000451 PARAMETER Experiment Name: At_CS6879_Shoots-Roots_P Parameter: Organism Value: A. thaliana
  misc_feature: MA Experiment 20000451 PARAMETER Experiment Name: At_CS6879_Shoots-Roots_P Parameter: Plant Line Value: CS6879 vs. WS
  misc_feature: MA Experiment 20000451 PARAMETER Experiment Name: At_CS6879_Shoots-Roots_P Parameter: Tissue Value: Roots
  misc_feature: MA Experiment ID: 20000495 Result: Up-regulated in Transcription
  misc_feature: MA Experiment 20000495 PARAMETER Experiment Name: At_Guard_Cells_P Parameter: Harvest Date Value: 8/2/2002
  misc_feature: MA Experiment 20000495 PARAMETER Experiment Name: At_Guard_Cells_P Parameter: Organism Value: A. thaliana
  misc_feature: MA Experiment 20000495 PARAMETER Experiment Name: At_Guard_Cells_P Parameter: Tissue Value: Guard Cells vs. Leaves
  misc_feature: MA Experiment ID: 20000573 Result: Down-regulated in Transcription
  misc_feature: MA Experiment 20000573 PARAMETER Experiment Name: At_100uM_ABA_Mutants__P Parameter: Organism Value: A. thaliana
  misc_feature: MA Experiment 20000573 PARAMETER Experiment Name: At_100uM_ABA_Mutants__P Parameter: Plant Line Value: CS22 vs. Ler wt
  misc_feature: MA Experiment 20000573 PARAMETER Experiment Name: At_100uM_ABA_Mutants__P Parameter: Timepoint (hr) Value: N/A
  misc_feature: MA Experiment 20000573 PARAMETER Experiment Name: At_100uM_ABA_Mutants__P Parameter: Tissue Value: Whole Plant
  misc_feature: MA Experiment 20000573 PARAMETER Experiment Name: At_100uM_ABA_Mutants__P Parameter: Treatment Value: None
  misc_feature: MA Experiment ID: 20000574 Result: Down-regulated in Transcription
  misc_feature: MA Experiment 20000574 PARAMETER Experiment Name: At_100uM_ABA_Mutants__P Parameter: Organism Value: A. thaliana
  misc_feature: MA Experiment 20000574 PARAMETER Experiment Name: At_100uM_ABA_Mutants__P Parameter: Plant Line Value: CS23 vs. Ler wt
  misc_feature: MA Experiment 20000574 PARAMETER Experiment Name: At_100uM_ABA_Mutants__P Parameter: Timepoint (hr) Value: N/A
  misc_feature: MA Experiment 20000574 PARAMETER Experiment Name: At_100uM_ABA_Mutants__P Parameter: Tissue Value: Whole Plant
  misc_feature: MA Experiment 20000574 PARAMETER Experiment Name: At_100uM_ABA_Mutants__P Parameter: Treatment Value: None
  misc_feature: MA Experiment ID: 20000575 Result: Up-regulated in Transcription
  misc_feature: MA Experiment 20000575 PARAMETER Experiment Name: At_100uM_ABA_Mutants__P Parameter: Organism Value: A. thaliana
  misc_feature: MA Experiment 20000575 PARAMETER Experiment Name: At_100uM_ABA_Mutants__P Parameter: Plant Line Value: CS22
  misc_feature: MA Experiment 20000575 PARAMETER Experiment Name: At_100uM_ABA_Mutants__P Parameter: Timepoint (hr) Value: 6
  misc_feature: MA Experiment 20000575 PARAMETER Experiment Name: At_100uM_ABA_Mutants__P Parameter: Tissue Value: Whole Plant
  misc_feature: MA Experiment 20000575 PARAMETER Experiment Name: At_100uM_ABA_Mutants__P Parameter: Treatment Value: 1uM ABA vs. No Treatment
  misc_feature: MA Experiment ID: 20000794 Result: Down-regulated in Transcription
  misc_feature: MA Experiment 20000794 PARAMETER Experiment Name: At_Petals_P Parameter: Age (day) Value: 23-25 days
  misc_feature: MA Experiment 20000794 PARAMETER Experiment Name: At_Petals_P Parameter: Plant Line Value: WS
  misc_feature: MA Experiment 20000794 PARAMETER Experiment Name: At_Petals_P Parameter: Tissue Value: Petals vs. Whole plant
  misc_feature: MA Experiment ID: 20001451 Result: Down-regulated in Transcription
  misc_feature: MA Experiment 20001451 PARAMETER Experiment Name: At_Far-red-induction_P Parameter: Age (day) Value: 7
  misc_feature: MA Experiment 20001451 PARAMETER Experiment Name: At_Far-red-induction_P Parameter: Light Value: Far-red vs. White
  misc_feature: MA Experiment 20001451 PARAMETER Experiment Name: At_Far-red-induction_P Parameter: Organism Value: A. thaliana
  misc_feature: MA Experiment 20001451 PARAMETER Experiment Name: At_Far-red-induction_P Parameter: Plant Line Value: Columbia
  misc_feature: MA Experiment 20001451 PARAMETER Experiment Name: At_Far-red-induction_P Parameter: Timepoint (hr) Value: 24
  misc_feature: MA Experiment 20001451 PARAMETER Experiment Name: At_Far-red-induction_P Parameter: Tissue Value: Whole Plant
  misc_feature: MA Experiment ID: 20001556 Result: Down-regulated in Transcription
  misc_feature: MA Experiment 20001556 PARAMETER Experiment Name: At_Drought_Soil_Dry_P Parameter: Age (day) Value: 26
  misc_feature: MA Experiment 20001556 PARAMETER Experiment Name: At_Drought_Soil_Dry_P Parameter: Organism Value: A. thaliana
  misc_feature: MA Experiment 20001556 PARAMETER Experiment Name: At_Drought_Soil_Dry_P Parameter: Plant Line Value: WS
  misc_feature: MA Experiment 20001556 PARAMETER Experiment Name: At_Drought_Soil_Dry_P Parameter: Post Timepoint (hr) Value: None
  misc_feature: MA Experiment 20001556 PARAMETER Experiment Name: At_Drought_Soil_Dry_P Parameter: Post-Treatment Value: None
  misc_feature: MA Experiment 20001556 PARAMETER Experiment Name: At_Drought_Soil_Dry_P Parameter: Timepoint (day) Value: 12
  misc_feature: MA Experiment 20001556 PARAMETER Experiment Name: At_Drought_Soil_Dry_P Parameter: Treatment Value: Drought vs. No Drought
  misc_feature: MA Experiment ID: 20001557 Result: Down-regulated in Transcription
  misc_feature: MA Experiment 20001557 PARAMETER Experiment Name: At_Drought_Soil_Dry_P Parameter: Age (day) Value: 27
  misc_feature: MA Experiment 20001557 PARAMETER Experiment Name: At_Drought_Soil_Dry_P Parameter: Organism Value: A. thaliana
  misc_feature: MA Experiment 20001557 PARAMETER Experiment Name: At_Drought_Soil_Dry_P Parameter: Plant Line Value: WS
  misc_feature: MA Experiment 20001557 PARAMETER Experiment Name: At_Drought_Soil_Dry_P Parameter: Post Timepoint (hr) Value: 3
  misc_feature: MA Experiment 20001557 PARAMETER Experiment Name: At_Drought_Soil_Dry_P Parameter: Post-Treatment Value: Re-Water vs. No Drought
  misc_feature: MA Experiment 20001557 PARAMETER Experiment Name: At_Drought_Soil_Dry_P Parameter: Timepoint (day) Value: 13
  misc_feature: MA Experiment 20001557 PARAMETER Experiment Name: At_Drought_Soil_Dry_P Parameter: Treatment Value: Drought vs. No Drought
agcatccacacacactttgaatgctcaatcaaagcttcttcatagttaaacttccacacaacgtcaaaactcgagaagaagatgaaagagagagattcagagagttttgaatctctctcacatcaagttctcccaaacacttcaaattcaacacacatgatccagatggccatggccaactcaggttcatctgcagccgcacaagccggtcaagaccagcctgaccggtcaaagtggctgcttgactgtcctgaaccacctagcccgtggcatgagctcaaaagacaagtcaaaggctctttcctaaccaaagccaaaaagttcaagtcacttcaaaaacagcctttcccaaaacaaatcctctctgtcctccaagccattttcccaatcttcggttggtgcagaaactataaactcaccatgttcaagaacgatctcatggctggtttaaccctcgctagcctctgcattccgcagagcattggttatgcaactcttgcaaagcttgatcctcaatatggcctatatacgagtgtggtaccaccattgatatatgcattgatggggacatcaagagagatagcaatcggaccggtggctgtagtatctcttcttatatcttcaatgttgcagaaactcatcgatccagaaacagatcccttgggatacaagaaactggtcctaaccacaaccttcttcgccgggatcttccaagcttctttcggtttattcaggttagggtttctggtggattttctgtcgcacgcagccatagttgggttcatgggtggtgcagccattgtaattggactccaacagcttaaaggtttgcttggtatcactaacttcaccaccaacactgacattgtctctgttcttcgagctgtctggagatcttgtcaacaacaatggagccctcacactttcatcctcggatgttctttcctcagttttatccttattactcgcttcatcgggaagaagtataagaagctgttttggctaccggcaatagctccgttgatcgccgtggtagtgtcaacactaatggtgtttctgactaaagccgacgagcatggtgtgaagacagtgaggcacatcaaaggaggtcttaatccaatgtccattcaggatctcgactttaatactcctcatctcggacaaatcgctaaaatcggattaatcattgccattgttgctctaaccgaggcgattgcggtggggaggtcgttcgccggaataaaagggtacagactcgatggaaacaaagaaatggtggccattggatttatgaatgttctcggttccttcacatcttgttacgctgctactggttcattctctcggacggccgtgaattttgcggcaggatgtgagacagcaatgtccaacattgttatggcggttacggtgtttgtagcactcgagtgtctaacgaggcttctctactatactccaatcgccatcctcgcttcaataattctctcagcacttccgggactaatcaacattaacgaggctattcacatttggaaagtcgataaattcgattttcttgctctcattggagctttctttggtgttttgttcgcttccgttgagatcggacttcttgtcgcggtggttatttcgtttgccaagatcatactcatatcaattcgtccagggatagaaacgcttggaagaatgcccgggaccgatacttttacagatactaatcaatatcctatgacggttaagactcccggagtgttgatttttcgtgtcaagtctgcattgttgtgctttgccaatgccagttcaattgaggaaaggattatgggatgggtcgatgaggaagaagaagaagaaaacacaaagagcaatgccaagagaaagatcctctttgtagtccttgatatgtcaagtttgatcaacgtcgatacatcggggattactgctttgctggaactgcataacaaattaatcaaaactggtgttgagctagtgatcgttaacccgaaatggcaagtaatccacaagctgaatcaagcaaagttcgtcgacagaatcggtggcaaagtttacttgacgatcggcgaagctcttgatgcttgctttggattaaaagtttaagaaacagttttcaaaggaccagttgtgttacgggttattgcatgtgatgaatttatgtgagttgttgtgatttaaataatgtgatgcgtgcatgatcatgattaatatttaagtacgtatgtgtaatagagtgcttggtcgtgactgaataaagtcatgcaaactataatgtgaggatcgatgggtgtgtttgtaactcgatagatttggaaataatgtataatatatgtaagtttgagaattattggtgttttgtatgattgttgaaatgttatatagaatcagggatatattttttgggg

SEQ ID NO: 83419 - protein, 677 aa, Arabidopsis thaliana
  peptide (1)..(677): Ceres Seq. ID no. 12670160
  misc_feature (214)..(525): Pfam Name: Sulfate transporter family Pfam Description: Sulfate transporter family
  misc_feature (43)..(672): Homolog of NCBI NO: 1711618 NR Description: Low affinity sulphate transporter 3
  misc_feature (41)..(670): Homolog of NCBI NO: 2967454 NR Description: sulfate transporter [Arabidopsis thaliana]
  misc_feature (41)..(670): Homolog of NCBI NO: 18411773 NR Description: sulfate transporter, putative; protein id: supported by cDNA: gi_1498119, supported by cDNA: gi_20466793 thaliana] >gi|20466794|gb|AAM20714.1| sulfate transporter,
  misc_feature (41)..(670): Homolog of NCBI NO: 7488356 NR Description: sulfate transport protein - Arabidopsis thaliana
  misc_feature (41)..(670): Homolog of NCBI NO: 23270390 NR Description: putative sulfate transporter protein [Arabidopsis
  misc_feature (47)..(672): Homolog of NCBI NO: 24414266 NR Description: Putative sulfate transporter [Oryza sativa
  misc_feature (299)..(634): Homolog of NCBI NO: 24414267 NR Description: Putative sulfate transporter [Oryza sativa
  misc_feature (53)..(275): Homolog of NCBI NO: 24414267 NR Description: Putative sulfate transporter [Oryza sativa
  misc_feature (633)..(676): Homolog of NCBI NO: 24414267 NR Description: Putative sulfate transporter [Oryza sativa
  misc_feature (31)..(677): Homolog of NCBI NO: 13487717 NR Description: sulfate transporter 2 [Lycopersicon esculentum]
MKERDSESFESLSHQVLPNTSNSTHMIQMAMANSGSSAAAQAGQDQPDRSKWLLDCPEPPSPWHELKRQVKGSFLTKAKKFKSLQKQPFPKQILSVLQAIFPIFGWCRNYKLTMFKNDLMAGLTLASLCIPQSIGYATLAKLDPQYGLYTSVVPPLIYALMGTSREIAIGPVAVVSLLISSMLQKLIDPETDPLGYKKLVLTTTFFAGIFQASFGLFRLGFLVDFLSHAAIVGFMGGAAIVIGLQQLKGLLGITNFTTNTDIVSVLRAVWRSCQQQWSPHTFILGCSFLSFILITRFIGKKYKKLFWLPAIAPLIAVVVSTLMVFLTKADEHGVKTVRHIKGGLNPMSIQDLDFNTPHLGQIAKIGLIIAIVALTEAIAVGRSFAGIKGYRLDGNKEMVAIGFMNVLGSFTSCYAATGSFSRTAVNFAAGCETAMSNIVMAVTVFVALECLTRLLYYTPIAILASIILSALPGLININEAIHIWKVDKFDFLALIGAFFGVLFASVEIGLLVAVVISFAKIILISIRPGIETLGRMPGTDTFTDTNQYPMTVKTPGVLIFRVKSALLCFANASSIEERIMGWVDEEEEEENTKSNAKRKILFVVLDMSSLINVDTSGITALLELHNKLIKTGVELVIVNPKWQVIHKLNQAKFVDRIGGKVYLTIGEALDACFGLKV

SEQ ID NO: 83420 - protein, 652 aa, Arabidopsis thaliana
  peptide (1)..(652): Ceres Seq. ID no. 12670161
  misc_feature (189)..(500): Pfam Name: Sulfate transporter family Pfam Description: Sulfate transporter family
  misc_feature (18)..(647): Homolog of NCBI NO: 1711618 NR Description: Low affinity sulphate transporter 3
  misc_feature (16)..(645): Homolog of NCBI NO: 2967454 NR Description: sulfate transporter [Arabidopsis thaliana]
  misc_feature (16)..(645): Homolog of NCBI NO: 18411773 NR Description: sulfate transporter, putative; protein id: supported by cDNA: gi_1498119, supported by cDNA: gi_20466793 thaliana] >gi|20466794|gb|AAM20714.1| sulfate transporter,
  misc_feature (16)..(645): Homolog of NCBI NO: 7488356 NR Description: sulfate transport protein - Arabidopsis thaliana
  misc_feature (16)..(645): Homolog of NCBI NO: 23270390 NR Description: putative sulfate transporter protein [Arabidopsis
  misc_feature (22)..(647): Homolog of NCBI NO: 24414266 NR Description: Putative sulfate transporter [Oryza sativa
  misc_feature (274)..(609): Homolog of NCBI NO: 24414267 NR Description: Putative sulfate transporter [Oryza sativa
  misc_feature (28)..(250): Homolog of NCBI NO: 24414267 NR Description: Putative sulfate transporter [Oryza sativa
  misc_feature (608)..(651): Homolog of NCBI NO: 24414267 NR Description: Putative sulfate transporter [Oryza sativa
  misc_feature (6)..(652): Homolog of NCBI NO: 13487717 NR Description: sulfate transporter 2 [Lycopersicon esculentum]
MIQMAMANSGSSAAAQAGQDQPDRSKWLLDCPEPPSPWHELKRQVKGSFLTKAKKFKSLQKQPFPKQILSVLQAIFPIFGWCRNYKLTMFKNDLMAGLTLASLCIPQSIGYATLAKLDPQYGLYTSVVPPLIYALMGTSREIAIGPVAVVSLLISSMLQKLIDPETDPLGYKKLVLTTTFFAGIFQASFGLFRLGFLVDFLSHAAIVGFMGGAAIVIGLQQLKGLLGITNFTTNTDIVSVLRAVWRSCQQQWSPHTFILGCSFLSFILITRFIGKKYKKLFWLPAIAPLIAVVVSTLMVFLTKADEHGVKTVRHIKGGLNPMSIQDLDFNTPHLGQIAKIGLIIAIVALTEAIAVGRSFAGIKGYRLDGNKEMVAIGFMNVLGSFTSCYAATGSFSRTAVNFAAGCETAMSNIVMAVTVFVALECLTRLLYYTPIAILASIILSALPGLININEAIHIWKVDKFDFLALIGAFFGVLFASVEIGLLVAVVISFAKIILISIRPGIETLGRMPGTDTFTDTNQYPMTVKTPGVLIFRVKSALLCFANASSIEERIMGWVDEEEEEENTKSNAKRKILFVVLDMSSLINVDTSGITALLELHNKLIKTGVELVIVNPKWQVIHKLNQAKFVDRIGGKVYLTIGEALDACFGLKV

SEQ ID NO: 83421 - protein, 649 aa, Arabidopsis thaliana
  peptide (1)..(649): Ceres Seq. ID no. 12670162
  misc_feature (186)..(497): Pfam Name: Sulfate transporter family Pfam Description: Sulfate transporter family
  misc_feature (15)..(644): Homolog of NCBI NO: 1711618 NR Description: Low affinity sulphate transporter 3
  misc_feature (13)..(642): Homolog of NCBI NO: 2967454 NR Description: sulfate transporter [Arabidopsis thaliana]
  misc_feature (13)..(642): Homolog of NCBI NO: 18411773 NR Description: sulfate transporter, putative; protein id: supported by cDNA: gi_1498119, supported by cDNA: gi_20466793 thaliana] >gi|20466794|gb|AAM20714.1| sulfate transporter,
  misc_feature (13)..(642): Homolog of NCBI NO: 7488356 NR Description: sulfate transport protein - Arabidopsis thaliana
  misc_feature (13)..(642): Homolog of NCBI NO: 23270390 NR Description: putative sulfate transporter protein [Arabidopsis
  misc_feature (19)..(644): Homolog of NCBI NO: 24414266 NR Description: Putative sulfate transporter [Oryza sativa
  misc_feature (271)..(606): Homolog of NCBI NO: 24414267 NR Description: Putative sulfate transporter [Oryza sativa
  misc_feature (25)..(247): Homolog of NCBI NO: 24414267 NR Description: Putative sulfate transporter [Oryza sativa
  misc_feature (605)..(648): Homolog of NCBI NO: 24414267 NR Description: Putative sulfate transporter [Oryza sativa
  misc_feature (3)..(649): Homolog of NCBI NO: 13487717 NR Description: sulfate transporter 2 [Lycopersicon esculentum]
MAMANSGSSAAAQAGQDQPDRSKWLLDCPEPPSPWHELKRQVKGSFLTKAKKFKSLQKQPFPKQILSVLQAIFPIFGWCRNYKLTMFKNDLMAGLTLASLCIPQSIGYATLAKLDPQYGLYTSVVPPLIYALMGTSREIAIGPVAVVSLLISSMLQKLIDPETDPLGYKKLVLTTTFFAGIFQASFGLFRLGFLVDFLSHAAIVGFMGGAAIVIGLQQLKGLLGITNFTTNTDIVSVLRAVWRSCQQQWSPHTFILGCSFLSFILITRFIGKKYKKLFWLPAIAPLIAVVVSTLMVFLTKADEHGVKTVRHIKGGLNPMSIQDLDFNTPHLGQIAKIGLIIAIVALTEAIAVGRSFAGIKGYRLDGNKEMVAIGFMNVLGSFTSCYAATGSFSRTAVNFAAGCETAMSNIVMAVTVFVALECLTRLLYYTPIAILASIILSALPGLININEAIHIWKVDKFDFLALIGAFFGVLFASVEIGLLVAVVISFAKIILISIRPGIETLGRMPGTDTFTDTNQYPMTVKTPGVLIFRVKSALLCFANASSIEERIMGWVDEEEEEENTKSNAKRKILFVVLDMSSLINVDTSGITALLELHNKLIKTGVELVIVNPKWQVIHKLNQAKFVDRIGGKVYLTIGEALDACFGLKV

SEQ ID NO: 83422 - DNA, 1003 bp, Arabidopsis thaliana
  misc_feature (1)..(1003): Ceres Seq. ID no. 12670163
  misc_feature: MA Experiment ID: 20000306 Result: Up-regulated in Transcription
  misc_feature: MA Experiment 20000306 PARAMETER Experiment Name: At_Germinating_Seeds_Sub_P Parameter: Age (hr) Value: 6 vs. 0
  misc_feature: MA Experiment 20000306 PARAMETER Experiment Name: At_Germinating_Seeds_Sub_P Parameter: Organism Value: A. thaliana
  misc_feature: MA Experiment 20000306 PARAMETER Experiment Name: At_Germinating_Seeds_Sub_P Parameter: Plant Line Value: WS
  misc_feature: MA Experiment 20000306 PARAMETER Experiment Name: At_Germinating_Seeds_Sub_P Parameter: Tissue Value: Germinating Seeds
  misc_feature: MA Experiment ID: 20000307 Result: Up-regulated in Transcription
  misc_feature: MA Experiment 20000307 PARAMETER Experiment Name: At_Germinating_Seeds_Sub_P Parameter: Age (hr) Value: 24 vs. 0
  misc_feature: MA Experiment 20000307 PARAMETER Experiment Name: At_Germinating_Seeds_Sub_P Parameter: Organism Value: A. thaliana
  misc_feature: MA Experiment 20000307 PARAMETER Experiment Name: At_Germinating_Seeds_Sub_P Parameter: Plant Line Value: WS
  misc_feature: MA Experiment 20000307 PARAMETER Experiment Name: At_Germinating_Seeds_Sub_P Parameter: Tissue Value: Germinating Seeds
  misc_feature: MA Experiment ID: 20000314 Result: Up-regulated in Transcription
  misc_feature: MA Experiment 20000314 PARAMETER Experiment Name: At_14day_Shoots-Roots_Sub_P Parameter: Age (day) Value: 14
  misc_feature: MA Experiment 20000314 PARAMETER Experiment Name: At_14day_Shoots-Roots_Sub_P Parameter: Organism Value: A. thaliana
  misc_feature: MA Experiment 20000314 PARAMETER Experiment Name: At_14day_Shoots-Roots_Sub_P Parameter: Plant Line Value: WS
  misc_feature: MA Experiment 20000314 PARAMETER Experiment Name: At_14day_Shoots-Roots_Sub_P Parameter: Tissue Value: Roots vs. Whole Plant
  misc_feature: MA Experiment ID: 20000328 Result: Down-regulated in Transcription
  misc_feature: MA Experiment 20000328 PARAMETER Experiment Name: At_42deg_Heat_Sub_P Parameter: Age (day) Value: 14
  misc_feature: MA Experiment 20000328 PARAMETER Experiment Name: At_42deg_Heat_Sub_P Parameter: Organism Value: A. thaliana
  misc_feature: MA Experiment 20000328 PARAMETER Experiment Name: At_42deg_Heat_Sub_P Parameter: Plant Line Value: WS
  misc_feature: MA Experiment 20000328 PARAMETER Experiment Name: At_42deg_Heat_Sub_P Parameter: Temperature (deg C) Value: 42 vs. 22
  misc_feature: MA Experiment 20000328 PARAMETER Experiment Name: At_42deg_Heat_Sub_P Parameter: Timepoint (hr) Value: 6
  misc_feature: MA Experiment 20000328 PARAMETER Experiment Name: At_42deg_Heat_Sub_P Parameter: Tissue Value: Aerial
  misc_feature: MA Experiment ID: 20000355 Result: Up-regulated in Transcription
  misc_feature: MA Experiment 20000355 PARAMETER Experiment Name: At_Siliques_Sub_P Parameter: Age (day) Value: 21
  misc_feature: MA Experiment 20000355 PARAMETER Experiment Name: At_Siliques_Sub_P Parameter: Organism Value: A. thaliana
  misc_feature: MA Experiment 20000355 PARAMETER Experiment Name: At_Siliques_Sub_P Parameter: Plant Line Value: WS
  misc_feature: MA Experiment 20000355 PARAMETER Experiment Name: At_Siliques_Sub_P Parameter: Tissue Value: Less Than 5mm Siliques vs. Whole Plant
gagaaatattcagtggtcggagaatggcgtctctcaaaattccagcaaatattcctcttcccgaagaagactccgagcagctccacaaggcattcaaaggatggggaactaatgaagggatgatcatatcaattttggctcatagaaacgcaacgcaacgcagtttcattcgtgccgtttatgctgctaactacaataaggatcttctcaaggaattagacggagagctttctggtgactttgagagagttgtgatgttgtggactcttgatccaacggagagagatgcgtatttggccaatgaatctaccaaattgttcaccaaaaacatttgggtcctagttgaaatcgcttgtactagaccttctcttgagtttttcaagaccaagcaagcataccatgttcgctacaagacctctctcgaggaagatgttgcataccatacatctggaaatatccgaaagctattggttcctcttgtgagcaccttcaggtacgatggaaatgctgatgaggtcaacgtgaagctggctagatccgaagctaagacacttcacaagaagatcactgagaaggcttacactgatgaagatctcatcagaatcttgacaacaaggagcaaagcacagatcaatgcaacactcaatcacttcaaggacaagtttggaagttccattaacaagtttctcaaagaagattcgaacgatgattatgttcaattactcaaaaccgcgatcaaatgcttgacatatccagagaagtactttgagaaggttctacgtcgagccatcaacaggatgggaacagacgagtgggcacttactagagtggtcactacaagagcagaggtcgacctggagcggatcaaagaagaatacttacgcaggaacagtgttcctcttgatcgagccattgctaatgacacttctggtgactacaaggatatgcttctcgcccttcttggacatgaccatgcttgaaacaacatcatcgtttcatagtc

SEQ ID NO: 83423 - protein, 325 aa, Arabidopsis thaliana
  peptide (1)..(325): Ceres Seq. ID no. 12670164
  misc_feature (20)..(87): Pfam Name: Annexin Pfam Description: Annexin
  misc_feature (8)..(325): Homolog of NCBI NO: 15238094 NR Description: annexin -like protein; protein id: At5g10220.1,
  misc_feature (8)..(325): Homolog of NCBI NO: 12667518 NR Description: calcium-binding protein annexin 6 [Arabidopsis
  misc_feature (8)..(325): Homolog of NCBI NO: 15238105 NR Description: annexin -like protein; protein id: At5g10230.1,
  misc_feature (8)..(325): Homolog of NCBI NO: 12667522 NR Description: calcium-binding protein annexin 7 [Arabidopsis
  misc_feature (8)..(325): Homolog of NCBI NO: 15238320 NR Description: annexin; protein id: At5g65020.1, supported by supported by cDNA: gi_4959107 [Arabidopsis thaliana]
  misc_feature (8)..(325): Homolog of NCBI NO: 4580920 NR Description: vacuole-associated annexin VCaB42 [Nicotiana
  misc_feature (8)..(325): Homolog of NCBI NO: 3928134 NR Description: annexin P38 [Capsicum annuum]
  misc_feature (15)..(323): Homolog of NCBI NO: 7441509 NR Description: annexin - alfalfa (fragment)
  misc_feature (10)..(321): Homolog of NCBI NO: 7441511 NR Description: annexin 2 - upland cotton (fragment)
  misc_feature (8)..(325): Homolog of NCBI NO: 7441508 NR Description: annexin, isoform P35 - tomato
EIFSGRRMASLKIPANIPLPEEDSEQLHKAFKGWGTNEGMIISILAHRNATQRSFIRAVYAANYNKDLLKELDGELSGDFERVVMLWTLDPTERDAYLANESTKLFTKNIWVLVEIACTRPSLEFFKTKQAYHVRYKTSLEEDVAYHTSGNIRKLLVPLVSTFRYDGNADEVNVKLARSEAKTLHKKITEKAYTDEDLIRILTTRSKAQINATLNHFKDKFGSSINKFLKEDSNDDYVQLLKTAIKCLTYPEKYFEKVLRRAINRMGTDEWALTRVVTTRAEVDLERIKEEYLRRNSVPLDRAIANDTSGDYKDMLLALLGHDHA

SEQ ID NO: 83424 - protein, 318 aa, Arabidopsis thaliana
  peptide (1)..(318): Ceres Seq. ID no. 12670165
  misc_feature (13)..(80): Pfam Name: Annexin Pfam Description: Annexin
  misc_feature (1)..(318): Homolog of NCBI NO: 15238094 NR Description: annexin -like protein; protein id: At5g10220.1,
  misc_feature (1)..(318): Homolog of NCBI NO: 12667518 NR Description: calcium-binding protein annexin 6 [Arabidopsis
  misc_feature (1)..(318): Homolog of NCBI NO: 15238105 NR Description: annexin -like protein; protein id: At5g10230.1,
  misc_feature (1)..(318): Homolog of NCBI NO: 12667522 NR Description: calcium-binding protein annexin 7 [Arabidopsis
  misc_feature (1)..(318): Homolog of NCBI NO: 15238320 NR Description: annexin; protein id: At5g65020.1, supported by supported by cDNA: gi_4959107 [Arabidopsis thaliana]
  misc_feature (1)..(318): Homolog of NCBI NO: 4580920 NR Description: vacuole-associated annexin VCaB42 [Nicotiana
  misc_feature (1)..(318): Homolog of NCBI NO: 3928134 NR Description: annexin P38 [Capsicum annuum]
  misc_feature (8)..(316): Homolog of NCBI NO: 7441509 NR Description: annexin - alfalfa (fragment)
  misc_feature (3)..(314): Homolog of NCBI NO: 7441511 NR Description: annexin 2 - upland cotton (fragment)
  misc_feature (1)..(318): Homolog of NCBI NO: 7441508 NR Description: annexin, isoform P35 - tomato
MASLKIPANIPLPEEDSEQLHKAFKGWGTNEGMIISILAHRNATQRSFIRAVYAANYNKDLLKELDGELSGDFERVVMLWTLDPTERDAYLANESTKLFTKNIWVLVEIACTRPSLEFFKTKQAYHVRYKTSLEEDVAYHTSGNIRKLLVPLVSTFRYDGNADEVNVKLARSEAKTLHKKITEKAYTDEDLIRILTTRSKAQINATLNHFKDKFGSSINKFLKEDSNDDYVQLLKTAIKCLTYPEKYFEKVLRRAINRMGTDEWALTRVVTTRAEVDLERIKEEYLRRNSVPLDRAIANDTSGDYKDMLLALLGHDHA

SEQ ID NO: 83425 - protein, 286 aa, Arabidopsis thaliana
  peptide (1)..(286): Ceres Seq. ID no. 12670166
  misc_feature (1)..(48): Pfam Name: Annexin Pfam Description: Annexin
  misc_feature (1)..(286): Homolog of NCBI NO: 15238094 NR Description: annexin -like protein; protein id: At5g10220.1,
  misc_feature (1)..(286): Homolog of NCBI NO: 12667518 NR Description: calcium-binding protein annexin 6 [Arabidopsis
  misc_feature (1)..(286): Homolog of NCBI NO: 15238105 NR Description: annexin -like protein; protein id: At5g10230.1,
  misc_feature (1)..(286): Homolog of NCBI NO: 12667522 NR Description: calcium-binding protein annexin 7 [Arabidopsis
  misc_feature (1)..(286): Homolog of NCBI NO: 15238320 NR Description: annexin; protein id: At5g65020.1, supported by supported by cDNA: gi_4959107 [Arabidopsis thaliana]
  misc_feature (1)..(286): Homolog of NCBI NO: 4580920 NR Description: vacuole-associated annexin VCaB42 [Nicotiana
  misc_feature (1)..(286): Homolog of NCBI NO: 3928134 NR Description: annexin P38 [Capsicum annuum]
  misc_feature (1)..(284): Homolog of NCBI NO: 7441509 NR Description: annexin - alfalfa (fragment)
  misc_feature (1)..(282): Homolog of NCBI NO: 7441511 NR Description: annexin 2 - upland cotton (fragment)
  misc_feature (1)..(286): Homolog of NCBI NO: 7441508 NR Description: annexin, isoform P35 - tomato
MIISILAHRNATQRSFIRAVYAANYNKDLLKELDGELSGDFERVVMLWTLDPTERDAYLANESTKLFTKNIWVLVEIACTRPSLEFFKTKQAYHVRYKTSLEEDVAYHTSGNIRKLLVPLVSTFRYDGNADEVNVKLARSEAKTLHKKITEKAYTDEDLIRILTTRSKAQINATLNHFKDKFGSSINKFLKEDSNDDYVQLLKTAIKCLTYPEKYFEKVLRRAINRMGTDEWALTRVVTTRAEVDLERIKEEYLRRNSVPLDRAIANDTSGDYKDMLLALLGHDHA

SEQ ID NO: 83426 - DNA, 1715 bp, Arabidopsis thaliana
  misc_feature (1)..(1715): Ceres Seq. ID no. 12670167
  misc_feature: MA Experiment ID: 20000495 Result: Up-regulated in Transcription
  misc_feature: MA Experiment 20000495 PARAMETER Experiment Name: At_Guard_Cells_P Parameter: Harvest Date Value: 8/2/2002
  misc_feature: MA Experiment 20000495 PARAMETER Experiment Name: At_Guard_Cells_P Parameter: Organism Value: A. thaliana
  misc_feature: MA Experiment 20000495 PARAMETER Experiment Name: At_Guard_Cells_P Parameter: Tissue Value: Guard Cells vs. Leaves
  misc_feature: MA Experiment ID: 20000794 Result: Up-regulated in Transcription
  misc_feature: MA Experiment 20000794 PARAMETER Experiment Name: At_Petals_P Parameter: Age (day) Value: 23-25 days
  misc_feature: MA Experiment 20000794 PARAMETER Experiment Name: At_Petals_P Parameter: Plant Line Value: WS
  misc_feature: MA Experiment 20000794 PARAMETER Experiment Name: At_Petals_P Parameter: Tissue Value: Petals vs. Whole plant
gtctgagagaaaaggaaagcgatcgagaaagacgtaatttgatcatcggagtaaaagatattgttcgacagtgggactcccgggaacgaagatggcgatggcatcattcgggcagctaaatctcgaggaacctcctccaatctggggatctcgcagcgttgattgctttgagaagctcgaacaaattggtgaaggcacttacggtcaagtttacatggctaaagaaatcaaaactggtgaaattgtggctctcaaaaagatacgtatggacaatgaaagagaagggtttcctataacagctattagagagataaagattctgaagaagcttcatcatgaaaatgtcattcagctgaaagagattgtgacttcaccaggtcgggacagggatgaccaaggaaagccagataataacaaatacaagggtggcatctacatggtttttgagtacatggatcatgatttgactggactagcagatcgtcctggactgagatttactgttcctcaaattaagtgttacatgaagcaattgcttaccgggcttcactattgtcatgtgaatcaagtgcttcaccgtgatataaaaggctcaaatctccttatcgacaatgagggaaatttaaagctggctgattttgggcttgcacggtcgtattctcatgatcatactggaaatcttacaaatcgtgtcatcacattgtggtataggccccctgaattactacttggggctacaaaatatggcccagcaattgacatgtggtcggttggttgcatatttgccgaacttttgcatgcaaaaccaatcttacctgggaaaaatgagcaagaacaattgaacaagatatttgagctttgtggatcacctgatgaaaaactttggcctggggtttccaagatgccttggttcaacaatttcaagcctgcacggcccttgaagaggcgtgtaagagagttcttcagacactttgatcggcatgctcttgaattactggagaaaatgttggtgcttgatccagcacagagaatatcggcaaaggatgctcttgatgccgagtacttttggactgatccgttgccatgtgacccaaagagtctgcccacatatgaatcatcacatgagttccagacaaagaaaaagcggcaacagcagcgccaaaacgaggaagcagcaaaaagacagaaactgcagcatccaccgctgcagcactctcgcttacccccattacaacatggtggacagtctcatgctgctccacattggcctgcaggtccaaaccatcccactaacaacgcaccaccacaagtacctgctggacccagccacaacttctatgggaagccgcgtggtccacctggtccaaaccgctaccctcctagcggaaaccagagcgggggttataatcaaagccgaggaggttacagcagtggatcatatcctccacaaggacgtggagctccttatgtggctggtcctagagggcctagtggtggcccgtacggggttggacctcctaactacacacaaggtggtcagtatggtggctctggtagctcgggaagagggcagaatcagagaaaccagcaatacggatggcaacagtaaagagctctaatgatttgttgatctgatatcttactcttacatttaatgtgatactagtaataaactaataatagattaatatgagaaactgaatctctttcttttc

SEQ ID NO: 83427 - protein, 505 aa, Arabidopsis thaliana
  peptide (1)..(505): Ceres Seq. ID no. 12670168
  misc_feature (26)..(325): Pfam Name: Protein kinase domain Pfam Description: Protein kinase domain
  misc_feature (1)..(505): Homolog of NCBI NO: 15238114 NR Description: Cyclin-dependent kinase C;1; protein id: supported by cDNA: gi_14030692 [Arabidopsis thaliana]
  misc_feature (1)..(504): Homolog of NCBI NO: 15238314 NR Description: Cyclin-dependent kinase C;2; protein id: supported by cDNA: gi_13430443, supported by cDNA: gi_17064745
  misc_feature (1)..(504): Homolog of NCBI NO: 17064746 NR Description: cdc2-like protein kinase [Arabidopsis thaliana]
  misc_feature (1)..(505): Homolog of NCBI NO: 15215944 NR Description: cyclin dependent kinase C [Lycopersicon
  misc_feature (1)..(505): Homolog of NCBI NO: 7488728 NR Description: cdc2-like protein kinase cdc2MsC - alfalfa
  misc_feature (1)..(502): Homolog of NCBI NO: 26190145 NR Description: putative cyclin dependent kinase [Physcomitrella
  misc_feature (1)..(335): Homolog of NCBI NO: 34905748 NR Description: cell division cycle 2-like protein kinase
  misc_feature (1)..(499): Homolog of NCBI NO: 28828850 NR Description: similar to Arabidopsis thaliana (Mouse-ear
  misc_feature (18)..(363): Homolog of NCBI NO: 34914694 NR Description: putative CRK1 protein [Oryza sativa (japonica group)] >gi|15528648|dbj|BAB64715.1| putative CRK1 protein [Oryza
  misc_feature (18)..(448): Homolog of NCBI NO: 10443347 NR Description: CDC2L5 protein kinase [Sphaerechinus granularis]
MAMASFGQLNLEEPPPIWGSRSVDCFEKLEQIGEGTYGQVYMAKEIKTGEIVALKKIRMDNEREGFPITAIREIKILKKLHHENVIQLKEIVTSPGRDRDDQGKPDNNKYKGGIYMVFEYMDHDLTGLADRPGLRFTVPQIKCYMKQLLTGLHYCHVNQVLHRDIKGSNLLIDNEGNLKLADFGLARSYSHDHTGNLTNRVITLWYRPPELLLGATKYGPAIDMWSVGCIFAELLHAKPILPGKNEQEQLNKIFELCGSPDEKLWPGVSKMPWFNNFKPARPLKRRVREFFRHFDRHALELLEKMLVLDPAQRISAKDALDAEYFWTDPLPCDPKSLPTYESSHEFQTKKKRQQQRQNEEAAKRQKLQHPPLQHSRLPPLQHGGQSHAAPHWPAGPNHPTNNAPPQVPAGPSHNFYGKPRGPPGPNRYPPSGNQSGGYNQSRGGYSSGSYPPQGRGAPYVAGPRGPSGGPYGVGPPNYTQGGQYGGSGSSGRGQNQRNQQYGWQQ

SEQ ID NO: 83428 - protein, 503 aa, Arabidopsis thaliana
  peptide (1)..(503): Ceres Seq. ID no. 12670169
  misc_feature (24)..(323): Pfam Name: Protein kinase domain Pfam Description: Protein kinase domain
  misc_feature (1)..(503): Homolog of NCBI NO: 15238114 NR Description: Cyclin-dependent kinase C;1; protein id: supported by cDNA: gi_14030692 [Arabidopsis thaliana]
  misc_feature (1)..(502): Homolog of NCBI NO: 15238314 NR Description: Cyclin-dependent kinase C;2; protein id: supported by cDNA: gi_13430443, supported by cDNA: gi_17064745
  misc_feature (1)..(502): Homolog of NCBI NO: 17064746 NR Description: cdc2-like protein kinase [Arabidopsis thaliana]
  misc_feature (1)..(503): Homolog of NCBI NO: 15215944 NR Description: cyclin dependent kinase C [Lycopersicon
  misc_feature (1)..(503): Homolog of NCBI NO: 7488728 NR Description: cdc2-like protein kinase cdc2MsC - alfalfa
  misc_feature (1)..(500): Homolog of NCBI NO: 26190145 NR Description: putative cyclin dependent kinase [Physcomitrella
  misc_feature (1)..(333): Homolog of NCBI NO: 34905748 NR Description: cell division cycle 2-like protein kinase
  misc_feature (1)..(497): Homolog of NCBI NO: 28828850 NR Description: similar to Arabidopsis thaliana (Mouse-ear
  misc_feature (16)..(361): Homolog of NCBI NO: 34914694 NR Description: putative CRK1 protein [Oryza sativa (japonica group)] >gi|15528648|dbj|BAB64715.1| putative CRK1 protein [Oryza
  misc_feature (16)..(446): Homolog of NCBI NO: 10443347 NR Description: CDC2L5 protein kinase [Sphaerechinus granularis]
MASFGQLNLEEPPPIWGSRSVDCFEKLEQIGEGTYGQVYMAKEIKTGEIVALKKIRMDNEREGFPITAIREIKILKKLHHENVIQLKEIVTSPGRDRDDQGKPDNNKYKGGIYMVFEYMDHDLTGLADRPGLRFTVPQIKCYMKQLLTGLHYCHVNQVLHRDIKGSNLLIDNEGNLKLADFGLARSYSHDHTGNLTNRVITLWYRPPELLLGATKYGPAIDMWSVGCIFAELLHAKPILPGKNEQEQLNKIFELCGSPDEKLWPGVSKMPWFNNFKPARPLKRRVREFFRHFDRHALELLEKMLVLDPAQRISAKDALDAEYFWTDPLPCDPKSLPTYESSHEFQTKKKRQQQRQNEEAAKRQKLQHPPLQHSRLPPLQHGGQSHAAPHWPAGPNHPTNNAPPQVPAGPSHNFYGKPRGPPGPNRYPPSGNQSGGYNQSRGGYSSGSYPPQGRGAPYVAGPRGPSGGPYGVGPPNYTQGGQYGGSGSSGRGQNQRNQQYGWQQ

SEQ ID NO: 83429 - protein, 464 aa, Arabidopsis thaliana
  peptide (1)..(464): Ceres Seq. ID no. 12670170
  misc_feature (1)..(284): Pfam Name: Protein kinase domain Pfam Description: Protein kinase domain
  misc_feature (1)..(464): Homolog of NCBI NO: 15238114 NR Description: Cyclin-dependent kinase C;1; protein id: supported by cDNA: gi_14030692 [Arabidopsis thaliana]
  misc_feature (1)..(463): Homolog of NCBI NO: 15238314 NR Description: Cyclin-dependent kinase C;2; protein id: supported by cDNA: gi_13430443, supported by cDNA: gi_17064745
  misc_feature (1)..(463): Homolog of NCBI NO: 17064746 NR Description: cdc2-like protein kinase [Arabidopsis thaliana]
  misc_feature (1)..(464): Homolog of NCBI NO: 15215944 NR Description: cyclin dependent kinase C [Lycopersicon
  misc_feature (1)..(464): Homolog of NCBI NO: 7488728 NR Description: cdc2-like protein kinase cdc2MsC - alfalfa
  misc_feature (1)..(461): Homolog of NCBI NO: 26190145 NR Description: putative cyclin dependent kinase [Physcomitrella
  misc_feature (1)..(294): Homolog of NCBI NO: 34905748 NR Description: cell division cycle 2-like protein kinase
  misc_feature (1)..(458): Homolog of NCBI NO: 28828850 NR Description: similar to Arabidopsis thaliana (Mouse-ear
  misc_feature (1)..(322): Homolog of NCBI NO: 34914694 NR Description: putative CRK1 protein [Oryza sativa (japonica group)] >gi|15528648|dbj|BAB64715.1| putative CRK1 protein [Oryza
  misc_feature (1)..(407): Homolog of NCBI NO: 10443347 NR Description: CDC2L5 protein kinase [Sphaerechinus granularis]
MAKEIKTGEIVALKKIRMDNEREGFPITAIREIKILKKLHHENVIQLKEIVTSPGRDRDDQGKPDNNKYKGGIYMVFEYMDHDLTGLADRPGLRFTVPQIKCYMKQLLTGLHYCHVNQVLHRDIKGSNLLIDNEGNLKLADFGLARSYSHDHTGNLTNRVITLWYRPPELLLGATKYGPAIDMWSVGCIFAELLHAKPILPGKNEQEQLNKIFELCGSPDEKLWPGVSKMPWFNNFKPARPLKRRVREFFRHFDRHALELLEKMLVLDPAQRISAKDALDAEYFWTDPLPCDPKSLPTYESSHEFQTKKKRQQQRQNEEAAKRQKLQHPPLQHSRLPPLQHGGQSHAAPHWPAGPNHPTNNAPPQVPAGPSHNFYGKPRGPPGPNRYPPSGNQSGGYNQSRGGYSSGSYPPQGRGAPYVAGPRGPSGGPYGVGPPNYTQGGQYGGSGSSGRGQNQRNQQYGWQQ

SEQ ID NO: 83430 - DNA, 1956 bp, Arabidopsis thaliana
  misc_feature (1)..(1956): Ceres Seq. ID no. 12670175
  misc_feature: MA Experiment ID: 20000451 Result: Down-regulated in Transcription
  misc_feature: MA Experiment 20000451 PARAMETER Experiment Name: At_CS6879_Shoots-Roots_P Parameter: Age (day) Value: 14
  misc_feature: MA Experiment 20000451 PARAMETER Experiment Name: At_CS6879_Shoots-Roots_P Parameter: Organism Value: A. thaliana
  misc_feature: MA Experiment 20000451 PARAMETER Experiment Name: At_CS6879_Shoots-Roots_P Parameter: Plant Line Value: CS6879 vs. WS
  misc_feature: MA Experiment 20000451 PARAMETER Experiment Name: At_CS6879_Shoots-Roots_P Parameter: Tissue Value: Roots
  misc_feature: MA Experiment ID: 20000527 Result: Up-regulated in Transcription
  misc_feature: MA Experiment 20000527 PARAMETER Experiment Name: At_10percent_PEG_P Parameter: Age (day) Value: 20
  misc_feature: MA Experiment 20000527 PARAMETER Experiment Name: At_10percent_PEG_P Parameter: Organism Value: A. thaliana
  misc_feature: MA Experiment 20000527 PARAMETER Experiment Name: At_10percent_PEG_P Parameter: Plant Line Value: WS
  misc_feature: MA Experiment 20000527 PARAMETER Experiment Name: At_10percent_PEG_P Parameter: Timepoint (day) Value: 20
  misc_feature: MA Experiment 20000527 PARAMETER Experiment Name: At_10percent_PEG_P Parameter: Tissue Value: Whole Plant
  misc_feature: MA Experiment 20000527 PARAMETER Experiment Name: At_10percent_PEG_P Parameter: Treatment Value: 10percent PEG vs. No Treatment
  misc_feature: MA Experiment ID: 20001556 Result: Up-regulated in Transcription
  misc_feature: MA Experiment 20001556 PARAMETER Experiment Name: At_Drought_Soil_Dry_P Parameter: Age (day) Value: 26
  misc_feature: MA Experiment 20001556 PARAMETER Experiment Name: At_Drought_Soil_Dry_P Parameter: Organism Value: A. thaliana
  misc_feature: MA Experiment 20001556 PARAMETER Experiment Name: At_Drought_Soil_Dry_P Parameter: Plant Line Value: WS
  misc_feature: MA Experiment 20001556 PARAMETER Experiment Name: At_Drought_Soil_Dry_P Parameter: Post Timepoint (hr) Value: None
  misc_feature: MA Experiment 20001556 PARAMETER Experiment Name: At_Drought_Soil_Dry_P Parameter: Post-Treatment Value: None
  misc_feature: MA Experiment 20001556 PARAMETER Experiment Name: At_Drought_Soil_Dry_P Parameter: Timepoint (day) Value: 12
  misc_feature: MA Experiment 20001556 PARAMETER Experiment Name: At_Drought_Soil_Dry_P Parameter: Treatment Value: Drought vs. No Drought
atggccaactcaattctgttattttcctttgttttggttctcccttttgtctgttcagttcaatttaacatatctcgttttggatcagatgtttctgaaatagcataccaaggagatgcaagagcaaatggggctgttgagcttaccaacattgactacacatgccgtgccggttgggctacttatggtaagcaggttcctttatggaatccaggtaccagtaagccttcggattttagtacgcgtttctccttcagaattgatacccgtaatgttgggtatggtaattacggtcatgggtttgctttctttctagctccagcgagaatccaattgcctcccaactcagctggtggtttcttgggtctattcaatggaaccaataatcagtcttctgctttcccacttgtttatgtcgagttcgacacatttactaatccagaatgggatcctctcgatgtcaaatcccatgtaggaatcaacaacaactctcttgtttcttctaactacacttcttggaatgcaacgtcacacaaccaagatataggccgtgtcctgatattctatgattccgctagaagaaacttgagtgtctcttggacttacgacttaacatctgatcctctggagaattcaagcctatcttacatcattgatctctcaaaggtactgccatcagaagttacaattgggttttctgcgacatctggaggggtcaccgagggaaatagacttctgtcatgggagttcagttcaagcctggagctaatagatataaagaaaagtcagaatgacaagaaggggatgataattggtatttcagtttctgggttcgttttgctgaccttttttattacctcgctcatcgtcttcttgaaacggaagcagcagaagaagaaagcagaggagacagaaaacttaacatcgataaatgaagatctcgaaagaggagcaggaccaagaaagtttacttataaagatcttgcatcagctgcaaacaatttcgcagatgataggaagctaggggaaggagggtttggagcggtttatagagggtacttaaacagcttagatatgatggttgcgataaagaagtttgcgggtgggtctaagcagggaaaaagagagttcgtaaccgaagtaaagataatcagcagtttgagacatcgaaaccttgtgcaactcattggttggtgccatgagaaagatgagtttctaatgatatacgagttcatgccaaatggtagccttgacgcccatctatttggtaaaaagccgcatctcgcttggcatgtgagatgcaaaataactctcggtctcgcctctgcactgctttatcttcacgaggagtgggagcagtgtgttgtacacagagacatcaaggcgagtaatgtgatgctcgactccaatttcaatgccaagcttggtgatttcgggttggctagattgatggaccacgagctaggtccacagactacagggttagcaggaacatttggttacatggctcctgaatacataagcaccggaagggcgagcaaagaatctgatgtgtatagctttggagtggttacattagagattgttacaggaagaaaatctgtggatcgaagacaaggaagagtagagcctgtaacaaaccttgtagagaaaatgtgggacctttatggaaaaggagaagttattacagctatcgacgagaaactcaggatcggtggtttcgatgagaaacaagcagaatgtctcatgattgtaggattatggtgtgctcatcctgatgtaaacacgaggccttcaataaaacaagcaatccaagtcttgaatcttgaagcaccagtgcctcatcttccgaccaaaatgcctgtcgcaacatatcatgtatcctcttcgaatactacatcggtaagctctggtggagctacggtaacgttttcaagtgctcaacatggtcgttga

SEQ ID NO: 83431 - protein, 651 aa, Arabidopsis thaliana
  peptide (1)..(651): Ceres Seq. ID no. 12670176
  misc_feature (1)..(651): Homolog of NCBI NO: 15239088 NR Description: receptor protein kinase-like protein; protein id:
  misc_feature (6)..(625): Homolog of NCBI NO: 33146777 NR Description: putative lectin-like protein kinase [Oryza sativa
  misc_feature (5)..(620): Homolog of NCBI NO: 38112431 NR Description: lectin-like receptor kinase 1;1 [Medicago
  misc_feature (19)..(643): Homolog of NCBI NO: 15289871 NR Description: putative receptor protein kinase-like protein
  misc_feature (112)..(650): Homolog of NCBI NO: 33146780 NR Description: putative lectin-like protein kinase [Oryza sativa
  misc_feature (261)..(618): Homolog of NCBI NO: 15241048 NR Description: serine/threonine-specific kinase like protein;
  misc_feature (5)..(264): Homolog of NCBI NO: 15241048 NR Description: serine/threonine-specific kinase like protein;
  misc_feature (270)..(630): Homolog of NCBI NO: 15242646 NR Description: receptor like protein kinase; protein id: supported by cDNA: gi_20260625 [Arabidopsis thaliana]
  misc_feature (12)..(255): Homolog of NCBI NO: 15242646 NR Description: receptor like protein kinase; protein id: supported by cDNA: gi_20260625 [Arabidopsis thaliana]
  misc_feature (5)..(650): Homolog of NCBI NO: 28416699 NR Description: At3g53810 [Arabidopsis thaliana]
MANSILLFSFVLVLPFVCSVQFNISRFGSDVSEIAYQGDARANGAVELTNIDYTCRAGWATYGKQVPLWNPGTSKPSDFSTRFSFRIDTRNVGYGNYGHGFAFFLAPARIQLPPNSAGGFLGLFNGTNNQSSAFPLVYVEFDTFTNPEWDPLDVKSHVGINNNSLVSSNYTSWNATSHNQDIGRVLIFYDSARRNLSVSWTYDLTSDPLENSSLSYIIDLSKVLPSEVTIGFSATSGGVTEGNRLLSWEFSSSLELIDIKKSQNDKKGMIIGISVSGFVLLTFFITSLIVFLKRKQQKKKAEETENLTSINEDLERGAGPRKFTYKDLASAANNFADDRKLGEGGFGAVYRGYLNSLDMMVAIKKFAGGSKQGKREFVTEVKIISSLRHRNLVQLIGWCHEKDEFLMIYEFMPNGSLDAHLFGKKPHLAWHVRCKITLGLASALLYLHEEWEQCVVHRDIKASNVMLDSNFNAKLGDFGLARLMDHELGPQTTGLAGTFGYMAPEYISTGRASKESDVYSFGVVTLEIVTGRKSVDRRQGRVEPVTNLVEKMWDLYGKGEVITAIDEKLRIGGFDEKQAECLMIVGLWCAHPDVNTRPSIKQAIQVLNLEAPVPHLPTKMPVATYHVSSSNTTSVSSGGATVTFSSAQHGR

SEQ ID NO: 83432 - protein, 383 aa, Arabidopsis thaliana
  peptide (1)..(383): Ceres Seq. ID no. 12670177
  misc_feature (1)..(383): Homolog of NCBI NO: 15239088 NR Description: receptor protein kinase-like protein; protein id:
  misc_feature (1)..(357): Homolog of NCBI NO: 33146777 NR Description: putative lectin-like protein kinase [Oryza sativa
  misc_feature (1)..(352): Homolog of NCBI NO: 38112431 NR Description: lectin-like receptor kinase 1;1 [Medicago
  misc_feature (1)..(375): Homolog of NCBI NO: 15289871 NR Description: putative receptor protein kinase-like protein
  misc_feature (1)..(382): Homolog of NCBI NO: 33146780 NR Description: putative lectin-like protein kinase [Oryza sativa
  misc_feature (1)..(350): Homolog of NCBI NO: 15241048 NR Description: serine/threonine-specific kinase like protein;
  misc_feature (2)..(362): Homolog of NCBI NO: 15242646 NR Description: receptor like protein kinase; protein id: supported by cDNA: gi_20260625 [Arabidopsis thaliana]
  misc_feature (1)..(382): Homolog of NCBI NO: 28416699 NR Description: At3g53810 [Arabidopsis thaliana]
  misc_feature (1)..(382): Homolog of NCBI NO: 15232332 NR Description: serine/threonine-specific kinase like protein;
  misc_feature (1)..(292): Homolog of NCBI NO: 38568031 NR Description: OSJNBa0065J03.1 [Oryza sativa (japonica
MIIGISVSGFVLLTFFITSLIVFLKRKQQKKKAEETENLTSINEDLERGAGPRKFTYKDLASAANNFADDRKLGEGGFGAVYRGYLNSLDMMVAIKKFAGGSKQGKREFVTEVKIISSLRHRNLVQLIGWCHEKDEFLMIYEFMPNGSLDAHLFGKKPHLAWHVRCKITLGLASALLYLHEEWEQCVVHRDIKASNVMLDSNFNAKLGDFGLARLMDHELGPQTTGLAGTFGYMAPEYISTGRASKESDVYSFGVVTLEIVTGRKSVDRRQGRVEPVTNLVEKMWDLYGKGEVITAIDEKLRIGGFDEKQAECLMIVGLWCAHPDVNTRPSIKQAIQVLNLEAPVPHLPTKMPVATYHVSSSNTTSVSSGGATVTFSSAQHGR

SEQ ID NO: 83433 - DNA, 974 bp, Arabidopsis thaliana
  misc_feature (1)..(974): Ceres Seq. ID no. 12670192
  misc_feature: MA Experiment ID: 20000180 Result: Down-regulated in Transcription
  misc_feature: MA Experiment 20000180 PARAMETER Experiment Name: At_Germinating_Seeds_P Parameter: Age (hr) Value: 24 vs. 0
  misc_feature: MA Experiment 20000180 PARAMETER Experiment Name: At_Germinating_Seeds_P Parameter: Tissue Value: Germinating Seeds
  misc_feature: MA Experiment ID: 20000436 Result: Down-regulated in Transcription
  misc_feature: MA Experiment 20000436 PARAMETER Experiment Name: At_Drought_P Parameter: Age (day) Value: 7
  misc_feature: MA Experiment 20000436 PARAMETER Experiment Name: At_Drought_P Parameter: Organism Value: A. thaliana
  misc_feature: MA Experiment 20000436 PARAMETER Experiment Name: At_Drought_P Parameter: Plant Line Value: WS
  misc_feature: MA Experiment 20000436 PARAMETER Experiment Name: At_Drought_P Parameter: Timepoint (hr) Value: 12
  misc_feature: MA Experiment 20000436 PARAMETER Experiment Name: At_Drought_P Parameter: Tissue Value: Whole Plant
  misc_feature: MA Experiment 20000436 PARAMETER Experiment Name: At_Drought_P Parameter: Treatment Value: Drought vs. No Drought
  misc_feature: MA Experiment ID: 20000437 Result: Down-regulated in Transcription
  misc_feature: MA Experiment 20000437 PARAMETER Experiment Name: At_Drought_P Parameter: Age (day) Value: 8
  misc_feature: MA Experiment 20000437 PARAMETER Experiment Name: At_Drought_P Parameter: Organism Value: A. thaliana
  misc_feature: MA Experiment 20000437 PARAMETER Experiment Name: At_Drought_P Parameter: Plant Line Value: WS
  misc_feature: MA Experiment 20000437 PARAMETER Experiment Name: At_Drought_P Parameter: Timepoint (hr) Value: 24
  misc_feature: MA Experiment 20000437 PARAMETER Experiment Name: At_Drought_P Parameter: Tissue Value: Whole Plant
  misc_feature: MA Experiment 20000437 PARAMETER Experiment Name: At_Drought_P Parameter: Treatment Value: Drought vs. No Drought
  misc_feature: MA Experiment ID: 20000794 Result: Down-regulated in Transcription
  misc_feature: MA Experiment 20000794 PARAMETER Experiment Name: At_Petals_P Parameter: Age (day) Value: 23-25 days
  misc_feature: MA Experiment 20000794 PARAMETER Experiment Name: At_Petals_P Parameter: Plant Line Value: WS
  misc_feature: MA Experiment 20000794 PARAMETER Experiment Name: At_Petals_P Parameter: Tissue Value: Petals vs. Whole plant
  misc_feature: MA Experiment ID: 20001558 Result: Up-regulated in Transcription
  misc_feature: MA Experiment 20001558 PARAMETER Experiment Name: At_Drought_Soil_Dry_P Parameter: Age (day) Value: 27
  misc_feature: MA Experiment 20001558 PARAMETER Experiment Name: At_Drought_Soil_Dry_P Parameter: Organism Value: A. thaliana
  misc_feature: MA Experiment 20001558 PARAMETER Experiment Name: At_Drought_Soil_Dry_P Parameter: Plant Line Value: WS
  misc_feature: MA Experiment 20001558 PARAMETER Experiment Name: At_Drought_Soil_Dry_P Parameter: Post Timepoint (hr) Value: 6
  misc_feature: MA Experiment 20001558 PARAMETER Experiment Name: At_Drought_Soil_Dry_P Parameter: Post-Treatment Value: Re-Water vs. No Drought
  misc_feature: MA Experiment 20001558 PARAMETER Experiment Name: At_Drought_Soil_Dry_P Parameter: Timepoint (day) Value: 13
  misc_feature: MA Experiment 20001558 PARAMETER Experiment Name: At_Drought_Soil_Dry_P Parameter: Treatment Value: Drought vs. No Drought
  misc_feature: MA Experiment ID: 20001911 Result: Down-regulated in Transcription
  misc_feature: MA Experiment 20001911 PARAMETER Experiment Name: At_Drought_Reproduction_P Parameter: Age (day) Value: 40
  misc_feature: MA Experiment 20001911 PARAMETER Experiment Name: At_Drought_Reproduction_P Parameter: Organism Value: A. thaliana
  misc_feature: MA Experiment 20001911 PARAMETER Experiment Name: At_Drought_Reproduction_P Parameter: Plant Line Value: WS
  misc_feature: MA Experiment 20001911 PARAMETER Experiment Name: At_Drought_Reproduction_P Parameter: Timepoint (day) Value: 10
  misc_feature: MA Experiment 20001911 PARAMETER Experiment Name: At_Drought_Reproduction_P Parameter: Tissue Value: Flowers
  misc_feature: MA Experiment 20001911 PARAMETER Experiment Name: At_Drought_Reproduction_P Parameter: Treatment Value: Drought vs. No Drought
gaagaaaagaaaaaaagaatccttcaacgagggttttgtaggagagttcacattttttttttttttgtctcagactccgccaattctctggaaacttaatttggatattgttaatttgttctcgcatagatcgattcctcttacggagaaatgcaatcgattcgtagcagtacaaggttgcttcagaggcatcgtttctccatctccaacactcttcgtttcacttcttcttcttcttcttctggaagctggtctgaaaatgaatcgaggatggtaggatttgattctttcccttgtaccagagctgcgacatatctcattagctcgttgaaaaatgtcggtttttcctcttcggcgatacctaaacaagactttaagtattcgttgaggtgcttttctactaccggagattctgttcaatctactcctcaaggatcccctgagtcagattgtgttgtgcctcagagaatcaagtttaagcggcttgataaaaccgctaagcatataatgcagattgtagacaaggaggcagttgaggaagtgagaaatcttagagagattccagagataaagcctggttacattgttcagcttaaagtggaagtgcctgagaacaagaggcgtgtatcaatagtaaaaggcgttgtcatagcaaggcgtaatgctggtcttaactcaacatttagaattagaaggcttgtcgctggagtgggcgttgaatccatgttccccttgtattccccaaacctgagggagattaaggtggtggacaagaagaaagtaagaagagccaagctctattacctcagggacaaggtgaatgctctcaagaagcattaacaaccatataaaaagcaatctactcttatcttaaaacaattttcgaaggttttagttacactccctcaaaaggagacgatttggccttagtgtcacattgaattcgtgtaatgataatgaatctcttcagtcct

SEQ ID NO: 83434 - protein, 229 aa, Arabidopsis thaliana
  peptide (1)..(229): Ceres Seq. ID no. 12670193
  misc_feature (120)..(225): Pfam Name: Ribosomal protein L19 Pfam Description: Ribosomal protein L19
  misc_feature (1)..(229): Homolog of NCBI NO: 15239778 NR Description: putative protein; protein id: At5g11750.1, by cDNA: gi_14030716 [Arabidopsis thaliana]
  misc_feature (1)..(229): Homolog of NCBI NO: 15234249 NR Description: putative protein; protein id: At4g11630.1, by cDNA: gi_14994248, supported by cDNA: gi_16974528, supported cDNA: gi_19699145 [Arabidopsis thaliana] >gi|7487679|pir||T04210
  misc_feature (1)..(229): Homolog of NCBI NO: 18395422 NR Description: expressed protein; protein id: At1g24240.1, by cDNA: gi_15146227 [Arabidopsis thaliana]
  misc_feature (55)..(226): Homolog of NCBI NO: 8809601 NR Description: contains similarity to plastid ribosomal protein
  misc_feature (55)..(226): Homolog of NCBI NO: 18422764 NR Description: putative protein; protein id: At5g47190.1, by cDNA: 30034. [Arabidopsis thaliana] unknown protein [Arabidopsis thaliana]
  misc_feature (55)..(226): Homolog of NCBI NO: 21592584 NR Description: contains similarity to plastid ribosomal protein
  misc_feature (119)..(226): Homolog of NCBI NO: 7582403 NR Description: plastid ribosomal protein L19 precursor [Spinacia
  misc_feature (119)..(226): Homolog of NCBI NO: 18414915 NR Description: putative protein; protein id: At4g17560.1, by cDNA: 2161., supported by cDNA: gi_17065489, supported by gi_20148592 [Arabidopsis thaliana] >gi|17065490|gb|AAL32899.1|
  misc_feature (119)..(223): Homolog of NCBI NO: 14140122 NR Description: putative plastid ribosomal protein L19 precursor
  misc_feature (118)..(222): Homolog of NCBI NO: 23014871 NR Description: hypothetical protein [Magnetospirillum
MQSIRSSTRLLQRHRFSISNTLRFTSSSSSSGSWSENESRMVGFDSFPCTRAATYLISSLKNVGFSSSAIPKQDFKYSLRCFSTTGDSVQSTPQGSPESDCVVPQRIKFKRLDKTAKHIMQIVDKEAVEEVRNLREIPEIKPGYIVQLKVEVPENKRRVSIVKGVVIARRNAGLNSTFRIRRLVAGVGVESMFPLYSPNLREIKVVDKKKVRRAKLYYLRDKVNALKKH

SEQ ID NO: 83435 - protein, 189 aa, Arabidopsis thaliana
  peptide (1)..(189): Ceres Seq. ID no. 12670194
  misc_feature (80)..(185): Pfam Name: Ribosomal protein L19 Pfam Description: Ribosomal protein L19
  misc_feature (1)..(189): Homolog of NCBI NO: 15239778 NR Description: putative protein; protein id: At5g11750.1, by cDNA: gi_14030716 [Arabidopsis thaliana]
  misc_feature (1)..(189): Homolog of NCBI NO: 15234249 NR Description: putative protein; protein id: At4g11630.1, by cDNA: gi_14994248, supported by cDNA: gi_16974528, supported cDNA: gi_19699145 [Arabidopsis thaliana] >gi|7487679|pir||T04210
  misc_feature (1)..(189): Homolog of NCBI NO: 18395422 NR Description: expressed protein; protein id: At1g24240.1, by cDNA: gi_15146227 [Arabidopsis thaliana]
  misc_feature (15)..(186): Homolog of NCBI NO: 8809601 NR Description: contains similarity to plastid ribosomal protein
  misc_feature (15)..(186): Homolog of NCBI NO: 18422764 NR Description: putative protein; protein id: At5g47190.1, by cDNA: 30034. [Arabidopsis thaliana] unknown protein [Arabidopsis thaliana]
  misc_feature (15)..(186): Homolog of NCBI NO: 21592584 NR Description: contains similarity to plastid ribosomal protein
  misc_feature (79)..(186): Homolog of NCBI NO: 7582403 NR Description: plastid ribosomal protein L19 precursor [Spinacia
  misc_feature (79)..(186): Homolog of NCBI NO: 18414915 NR Description: putative protein; protein id: At4g17560.1, by cDNA: 2161., supported by cDNA: gi_17065489, supported by gi_20148592 [Arabidopsis thaliana] >gi|17065490|gb|AAL32899.1|
  misc_feature (79)..(183): Homolog of NCBI NO: 14140122 NR Description: putative plastid ribosomal protein L19 precursor
  misc_feature (78)..(182): Homolog of NCBI NO: 23014871 NR Description: hypothetical protein [Magnetospirillum
MVGFDSFPCTRAATYLISSLKNVGFSSSAIPKQDFKYSLRCFSTTGDSVQSTPQGSPESDCVVPQRIKFKRLDKTAKHIMQIVDKEAVEEVRNLREIPEIKPGYIVQLKVEVPENKRRVSIVKGVVIARRNAGLNSTFRIRRLVAGVGVESMFPLYSPNLREIKVVDKKKVRRAKLYYLRDKVNALKKH

SEQ ID NO: 83436 - DNA, 1011 bp, Arabidopsis thaliana
  misc_feature (1)..(1011): Ceres Seq. ID no. 12670227
  misc_feature: MA Experiment ID: 108434 Result: Up-regulated in Transcription
  misc_feature: MA Experiment 108434 PARAMETER Experiment Name: At_Root_Tips_cDNA_P Parameter: Tissue Value: Root Tips
  misc_feature: MA Experiment ID: 108461 Result: Up-regulated in Transcription
  misc_feature: MA Experiment 108461 PARAMETER Experiment Name: At_Germinating_Seeds_cDNA_P Parameter: Age (day) Value: 1 vs. 0
  misc_feature: MA Experiment 108461 PARAMETER Experiment Name: At_Germinating_Seeds_cDNA_P Parameter: Tissue Value: Germinating Seeds
  misc_feature: MA Experiment ID: 108462 Result: Up-regulated in Transcription
  misc_feature: MA Experiment 108462 PARAMETER Experiment Name: At_Germinating_Seeds_cDNA_P Parameter: Age (day) Value: 2 vs. 0
  misc_feature: MA Experiment 108462 PARAMETER Experiment Name: At_Germinating_Seeds_cDNA_P Parameter: Tissue Value: Germinating Seeds
  misc_feature: MA Experiment ID: 108464 Result: Up-regulated in Transcription
  misc_feature: MA Experiment 108464 PARAMETER Experiment Name: At_Germinating_Seeds_cDNA_P Parameter: Age (day) Value: 4 vs. 0
  misc_feature: MA Experiment 108464 PARAMETER Experiment Name: At_Germinating_Seeds_cDNA_P Parameter: Tissue Value: Germinating Seeds
  misc_feature: MA Experiment ID: 108573 Result: Down-regulated in Transcription
  misc_feature: MA Experiment 108573 PARAMETER Experiment Name: At_Drought_cDNA_P Parameter: Timepoint (hr) Value: 6
  misc_feature: MA Experiment 108573 PARAMETER Experiment Name: At_Drought_cDNA_P Parameter: Tissue Value: Aerial
  misc_feature: MA Experiment 108573 PARAMETER Experiment Name: At_Drought_cDNA_P Parameter: Treatment Value: Drought vs. No Drought
  misc_feature: MA Experiment ID: 108576 Result: Down-regulated in Transcription
  misc_feature: MA Experiment 108576 PARAMETER Experiment Name: At_42deg_Heat_cDNA_P Parameter: Temperature (deg C) Value: 42 vs. 22
  misc_feature: MA Experiment 108576 PARAMETER Experiment Name: At_42deg_Heat_cDNA_P Parameter: Timepoint (hr) Value: 1
  misc_feature: MA Experiment 108576 PARAMETER Experiment Name: At_42deg_Heat_cDNA_P Parameter: Tissue Value: Aerial
  misc_feature: MA Experiment ID: 108577 Result: Down-regulated in Transcription
  misc_feature: MA Experiment 108577 PARAMETER Experiment Name: At_42deg_Heat_cDNA_P Parameter: Temperature (deg C) Value: 42 vs. 22
  misc_feature: MA Experiment 108577 PARAMETER Experiment Name: At_42deg_Heat_cDNA_P Parameter: Timepoint (hr) Value: 6
  misc_feature: MA Experiment 108577 PARAMETER Experiment Name: At_42deg_Heat_cDNA_P Parameter: Tissue Value: Aerial
  misc_feature: MA Experiment ID: 108595 Result: Down-regulated in Transcription
  misc_feature: MA Experiment 108595 PARAMETER Experiment Name: At_Ler-pi_Ovule_cDNA_P Parameter: Plant Line Value: null
  misc_feature: MA Experiment ID: 20000087 Result: Down-regulated in Transcription
  misc_feature: MA Experiment 20000087 PARAMETER Experiment Name: At_100uM_ABA_Mutants_cDNA_P Parameter: Plant Line Value: WS
  misc_feature: MA Experiment 20000087 PARAMETER Experiment Name: At_100uM_ABA_Mutants_cDNA_P Parameter: Timepoint (hr) Value: 6
  misc_feature: MA Experiment 20000087 PARAMETER Experiment Name: At_100uM_ABA_Mutants_cDNA_P Parameter: Tissue Value: Aerial
  misc_feature: MA Experiment 20000087 PARAMETER Experiment Name: At_100uM_ABA_Mutants_cDNA_P Parameter: Treatment Value: 100uM ABA vs. No Treatment
  misc_feature: MA Experiment ID: 20000113 Result: Down-regulated in Transcription
  misc_feature: MA Experiment 20000113 PARAMETER Experiment Name: At_42deg_Heat_cDNA_P Parameter: Temperature (deg C) Value: 42 vs. 22
  misc_feature: MA Experiment 20000113 PARAMETER Experiment Name: At_42deg_Heat_cDNA_P Parameter: Timepoint (hr) Value: 8
  misc_feature: MA Experiment 20000113 PARAMETER Experiment Name: At_42deg_Heat_cDNA_P Parameter: Tissue Value: Aerial
atggatctcgcgtcgaatcttggtgggaagatcgataaatccgatgttctcaccgccgtcgaaaagtatgagcaatatcatgtcttccatggaggaaacgaggaagagagaaaagccaattatactgacatggttaataagtactatgaccttgctactagcttttatgagtacggatggggagaatccttccattttgcacaaagatggaaaggagaatcgcttcgagagagtattaagcgacacgagcactttcttgctcttcagcttggcatccaaccaggacaaaaggtactggatgtaggatgtggaattggtggaccgttgagggaaattgcaagattcagcaattcagttgttaccgggctcaacaataacgaataccagatcaccagaggcaaggaactaaaccgacttgcaggtgtcgacaagacatgtaactttgtcaaggctgacttcatgaagatgccattcccggaaaacagtttcgatgcagtttatgcaatagaagcaacttgccatgcacctgatgcgtatggatgctacaaagagatctacagagtgctaaagcctgggcaatgttttgctgcctatgagtggtgtatgactgatgcatttgaccctgataacgccgaacatcagaaaataaagggagagatagagattggagatggtcttcctgacattaggctgactacaaaatgcctcgaagctctgaagcaggccggttttgaagtgatatgggaaaaggatctggccaaggactcgccggtcccatggtacttacctcttgacaaaaatcatttctcactcagtagcttccgccttacagctgttggacgattcataaccaaaaacatggtcaagatccttgaatacataagacttgcacctcaaggaagccaaagggtctcaaatttcctggagcaggctgcggaaggattagtcgacggtggaaggagagagattttcacgccaatgtatttcttcttggcccggaagccagagtaa

SEQ ID NO: 83437 - protein, 336 aa, Arabidopsis thaliana; identical to SEQ ID NO: 26651
  peptide (1)..(336): Ceres Seq. ID no. 12670228
  misc_feature (51)..(252): Pfam Name: ubiE/COQ5 methyltransferase family Pfam Description: ubiE/COQ5 methyltransferase family
  misc_feature (1)..(336): Homolog of NCBI NO: 15240691 NR Description: 24-sterol C-methyltransferase; protein id: supported by cDNA: gi_11066104, supported by cDNA: gi_8745240
  misc_feature (1)..(336): Homolog of NCBI NO: 21434843 NR Description: cephalopod [Arabidopsis thaliana]
  misc_feature (1)..(336): Homolog of NCBI NO: 7443720 NR Description: probable sterol 24-C-methyltransferase (EC
  misc_feature (1)..(335): Homolog of NCBI NO: 7443719 NR Description: sterol 24-C-methyltransferase (EC 2.1.1.41) -
  misc_feature (1)..(335): Homolog of NCBI NO: 7443716 NR Description: sterol 24-C-methyltransferase (EC 2.1.1.41)
  misc_feature (2)..(335): Homolog of NCBI NO: 3560474 NR Description: S-adenosyl-methionine-sterol-C- methyltransferase
  misc_feature (1)..(335): Homolog of NCBI NO: 34393309 NR Description: cycloartenol-C24-methyltransferase [Oryza sativa
  misc_feature (1)..(335): Homolog of NCBI NO: 7443715 NR Description: sterol 24-C-methyltransferase (EC 2.1.1.41) -
  misc_feature (1)..(335): Homolog of NCBI NO: 3560531 NR Description: cycloartenol-C24-methyltransferase [Oryza sativa
  misc_feature (2)..(335): Homolog of NCBI NO: 3603295 NR Description: S-adenosyl-methionine

SEQ ID NO: 83438 - protein, 293 aa, Arabidopsis thaliana; identical to SEQ ID NO: 26652
  peptide (1)..(293): Ceres Seq. ID no. 12670229
  misc_feature (8)..(209): Pfam Name: ubiE/COQ5 methyltransferase family Pfam Description: ubiE/COQ5 methyltransferase family
  misc_feature (1)..(293): Homolog of NCBI NO: 15240691 NR Description: 24-sterol C-methyltransferase; protein id: supported by cDNA: gi_11066104, supported by cDNA: gi_8745240
  misc_feature (1)..(293): Homolog of NCBI NO: 21434843 NR Description: cephalopod [Arabidopsis thaliana]
  misc_feature (1)..(293): Homolog of NCBI NO: 7443720 NR Description: probable sterol 24-C-methyltransferase (EC
  misc_feature (1)..(292): Homolog of NCBI NO: 7443719 NR Description: sterol 24-C-methyltransferase (EC 2.1.1.41) -
  misc_feature (1)..(292): Homolog of NCBI NO: 7443716 NR Description: sterol 24-C-methyltransferase (EC 2.1.1.41)
  misc_feature (1)..(292): Homolog of NCBI NO: 3560474 NR Description: S-adenosyl-methionine-sterol-C- methyltransferase
  misc_feature (1)..(292): Homolog of NCBI NO: 34393309 NR Description: cycloartenol-C24-methyltransferase [Oryza sativa
  misc_feature (1)..(292): Homolog of NCBI NO: 7443715 NR Description: sterol 24-C-methyltransferase (EC 2.1.1.41) -
  misc_feature (1)..(292): Homolog of NCBI NO: 3560531 NR Description: cycloartenol-C24-methyltransferase [Oryza sativa
  misc_feature (1)..(292): Homolog of NCBI NO: 3603295 NR Description: S-adenosyl-methionine

SEQ ID NO: 83439 - protein, 183 aa, Arabidopsis thaliana
  peptide (1)..(183): Ceres Seq. ID no. 12670230
  misc_feature (1)..(99): Pfam Name: ubiE/COQ5 methyltransferase family Pfam Description: ubiE/COQ5 methyltransferase family
  misc_feature (1)..(183): Homolog of NCBI NO: 15240691 NR Description: 24-sterol C-methyltransferase; protein id: supported by cDNA: gi_11066104, supported by cDNA: gi_8745240
  misc_feature (1)..(183): Homolog of NCBI NO: 21434843 NR Description: cephalopod [Arabidopsis thaliana]
  misc_feature (1)..(183): Homolog of NCBI NO: 7443720 NR Description: probable sterol 24-C-methyltransferase (EC
  misc_feature (1)..(182): Homolog of NCBI NO: 7443719 NR Description: sterol 24-C-methyltransferase (EC 2.1.1.41) -
  misc_feature (1)..(182): Homolog of NCBI NO: 7443716 NR Description: sterol 24-C-methyltransferase (EC 2.1.1.41)
  misc_feature (1)..(182): Homolog of NCBI NO: 3560474 NR Description: S-adenosyl-methionine-sterol-C- methyltransferase
  misc_feature (1)..(182): Homolog of NCBI NO: 34393309 NR Description: cycloartenol-C24-methyltransferase [Oryza sativa
  misc_feature (1)..(182): Homolog of NCBI NO: 7443715 NR Description: sterol 24-C-methyltransferase (EC 2.1.1.41) -
  misc_feature (1)..(182): Homolog of NCBI NO: 3560531 NR Description: cycloartenol-C24-methyltransferase [Oryza sativa
  misc_feature (1)..(182): Homolog of NCBI NO: 3603295 NR Description: S-adenosyl-methionine
MKMPFPENSFDAVYAIEATCHAPDAYGCYKEIYRVLKPGQCFAAYEWCMTDAFDPDNAEHQKIKGEIEIGDGLPDIRLTTKCLEALKQAGFEVIWEKDLAKDSPVPWYLPLDKNHFSLSSFRLTAVGRFITKNMVKILEYIRLAPQGSQRVSNFLEQAAEGLVDGGRREIFTPMYFFLARKPE

SEQ ID NO: 83440 - DNA, 675 bp, Arabidopsis thaliana
  misc_feature (1)..(675): Ceres Seq. ID no. 12670231
  misc_feature: MA Experiment ID: 20000185 Result: Up-regulated in Transcription
  misc_feature: MA Experiment 20000185 PARAMETER Experiment Name: At_Roots__P Parameter: Age (day) Value: 7 vs. 21
  misc_feature: MA Experiment 20000185 PARAMETER Experiment Name: At_Roots__P Parameter: Organism Value: A. thaliana
  misc_feature: MA Experiment 20000185 PARAMETER Experiment Name: At_Roots__P Parameter: Tissue Value: Roots vs. Whole Plant
  misc_feature: MA Experiment ID: 20000496 Result: Up-regulated in Transcription
  misc_feature: MA Experiment 20000496 PARAMETER Experiment Name: At_Guard_Cells_P Parameter: Harvest Date Value: 7/19/2002
  misc_feature: MA Experiment 20000496 PARAMETER Experiment Name: At_Guard_Cells_P Parameter: Organism Value: Canola
  misc_feature: MA Experiment 20000496 PARAMETER Experiment Name: At_Guard_Cells_P Parameter: Tissue Value: Guard Cells vs. Leaves
  misc_feature: MA Experiment ID: 20001451 Result: Down-regulated in Transcription
  misc_feature: MA Experiment 20001451 PARAMETER Experiment Name: At_Far-red-induction_P Parameter: Age (day) Value: 7
  misc_feature: MA Experiment 20001451 PARAMETER Experiment Name: At_Far-red-induction_P Parameter: Light Value: Far-red vs. White
  misc_feature: MA Experiment 20001451 PARAMETER Experiment Name: At_Far-red-induction_P Parameter: Organism Value: A. thaliana
  misc_feature: MA Experiment 20001451 PARAMETER Experiment Name: At_Far-red-induction_P Parameter: Plant Line Value: Columbia
  misc_feature: MA Experiment 20001451 PARAMETER Experiment Name: At_Far-red-induction_P Parameter: Timepoint (hr) Value: 24
  misc_feature: MA Experiment 20001451 PARAMETER Experiment Name: At_Far-red-induction_P Parameter: Tissue Value: Whole Plant
  misc_feature: MA Experiment ID: 20001458 Result: Up-regulated in Transcription
  misc_feature: MA Experiment 20001458 PARAMETER Experiment Name: At_50mM_NH4NO3_L-to-H_P Parameter: Age (day) Value: Undefined
  misc_feature: MA Experiment 20001458 PARAMETER Experiment Name: At_50mM_NH4NO3_L-to-H_P Parameter: Organism Value: Undefined
  misc_feature: MA Experiment 20001458 PARAMETER Experiment Name: At_50mM_NH4NO3_L-to-H_P Parameter: Plant Line Value: Undefined
  misc_feature: MA Experiment 20001458 PARAMETER Experiment Name: At_50mM_NH4NO3_L-to-H_P Parameter: Timepoint (hr) Value: 2
  misc_feature: MA Experiment 20001458 PARAMETER Experiment Name: At_50mM_NH4NO3_L-to-H_P Parameter: Tissue Value: Siliques
  misc_feature: MA Experiment 20001458 PARAMETER Experiment Name: At_50mM_NH4NO3_L-to-H_P Parameter: Treatment Value: 50mM NH4NO3 vs. 100mM Manitol
  misc_feature: MA Experiment ID: 20001557 Result: Up-regulated in Transcription
  misc_feature: MA Experiment 20001557 PARAMETER Experiment Name: At_Drought_Soil_Dry_P Parameter: Age (day) Value: 27
  misc_feature: MA Experiment 20001557 PARAMETER Experiment Name: At_Drought_Soil_Dry_P Parameter: Organism Value: A. thaliana
  misc_feature: MA Experiment 20001557 PARAMETER Experiment Name: At_Drought_Soil_Dry_P Parameter: Plant Line Value: WS
  misc_feature: MA Experiment 20001557 PARAMETER Experiment Name: At_Drought_Soil_Dry_P Parameter: Post Timepoint (hr) Value: 3
  misc_feature: MA Experiment 20001557 PARAMETER Experiment Name: At_Drought_Soil_Dry_P Parameter: Post-Treatment Value: Re-Water vs. No Drought
  misc_feature: MA Experiment 20001557 PARAMETER Experiment Name: At_Drought_Soil_Dry_P Parameter: Timepoint (day) Value: 13
  misc_feature: MA Experiment 20001557 PARAMETER Experiment Name: At_Drought_Soil_Dry_P Parameter: Treatment Value: Drought vs. No Drought
  misc_feature: MA Experiment ID: 20001558 Result: Up-regulated in Transcription
  misc_feature: MA Experiment 20001558 PARAMETER Experiment Name: At_Drought_Soil_Dry_P Parameter: Age (day) Value: 27
  misc_feature: MA Experiment 20001558 PARAMETER Experiment Name: At_Drought_Soil_Dry_P Parameter: Organism Value: A. thaliana
  misc_feature: MA Experiment 20001558 PARAMETER Experiment Name: At_Drought_Soil_Dry_P Parameter: Plant Line Value: WS
  misc_feature: MA Experiment 20001558 PARAMETER Experiment Name: At_Drought_Soil_Dry_P Parameter: Post Timepoint (hr) Value: 6
  misc_feature: MA Experiment 20001558 PARAMETER Experiment Name: At_Drought_Soil_Dry_P Parameter: Post-Treatment Value: Re-Water vs. No Drought
  misc_feature: MA Experiment 20001558 PARAMETER Experiment Name: At_Drought_Soil_Dry_P Parameter: Timepoint (day) Value: 13
  misc_feature: MA Experiment 20001558 PARAMETER Experiment Name: At_Drought_Soil_Dry_P Parameter: Treatment Value: Drought vs. No Drought
  misc_feature: MA Experiment ID: 20001757 Result: Up-regulated in Transcription
  misc_feature: MA Experiment 20001757 PARAMETER Experiment Name: At_50mM_NH4NO3_L-to-H_P Parameter: Timepoint (hr) Value: 6
  misc_feature: MA Experiment 20001757 PARAMETER Experiment Name: At_50mM_NH4NO3_L-to-H_P Parameter: Tissue Value: Leaf
  misc_feature: MA Experiment 20001757 PARAMETER Experiment Name: At_50mM_NH4NO3_L-to-H_P Parameter: Treatment Value: 50mM NH4NO3 vs 100mM Mannitol
atgagtggggcaggtgtaccggactttttctacagagaagctcaacgtcttggctatgttgctcgctcagctttcaagcttctacagattcaaaaacagtacaagctcatcaaaccaggctcctctgttcttgacctaggttgcgcgcctggtgcttggcttcaggttgcttgccaaagcttaggcccacttagaagtggtggaattgtcgttggtatggatataaagaaggtgaaggttcctccacagtgtgattctcgagtgcaaaccattgctgctgatgttttaaactttcccagacaaaagattcgggagttatcacctcagcaattgggattttcagtcattctttcagatatgtgtcactcagtatctggaataaccactagagatgcagctctgtctgctgaattgggaatgcgagcacttgatttggctgttggtcaagctgccatctctcagtcacctaatgatgatgatggaggcccaaacgaaagtcgtcctggtgtacttaggcatggtggccatcttgtgatcaagcttctagaaagcgaggatgctcaagattttgctcgaatttgcaagcctatcttcaacaaggcatcttggttgaggccaaaagctacaagaccatcatctcgagaaatttacttgatttgccagggatttcgataa

SEQ ID NO: 83441 - protein, 224 aa, Arabidopsis thaliana
  peptide (1)..(224): Ceres Seq. ID no. 12670232
  misc_feature (19)..(224): Pfam Name: FtsJ-like methyltransferase Pfam Description: FtsJ-like methyltransferase
  misc_feature (1)..(224): Homolog of NCBI NO: 15240727 NR Description: FtsJ (dbj|BAA83750.1); protein id: At5g13830.1 thaliana] >gi|5821280|dbj|BAA83750.1| FtsJ [Arabidopsis thaliana]
  misc_feature (1)..(222): Homolog of NCBI NO: 34897416 NR Description: putative FtsJ cell division protein [Oryza sativa
  misc_feature (8)..(146): Homolog of NCBI NO: 15669566 NR Description: cell division protein FtsJ [Methanococcus >gi|3023819|sp|Q58771|YD76_METJA Putative ribosomal RNA
  misc_feature (170)..(223): Homolog of NCBI NO: 15669566 NR Description: cell division protein FtsJ [Methanococcus >gi|3023819|sp|Q58771|YD76_METJA Putative ribosomal RNA
  misc_feature (8)..(146): Homolog of NCBI NO: 11499633 NR Description: cell division protein (ftsJ) [Archaeoglobus >gi|9911012|sp|O28228|YK51_ARCFU Putative ribosomal RNA
  misc_feature (170)..(224): Homolog of NCBI NO: 11499633 NR Description: cell division protein (ftsJ) [Archaeoglobus >gi|9911012|sp|O28228|YK51_ARCFU Putative ribosomal RNA
  misc_feature (8)..(146): Homolog of NCBI NO: 23028204 NR Description: hypothetical protein [Microbulbifer degradans
  misc_feature (171)..(224): Homolog of NCBI NO: 23028204 NR Description: hypothetical protein [Microbulbifer degradans
  misc_feature (8)..(146): Homolog of NCBI NO: 23051065 NR Description: hypothetical protein [Methanosarcina barkeri]
  misc_feature (170)..(223): Homolog of NCBI NO: 23051065 NR Description: hypothetical protein [Methanosarcina barkeri]
MSGAGVPDFFYREAQRLGYVARSAFKLLQIQKQYKLIKPGSSVLDLGCAPGAWLQVACQSLGPLRSGGIVVGMDIKKVKVPPQCDSRVQTIAADVLNFPRQKIRELSPQQLGFSVILSDMCHSVSGITTRDAALSAELGMRALDLAVGQAAISQSPNDDDGGPNESRPGVLRHGGHLVIKLLESEDAQDFARICKPIFNKASWLRPKATRPSSREIYLICQGFR

SEQ ID NO: 83442 - protein, 152 aa, Arabidopsis thaliana
  peptide (1)..(152): Ceres Seq. ID no. 12670233
  misc_feature (1)..(152): Pfam Name: FtsJ-like methyltransferase Pfam Description: FtsJ-like methyltransferase
  misc_feature (1)..(152): Homolog of NCBI NO: 15240727 NR Description: FtsJ (dbj|BAA83750.1); protein id: At5g13830.1 thaliana] >gi|5821280|dbj|BAA83750.1| FtsJ [Arabidopsis thaliana]
  misc_feature (1)..(150): Homolog of NCBI NO: 34897416 NR Description: putative FtsJ cell division protein [Oryza sativa
  misc_feature (1)..(74): Homolog of NCBI NO: 15669566 NR Description: cell division protein FtsJ [Methanococcus >gi|3023819|sp|Q58771|YD76_METJA Putative ribosomal RNA
  misc_feature (98)..(151): Homolog of NCBI NO: 15669566 NR Description: cell division protein FtsJ [Methanococcus >gi|3023819|sp|Q58771|YD76_METJA Putative ribosomal RNA
  misc_feature (1)..(74): Homolog of NCBI NO: 11499633 NR Description: cell division protein (ftsJ) [Archaeoglobus >gi|9911012|sp|O28228|YK51_ARCFU Putative ribosomal RNA
  misc_feature (98)..(152): Homolog of NCBI NO: 11499633 NR Description: cell division protein (ftsJ) [Archaeoglobus >gi|9911012|sp|O28228|YK51_ARCFU Putative ribosomal RNA
  misc_feature (1)..(74): Homolog of NCBI NO: 23028204 NR Description: hypothetical protein [Microbulbifer degradans
  misc_feature (99)..(152): Homolog of NCBI NO: 23028204 NR Description: hypothetical protein [Microbulbifer degradans
  misc_feature (1)..(74): Homolog of NCBI NO: 23051065 NR Description: hypothetical protein [Methanosarcina barkeri]
  misc_feature (98)..(151): Homolog of NCBI NO: 23051065 NR Description: hypothetical protein [Methanosarcina barkeri]
MDIKKVKVPPQCDSRVQTIAADVLNFPRQKIRELSPQQLGFSVILSDMCHSVSGITTRDAALSAELGMRALDLAVGQAAISQSPNDDDGGPNESRPGVLRHGGHLVIKLLESEDAQDFARICKPIFNKASWLRPKATRPSSREIYLICQGFR

SEQ ID NO: 83443 - DNA, 1026 bp, Arabidopsis thaliana
  misc_feature (1)..(1026): Ceres Seq. ID no. 12670234
  misc_feature: MA Experiment ID: 20000179 Result: Up-regulated in Transcription
  misc_feature: MA Experiment 20000179 PARAMETER Experiment Name: At_Germinating_Seeds_P Parameter: Age (hr) Value: 6 vs. 0
  misc_feature: MA Experiment 20000179 PARAMETER Experiment Name: At_Germinating_Seeds_P Parameter: Tissue Value: Germinating Seeds
  misc_feature: MA Experiment ID: 20000180 Result: Up-regulated in Transcription
  misc_feature: MA Experiment 20000180 PARAMETER Experiment Name: At_Germinating_Seeds_P Parameter: Age (hr) Value: 24 vs. 0
  misc_feature: MA Experiment 20000180 PARAMETER Experiment Name: At_Germinating_Seeds_P Parameter: Tissue Value: Germinating Seeds
  misc_feature: MA Experiment ID: 20000227 Result: Up-regulated in Transcription
  misc_feature: MA Experiment 20000227 PARAMETER Experiment Name: At_Root-Tips-vs-Tops_P Parameter: Tissue Value: Root Tips vs. Root Tops
  misc_feature: MA Experiment ID: 20001248 Result: Up-regulated in Transcription
  misc_feature: MA Experiment 20001248 PARAMETER Experiment Name: At_Far-red-induction_P Parameter: Age (day) Value: 7
  misc_feature: MA Experiment 20001248 PARAMETER Experiment Name: At_Far-red-induction_P Parameter: Light Value: Far-red vs. White
  misc_feature: MA Experiment 20001248 PARAMETER Experiment Name: At_Far-red-induction_P Parameter: Organism Value: A. thaliana
  misc_feature: MA Experiment 20001248 PARAMETER Experiment Name: At_Far-red-induction_P Parameter: Plant Line Value: Columbia
  misc_feature: MA Experiment 20001248 PARAMETER Experiment Name: At_Far-red-induction_P Parameter: Timepoint (hr) Value: 4
  misc_feature: MA Experiment 20001248 PARAMETER Experiment Name: At_Far-red-induction_P Parameter: Tissue Value: Whole Plant
  misc_feature: MA Experiment ID: 20001450 Result: Up-regulated in Transcription
  misc_feature: MA Experiment 20001450 PARAMETER Experiment Name: At_Far-red-induction_P Parameter: Age (day) Value: 7
  misc_feature: MA Experiment 20001450 PARAMETER Experiment Name: At_Far-red-induction_P Parameter: Light Value: Far-red vs. White
  misc_feature: MA Experiment 20001450 PARAMETER Experiment Name: At_Far-red-induction_P Parameter: Organism Value: A. thaliana
  misc_feature: MA Experiment 20001450 PARAMETER Experiment Name: At_Far-red-induction_P Parameter: Plant Line Value: Columbia
  misc_feature: MA Experiment 20001450 PARAMETER Experiment Name: At_Far-red-induction_P Parameter: Timepoint (hr) Value: 8
  misc_feature: MA Experiment 20001450 PARAMETER Experiment Name: At_Far-red-induction_P Parameter: Tissue Value: Whole Plant
  misc_feature: MA Experiment ID: 20001451 Result: Up-regulated in Transcription
  misc_feature: MA Experiment 20001451 PARAMETER Experiment Name: At_Far-red-induction_P Parameter: Age (day) Value: 7
  misc_feature: MA Experiment 20001451 PARAMETER Experiment Name: At_Far-red-induction_P Parameter: Light Value: Far-red vs. White
  misc_feature: MA Experiment 20001451 PARAMETER Experiment Name: At_Far-red-induction_P Parameter: Organism Value: A. thaliana
  misc_feature: MA Experiment 20001451 PARAMETER Experiment Name: At_Far-red-induction_P Parameter: Plant Line Value: Columbia
  misc_feature: MA Experiment 20001451 PARAMETER Experiment Name: At_Far-red-induction_P Parameter: Timepoint (hr) Value: 24
  misc_feature: MA Experiment 20001451 PARAMETER Experiment Name: At_Far-red-induction_P Parameter: Tissue Value: Whole Plant
aatgtccgcatagtgtttgtttggtgtgatcagagtgagaatgggtcgtctttcatcaactctctgcctcacgtttctgattttggccacagttgcatttggtgtacctcctaaaaagtccattaatgttccatttgggaggaactacttccccacttgggcttttgatcacattaagtatctcaatggtggttctgaagtgcatcttgtcctcgacaagtacactggcactggctttcagtccaaaggttcctacttgtttggccacttcagtatgcacataaagatggttgctggtgactctgctggaactgtgaccgccttctatttgtcgtcccagaactcagaacatgatgagatagactttgagtttctagggaacagaactggccagccttacattttgcagactaacgtgtttacaggaggcgccggaaaccgtgagcaacgaatcaacctctggtttgatccttccaaggactatcattcctattcagttctctggaacatgtatcagattgtgttctttgtggatgatgtgccgatacgagtgttcaagaatagcaaagacgttggggtgaagtttccattcaaccaaccaatgaagatatattcgagtctgtggaatgcagacgactgggccacaaggggagggttggagaagaccaactgggaaaaagctccttttgtcgcgtcctacagaggcttccacgtcgatggatgtgaagcttcagtaaatgctaagttctgcgagacgcagggaaaacgttggtgggatcagaaagagttccaggacttggacgctaaccagtacaagcgtctcaaatgggttcgtaagagatacaccatctacaactattgcactgaccgcgtccgatttcccgtacctcctccagagtgccgcagagaccgcgacatatagtgatttttcagattttatctagattgttttcccactgtatgacaatatttcctacttttgtaatgtttattcttcttattacaatttaatctagaaaagtttgg

SEQ ID NO: 83444 - protein, 293 aa, Arabidopsis thaliana
  peptide (1)..(293): Ceres Seq. ID no. 12670235
  misc_feature (32)..(213): Pfam Name: Glycosyl hydrolases family 16 Pfam Description: Glycosyl hydrolases family 16
  misc_feature (1)..(293): Homolog of NCBI NO: 15240733 NR Description: xyloglucan endotransglycosylase (EXGT-A4); id: At5g13870.1 [Arabidopsis thaliana] endoxyloglucan transferase [Arabidopsis thaliana]
  misc_feature (8)..(293): Homolog of NCBI NO: 7447416 NR Description: xyloglucan endo-1,4-beta-D-glucanase (EC 3.2.1.-) - common nasturtium >gi|1008904|gb|AAB39950.1| xyloglucan
  misc_feature (10)..(293): Homolog of NCBI NO: 950299 NR Description: xyloglucan endotransglycosylase precursor
  misc_feature (7)..(293): Homolog of NCBI NO: 22947847 NR Description: xyloglucan endotransglycosylase [Malus x
  misc_feature (7)..(293): Homolog of NCBI NO: 3043422 NR Description: endoxyloglucan transferase [Cicer arietinum]
  misc_feature (7)..(293): Homolog of NCBI NO: 541939 NR Description: xyloglucan endo-1,4-beta-D-glucanase (EC 3.2.1.-)
  misc_feature (1)..(293): Homolog of NCBI NO: 3986172 NR Description: EXGT1 [Pisum sativum]
  misc_feature (7)..(293): Homolog of NCBI NO: 27228078 NR Description: xyloglucan endotransglycosylase precursor
  misc_feature (1)..(293): Homolog of NCBI NO: 38605155 NR Description: Probable xyloglucan
  misc_feature (2)..(293): Homolog of NCBI NO: 38605537 NR Description: Probable xyloglucan protein precursor >gi|1498168|dbj|BAA13163.1| endoxyloglucan
MGRLSSTLCLTFLILATVAFGVPPKKSINVPFGRNYFPTWAFDHIKYLNGGSEVHLVLDKYTGTGFQSKGSYLFGHFSMHIKMVAGDSAGTVTAFYLSSQNSEHDEIDFEFLGNRTGQPYILQTNVFTGGAGNREQRINLWFDPSKDYHSYSVLWNMYQIVFFVDDVPIRVFKNSKDVGVKFPFNQPMKIYSSLWNADDWATRGGLEKTNWEKAPFVASYRGFHVDGCEASVNAKFCETQGKRWWDQKEFQDLDANQYKRLKWVRKRYTIYNYCTDRVRFPVPPPECRRDRDI

SEQ ID NO: 83445 - protein, 215 aa, Arabidopsis thaliana
  peptide (1)..(215): Ceres Seq. ID no. 12670236
  misc_feature (1)..(135): Pfam Name: Glycosyl hydrolases family 16 Pfam Description: Glycosyl hydrolases family 16
  misc_feature (1)..(215): Homolog of NCBI NO: 15240733 NR Description: xyloglucan endotransglycosylase (EXGT-A4); id: At5g13870.1 [Arabidopsis thaliana] endoxyloglucan transferase [Arabidopsis thaliana]
  misc_feature (1)..(215): Homolog of NCBI NO: 7447416 NR Description: xyloglucan endo-1,4-beta-D-glucanase (EC 3.2.1.-) - common nasturtium >gi|1008904|gb|AAB39950.1| xyloglucan
  misc_feature (1)..(215): Homolog of NCBI NO: 950299 NR Description: xyloglucan endotransglycosylase precursor
  misc_feature (1)..(215): Homolog of NCBI NO: 22947847 NR Description: xyloglucan endotransglycosylase [Malus x
  misc_feature (1)..(215): Homolog of NCBI NO: 3043422 NR Description: endoxyloglucan transferase [Cicer arietinum]
  misc_feature (1)..(215): Homolog of NCBI NO: 541939 NR Description: xyloglucan endo-1,4-beta-D-glucanase (EC 3.2.1.-)
  misc_feature (1)..(215): Homolog of NCBI NO: 3986172 NR Description: EXGT1 [Pisum sativum]
  misc_feature (1)..(215): Homolog of NCBI NO: 27228078 NR Description: xyloglucan endotransglycosylase precursor
  misc_feature (1)..(215): Homolog of NCBI NO: 38605155 NR Description: Probable xyloglucan
  misc_feature (1)..(215): Homolog of NCBI NO: 38605537 NR Description: Probable xyloglucan protein precursor >gi|1498168|dbj|BAA13163.1| endoxyloglucan
MHIKMVAGDSAGTVTAFYLSSQNSEHDEIDFEFLGNRTGQPYILQTNVFTGGAGNREQRINLWFDPSKDYHSYSVLWNMYQIVFFVDDVPIRVFKNSKDVGVKFPFNQPMKIYSSLWNADDWATRGGLEKTNWEKAPFVASYRGFHVDGCEASVNAKFCETQGKRWWDQKEFQDLDANQYKRLKWVRKRYTIYNYCTDRVRFPVPPPECRRDRDI

SEQ ID NO: 83446 - protein, 211 aa, Arabidopsis thaliana
  peptide (1)..(211): Ceres Seq. ID no. 12670237
  misc_feature (1)..(131): Pfam Name: Glycosyl hydrolases family 16 Pfam Description: Glycosyl hydrolases family 16
  misc_feature (1)..(211): Homolog of NCBI NO: 15240733 NR Description: xyloglucan endotransglycosylase (EXGT-A4); id: At5g13870.1 [Arabidopsis thaliana] endoxyloglucan transferase [Arabidopsis thaliana]
  misc_feature (1)..(211): Homolog of NCBI NO: 7447416 NR Description: xyloglucan endo-1,4-beta-D-glucanase (EC 3.2.1.-) - common nasturtium >gi|1008904|gb|AAB39950.1| xyloglucan
  misc_feature (1)..(211): Homolog of NCBI NO: 950299 NR Description: xyloglucan endotransglycosylase precursor
  misc_feature (1)..(211): Homolog of NCBI NO: 22947847 NR Description: xyloglucan endotransglycosylase [Malus x
  misc_feature (1)..(211): Homolog of NCBI NO: 3043422 NR Description: endoxyloglucan transferase [Cicer arietinum]
  misc_feature (1)..(211): Homolog of NCBI NO: 541939 NR Description: xyloglucan endo-1,4-beta-D-glucanase (EC 3.2.1.-)
  misc_feature (1)..(211): Homolog of NCBI NO: 3986172 NR Description: EXGT1 [Pisum sativum]
  misc_feature (1)..(211): Homolog of NCBI NO: 27228078 NR Description: xyloglucan endotransglycosylase precursor
  misc_feature (1)..(211): Homolog of NCBI NO: 38605155 NR Description: Probable xyloglucan
  misc_feature (1)..(211): Homolog of NCBI NO: 38605537 NR Description: Probable xyloglucan protein precursor >gi|1498168|dbj|BAA13163.1| endoxyloglucan
MVAGDSAGTVTAFYLSSQNSEHDEIDFEFLGNRTGQPYILQTNVFTGGAGNREQRINLWFDPSKDYHSYSVLWNMYQIVFFVDDVPIRVFKNSKDVGVKFPFNQPMKIYSSLWNADDWATRGGLEKTNWEKAPFVASYRGFHVDGCEASVNAKFCETQGKRWWDQKEFQDLDANQYKRLKWVRKRYTIYNYCTDRVRFPVPPPECRRDRDI

SEQ ID NO: 83447 - DNA, 1827 bp, Arabidopsis thaliana
  misc_feature (1)..(1827): Ceres Seq. ID no. 12670256
  misc_feature: MA Experiment ID: 20000234 Result: Up-regulated in Transcription
  misc_feature: MA Experiment 20000234 PARAMETER Experiment Name: At_Siliques_P Parameter: Age (day) Value: 21
  misc_feature: MA Experiment 20000234 PARAMETER Experiment Name: At_Siliques_P Parameter: Organism Value: A. thaliana
  misc_feature: MA Experiment 20000234 PARAMETER Experiment Name: At_Siliques_P Parameter: Plant Line Value: WS
  misc_feature: MA Experiment 20000234 PARAMETER Experiment Name: At_Siliques_P Parameter: Tissue Value: Less Than 5mm Siliques vs. Whole Plant
  misc_feature: MA Experiment ID: 20000264 Result: Up-regulated in Transcription
  misc_feature: MA Experiment 20000264 PARAMETER Experiment Name: At_Open_Flower_P Parameter: Age (day) Value: 21
  misc_feature: MA Experiment 20000264 PARAMETER Experiment Name: At_Open_Flower_P Parameter: Plant Line Value: WS
  misc_feature: MA Experiment 20000264 PARAMETER Experiment Name: At_Open_Flower_P Parameter: Tissue Value: Open Flower vs. Whole Plant
  misc_feature: MA Experiment ID: 20000265 Result: Up-regulated in Transcription
  misc_feature: MA Experiment 20000265 PARAMETER Experiment Name: At_Open_Flower_P Parameter: Age (day) Value: 21
  misc_feature: MA Experiment 20000265 PARAMETER Experiment Name: At_Open_Flower_P Parameter: Plant Line Value: WS
  misc_feature: MA Experiment 20000265 PARAMETER Experiment Name: At_Open_Flower_P Parameter: Tissue Value: Closed Flower vs. Whole Plant
  misc_feature: MA Experiment ID: 20000286 Result: Up-regulated in Transcription
  misc_feature: MA Experiment 20000286 PARAMETER Experiment Name: At_Open_Flower_P Parameter: Age (day) Value: 21
  misc_feature: MA Experiment 20000286 PARAMETER Experiment Name: At_Open_Flower_P Parameter: Plant Line Value: WS
  misc_feature: MA Experiment 20000286 PARAMETER Experiment Name: At_Open_Flower_P Parameter: Tissue Value: Half Open vs. Whole Plant
  misc_feature: MA Experiment ID: 20000794 Result: Up-regulated in Transcription
  misc_feature: MA Experiment 20000794 PARAMETER Experiment Name: At_Petals_P Parameter: Age (day) Value: 23-25 days
  misc_feature: MA Experiment 20000794 PARAMETER Experiment Name: At_Petals_P Parameter: Plant Line Value: WS
  misc_feature: MA Experiment 20000794 PARAMETER Experiment Name: At_Petals_P Parameter: Tissue Value: Petals vs. Whole plant
  misc_feature: MA Experiment ID: 20001757 Result: Down-regulated in Transcription
  misc_feature: MA Experiment 20001757 PARAMETER Experiment Name: At_50mM_NH4NO3_L-to-H_P Parameter: Timepoint (hr) Value: 6
  misc_feature: MA Experiment 20001757 PARAMETER Experiment Name: At_50mM_NH4NO3_L-to-H_P Parameter: Tissue Value: Leaf
  misc_feature: MA Experiment 20001757 PARAMETER Experiment Name: At_50mM_NH4NO3_L-to-H_P Parameter: Treatment Value: 50mM NH4NO3 vs 100mM Mannitol
  misc_feature: Pfam Name: Pkinase Pfam Description: Protein kinase domain
atgaattgttttccgtgtttcacttcacaaaagagcagaaacgctccatgcacgacgaacgagactaacgatgataacgttgaacacgacgaattcagaccacctgttgttgcgacgacgaaacggactgaagaaagagaacctgcagagcaacaaccaccggtgaaaacattcaatttccgggagttagcgacggcgaccaagaatttccggcaagaatgtcttttaggagaaggtggattcggtagggtttacaaaggaactcttcaatctactggccagttggtagctgtaaagcagctagacaagcatggattacatggtaacaaagagtttctagctgaagtcttgtcattggctaaacttgaacacccgaatcttgttaagcttataggatactgtgctgatggagatcaacggcttttagtctttgagtatgtctctggaggttcccttcaagaccatctttacgaacaaaagccaggccagaagccgatggattggataacgaggatgaagattgcgtttggtgcagcgcaaggattggattacttgcacgataaagttactccagcggtgatataccgagatttgaaagcttctaacatcttgttagatgctgagttttaccctaagctttgtgattttggtctgcataatctagagccaggaacaggtgatagcttgtttctttcttcccgggttatggatacttatggttattcagcacctgagtacactcgaggggacgatctcactgtcaagtcagatgtttatagcttcggagttgtgttgctcgaactcatcaccggtagaagagctattgacaccactaagcctaatgatgagcaaaatctagttgcttgggcacaaccgatatttaaagacccgaaaagatatccggatatggcagatcctcttttgaggaagaatttctcagagagagggttaaatcaagcagtggcaataacatcaatgtgtctacaagaggaaccaactgctcgtcctttgataagtgatgtaatggttgctcttagcttcctttcaatgtctacagaagatggtattccagccacggttccaatggaatcgttcagggacaaaagcaacaaatccagttcttcatcagactcggaggatgaagaagaagaaaaggaacaaaaagcagaaaaagaagaagaatcaacaagtaagaaaagacaagagcaggaagaaaccgcgacagattcagatgatgagtctgattcaaactccgaaaaggatcaagaagaggaacagtctcagttagagaaagccagggagtctagtagctcatcctctgactctggaagtgagagaagatcaattgatgaaacaaacgcaactgctcagagcttgaagataagttacagtaattatagctctgaggaagaagataacgagaagctaagcagtaaaagcagctgtaaatcaaacgaagaaagcactttttcgcggtatgacagcggtagagatcacgatgattcgtcaagaaacacaagcatgcgaatcaatagtcttgctcatgatgataaggaggaagacgaggaggagaatcatgaaacacggagctatagtgatcacgatgattcgccaaggaacactagcatgcgaatcaatagtctttctcatgatgatgatgaggaagaggaggaggagaatcatcaaactcggcttgagcacattcatagctcgaaatctgaagaccaaagtgtttattcagatgatgatgccggcgaaagtggtgagtcgtctttgcataggatcgaagcaaaggaagaagaacatatttcttctgaccatgattaa

SEQ ID NO: 83448 - protein, 608 aa, Arabidopsis thaliana
  peptide (1)..(608): Ceres Seq. ID no. 12670257
  misc_feature: Pfam Name: Pkinase Pfam Description: Protein kinase domain
  misc_feature (1)..(575): Homolog of NCBI NO: 15232987 NR Description: putative protein kinase; protein id: At3g02810.1 thaliana] >gi|6728981|gb|AAF26979.1|AC018363_24 putative protein [Arabidopsis thaliana] >gi|28393294|gb|AAO42074.1| putative
  misc_feature (1)..(408): Homolog of NCBI NO: 18397825 NR Description: putative protein kinase; protein id: At3g07070.1 thaliana] >gi|6642658|gb|AAF20239.1|AC012395_26 putative protein
  misc_feature (1)..(408): Homolog of NCBI NO: 28416685 NR Description: At3g07070 [Arabidopsis thaliana]
  misc_feature (1)..(371): Homolog of NCBI NO: 11994661 NR Description: receptor protein kinase-like protein [Arabidopsis
  misc_feature (45)..(458): Homolog of NCBI NO: 34907210 NR Description: putative serine/threonine kinase PBS1 protein
  misc_feature (56)..(371): Homolog of NCBI NO: 15230190 NR Description: protein kinase, putative; protein id: At3g24790.1
  misc_feature (1)..(363): Homolog of NCBI NO: 11259782 NR Description: protein kinase-like - Arabidopsis thaliana
  misc_feature (1)..(363): Homolog of NCBI NO: 30679773 NR Description: protein kinase family [Arabidopsis thaliana]
  misc_feature (3)..(447): Homolog of NCBI NO: 15238886 NR Description: protein kinase -like protein; protein id:
  misc_feature (54)..(354): Homolog of NCBI NO: 34395193 NR Description: putative protein serine/threonine kinase [Oryza
MNCFPCFTSQKSRNAPCTTNETNDDNVEHDEFRPPVVATTKRTEEREPAEQQPPVKTFNFRELATATKNFRQECLLGEGGFGRVYKGTLQSTGQLVAVKQLDKHGLHGNKEFLAEVLSLAKLEHPNLVKLIGYCADGDQRLLVFEYVSGGSLQDHLYEQKPGQKPMDWITRMKIAFGAAQGLDYLHDKVTPAVIYRDLKASNILLDAEFYPKLCDFGLHNLEPGTGDSLFLSSRVMDTYGYSAPEYTRGDDLTVKSDVYSFGVVLLELITGRRAIDTTKPNDEQNLVAWAQPIFKDPKRYPDMADPLLRKNFSERGLNQAVAITSMCLQEEPTARPLISDVMVALSFLSMSTEDGIPATVPMESFRDKSNKSSSSSDSEDEEEEKEQKAEKEEESTSKKRQEQEETATDSDDESDSNSEKDQEEEQSQLEKARESSSSSSDSGSERRSIDETNATAQSLKISYSNYSSEEEDNEKLSSKSSCKSNEESTFSRYDSGRDHDDSSRNTSMRINSLAHDDKEEDEEENHETRSYSDHDDSPRNTSMRINSLSHDDDEEEEEENHQTRLEHIHSSKSEDQSVYSDDDAGESGESSLHRIEAKEEEHISSDHD

SEQ ID NO: 83449 - protein, 443 aa, Arabidopsis thaliana
  peptide (1)..(443): Ceres Seq. ID no. 12670258
  misc_feature: Pfam Name: Pkinase Pfam Description: Protein kinase domain
  misc_feature (1)..(410): Homolog of NCBI NO: 15232987 NR Description: putative protein kinase; protein id: At3g02810.1 thaliana] >gi|6728981|gb|AAF26979.1|AC018363_24 putative protein [Arabidopsis thaliana] >gi|28393294|gb|AAO42074.1| putative
  misc_feature (1)..(243): Homolog of NCBI NO: 18397825 NR Description: putative protein kinase; protein id: At3g07070.1 thaliana] >gi|6642658|gb|AAF20239.1|AC012395_26 putative protein
  misc_feature (1)..(243): Homolog of NCBI NO: 28416685 NR Description: At3g07070 [Arabidopsis thaliana]
  misc_feature (1)..(206): Homolog of NCBI NO: 11994661 NR Description: receptor protein kinase-like protein [Arabidopsis
  misc_feature (1)..(293): Homolog of NCBI NO: 34907210 NR Description: putative serine/threonine kinase PBS1 protein
  misc_feature (1)..(206): Homolog of NCBI NO: 15230190 NR Description: protein kinase, putative; protein id: At3g24790.1
  misc_feature (1)..(198): Homolog of NCBI NO: 11259782 NR Description: protein kinase-like - Arabidopsis thaliana
  misc_feature (1)..(198): Homolog of NCBI NO: 30679773 NR Description: protein kinase family [Arabidopsis thaliana]
  misc_feature (1)..(282): Homolog of NCBI NO: 15238886 NR Description: protein kinase -like protein; protein id:
  misc_feature (1)..(189): Homolog of NCBI NO: 34395193 NR Description: putative protein serine/threonine kinase [Oryza
MDWITRMKIAFGAAQGLDYLHDKVTPAVIYRDLKASNILLDAEFYPKLCDFGLHNLEPGTGDSLFLSSRVMDTYGYSAPEYTRGDDLTVKSDVYSFGVVLLELITGRRAIDTTKPNDEQNLVAWAQPIFKDPKRYPDMADPLLRKNFSERGLNQAVAITSMCLQEEPTARPLISDVMVALSFLSMSTEDGIPATVPMESFRDKSNKSSSSSDSEDEEEEKEQKAEKEEESTSKKRQEQEETATDSDDESDSNSEKDQEEEQSQLEKARESSSSSSDSGSERRSIDETNATAQSLKISYSNYSSEEEDNEKLSSKSSCKSNEESTFSRYDSGRDHDDSSRNTSMRINSLAHDDKEEDEEENHETRSYSDHDDSPRNTSMRINSLSHDDDEEEEEENHQTRLEHIHSSKSEDQSVYSDDDAGESGESSLHRIEAKEEEHISSDHD

SEQ ID NO: 83450 - protein, 437 aa, Arabidopsis thaliana
  peptide (1)..(437): Ceres Seq. ID no. 12670259
  misc_feature: Pfam Name: Pkinase Pfam Description: Protein kinase domain
  misc_feature (1)..(404): Homolog of NCBI NO: 15232987 NR Description: putative protein kinase; protein id: At3g02810.1 thaliana] >gi|6728981|gb|AAF26979.1|AC018363_24 putative protein [Arabidopsis thaliana] >gi|28393294|gb|AAO42074.1| putative
  misc_feature (1)..(237): Homolog of NCBI NO: 18397825 NR Description: putative protein kinase; protein id: At3g07070.1 thaliana] >gi|6642658|gb|AAF20239.1|AC012395_26 putative protein
  misc_feature (1)..(237): Homolog of NCBI NO: 28416685 NR Description: At3g07070 [Arabidopsis thaliana]
  misc_feature (1)..(200): Homolog of NCBI NO: 11994661 NR Description: receptor protein kinase-like protein [Arabidopsis
  misc_feature (1)..(287): Homolog of NCBI NO: 34907210 NR Description: putative serine/threonine kinase PBS1 protein
  misc_feature (1)..(200): Homolog of NCBI NO: 15230190 NR Description: protein kinase, putative; protein id: At3g24790.1
  misc_feature (1)..(192): Homolog of NCBI NO: 11259782 NR Description: protein kinase-like - Arabidopsis thaliana
  misc_feature (1)..(192): Homolog of NCBI NO: 30679773 NR Description: protein kinase family [Arabidopsis thaliana]
  misc_feature (1)..(276): Homolog of NCBI NO: 15238886 NR Description: protein kinase -like protein; protein id:
  misc_feature (1)..(183): Homolog of NCBI NO: 34395193 NR Description: putative protein serine/threonine kinase [Oryza
MKIAFGAAQGLDYLHDKVTPAVIYRDLKASNILLDAEFYPKLCDFGLHNLEPGTGDSLFLSSRVMDTYGYSAPEYTRGDDLTVKSDVYSFGVVLLELITGRRAIDTTKPNDEQNLVAWAQPIFKDPKRYPDMADPLLRKNFSERGLNQAVAITSMCLQEEPTARPLISDVMVALSFLSMSTEDGIPATVPMESFRDKSNKSSSSSDSEDEEEEKEQKAEKEEESTSKKRQEQEETATDSDDESDSNSEKDQEEEQSQLEKARESSSSSSDSGSERRSIDETNATAQSLKISYSNYSSEEEDNEKLSSKSSCKSNEESTFSRYDSGRDHDDSSRNTSMRINSLAHDDKEEDEEENHETRSYSDHDDSPRNTSMRINSLSHDDDEEEEEENHQTRLEHIHSSKSEDQSVYSDDDAGESGESSLHRIEAKEEEHISSDHD

SEQ ID NO: 83451 - DNA, 1267 bp, Arabidopsis thaliana
  misc_feature (1)..(1267): Ceres Seq. ID no. 12670260
  misc_feature: MA Experiment ID: 20000307 Result: Up-regulated in Transcription
  misc_feature: MA Experiment 20000307 PARAMETER Experiment Name: At_Germinating_Seeds_Sub_P Parameter: Age (hr) Value: 24 vs. 0
  misc_feature: MA Experiment 20000307 PARAMETER Experiment Name: At_Germinating_Seeds_Sub_P Parameter: Organism Value: A. thaliana
  misc_feature: MA Experiment 20000307 PARAMETER Experiment Name: At_Germinating_Seeds_Sub_P Parameter: Plant Line Value: WS
  misc_feature: MA Experiment 20000307 PARAMETER Experiment Name: At_Germinating_Seeds_Sub_P Parameter: Tissue Value: Germinating Seeds
  misc_feature: MA Experiment ID: 20000314 Result: Down-regulated in Transcription
  misc_feature: MA Experiment 20000314 PARAMETER Experiment Name: At_14day_Shoots-Roots_Sub_P Parameter: Age (day) Value: 14
  misc_feature: MA Experiment 20000314 PARAMETER Experiment Name: At_14day_Shoots-Roots_Sub_P Parameter: Organism Value: A. thaliana
  misc_feature: MA Experiment 20000314 PARAMETER Experiment Name: At_14day_Shoots-Roots_Sub_P Parameter: Plant Line Value: WS
  misc_feature: MA Experiment 20000314 PARAMETER Experiment Name: At_14day_Shoots-Roots_Sub_P Parameter: Tissue Value: Roots vs. Whole Plant
  misc_feature: MA Experiment ID: 20000315 Result: Down-regulated in Transcription
  misc_feature: MA Experiment 20000315 PARAMETER Experiment Name: At_14day_Shoots-Roots_Sub_P Parameter: Age (day) Value: 14
  misc_feature: MA Experiment 20000315 PARAMETER Experiment Name: At_14day_Shoots-Roots_Sub_P Parameter: Organism Value: A. thaliana
  misc_feature: MA Experiment 20000315 PARAMETER Experiment Name: At_14day_Shoots-Roots_Sub_P Parameter: Plant Line Value: WS
  misc_feature: MA Experiment 20000315 PARAMETER Experiment Name: At_14day_Shoots-Roots_Sub_P Parameter: Tissue Value: Shoots vs. Whole Plant
  misc_feature: MA Experiment ID: 20000327 Result: Down-regulated in Transcription
  misc_feature: MA Experiment 20000327 PARAMETER Experiment Name: At_42deg_Heat_Sub_P Parameter: Age (day) Value: 14
  misc_feature: MA Experiment 20000327 PARAMETER Experiment Name: At_42deg_Heat_Sub_P Parameter: Organism Value: A. thaliana
  misc_feature: MA Experiment 20000327 PARAMETER Experiment Name: At_42deg_Heat_Sub_P Parameter: Plant Line Value: WS
  misc_feature: MA Experiment 20000327 PARAMETER Experiment Name: At_42deg_Heat_Sub_P Parameter: Temperature (deg C) Value: 42 vs. 22
  misc_feature: MA Experiment 20000327 PARAMETER Experiment Name: At_42deg_Heat_Sub_P Parameter: Timepoint (hr) Value: 1
  misc_feature: MA Experiment 20000327 PARAMETER Experiment Name: At_42deg_Heat_Sub_P Parameter: Tissue Value: Aerial
  misc_feature: MA Experiment ID: 20000348 Result: Down-regulated in Transcription
  misc_feature: MA Experiment 20000348 PARAMETER Experiment Name: At_100uM_ABA_Sub_P Parameter: Age (day) Value: 14
  misc_feature: MA Experiment 20000348 PARAMETER Experiment Name: At_100uM_ABA_Sub_P Parameter: Organism Value: A. thaliana
  misc_feature: MA Experiment 20000348 PARAMETER Experiment Name: At_100uM_ABA_Sub_P Parameter: Plant Line Value: WS
  misc_feature: MA Experiment 20000348 PARAMETER Experiment Name: At_100uM_ABA_Sub_P Parameter: Timepoint (hr) Value: 1
  misc_feature: MA Experiment 20000348 PARAMETER Experiment Name: At_100uM_ABA_Sub_P Parameter: Tissue Value: Aerial
  misc_feature: MA Experiment 20000348 PARAMETER Experiment Name: At_100uM_ABA_Sub_P Parameter: Treatment Value: 100uM ABA vs. No Treatment
  misc_feature: MA Experiment ID: 20000355 Result: Down-regulated in Transcription
  misc_feature: MA Experiment 20000355 PARAMETER Experiment Name: At_Siliques_Sub_P Parameter: Age (day) Value: 21
  misc_feature: MA Experiment 20000355 PARAMETER Experiment Name: At_Siliques_Sub_P Parameter: Organism Value: A. thaliana
  misc_feature: MA Experiment 20000355 PARAMETER Experiment Name: At_Siliques_Sub_P Parameter: Plant Line Value: WS
  misc_feature: MA Experiment 20000355 PARAMETER Experiment Name: At_Siliques_Sub_P Parameter: Tissue Value: Less Than 5mm Siliques vs. Whole Plant
  misc_feature: MA Experiment ID: 20001807 Result: Down-regulated in Transcription
  misc_feature: MA Experiment 20001807 PARAMETER Experiment Name: At_50mM_NH4NO3_L-to-H_Sub_P Parameter: Timepoint (hr) Value: 6
  misc_feature: MA Experiment 20001807 PARAMETER Experiment Name: At_50mM_NH4NO3_L-to-H_Sub_P Parameter: Tissue Value: Leaf
  misc_feature: MA Experiment 20001807 PARAMETER Experiment Name: At_50mM_NH4NO3_L-to-H_Sub_P Parameter: Treatment Value: 50mM NH4NO3 vs 100mM Mannitol
accaaaaaaaaaaaggtttattattctttgagattcctaagatatgtcttcacttgcagatttaatcaatctcgatctctccgattccactgaccagatcatcgccgagtacatatggattggtggatcgggcttggatatgagaagcaaagcaaggactttgcctggaccagtgacggatccatcgcagttaccgaaatggaactacgacggttcaagcaccggccaagctccgggcgatgacagtgaagtcatcatctaccctcaagctatcttcaaagaccccttcagaagaggcaacaacatccttgtgatgtgtgacgcatatacaccggcaggagagccgattccgacgaacaaaaggcatgcggcggctaagatctttgaagaccctagtgttgtcgccgaagaaacatggtacggaattgaacaagagtataccttgttgcaaaaggatattaagtggccggtaggttggccggtcggcggtttcccaggtcctcagggaccgtactactgtggagttggagcagacaaagcctttggaagagacatcgttgattctcattacaaagcttgtctttacgccggaatcaatgtcagtgggactaacggcgaagttatgcctggccagtgggagttccaagtcggtcccaccgttggaatcgctgccgccgatcaggtctgggttgctcgttacattcttgagaggatcacagaattggctggagttgttctgtctctagaccctaaaccaattccgggagattggaatggtgcaggggcacacacaaattacagtacgaagtcgatgagagaagatggagggtacgaggtgataaagaaagcaatagagaagcttggattgcgtcacaaggaacacattgctgcttatggtgaaggcaacgagcgtcgtctcaccggaaaacatgaaaccgccgatatcaacactttcttatggggtgtggcaaaccgtggggcatcgattagggttgggcgtgacactgagcaggctggaaaaggatactttgaagatcgtaggccagcttcgaacatggatccttacactgtgacctccatgattgctgaatccacaatcctttggaaaccatgaaagaagaaaccttgagcctcaaggaatctctataatatcagttcatgttcattcttctatggtctctttctcattctgaaacagttctcatgtgttctttgtttattatgtttgatttgaagtcttcaatttgtttctgagaacgatagttcc

SEQ ID NO: 83452 - protein, 356 aa, Arabidopsis thaliana
  peptide (1)..(356): Ceres Seq. ID no. 12670261
  misc_feature (103)..(355): Pfam Name: Glutamine synthetase, catalytic domain Pfam Description: Glutamine synthetase, catalytic domain
  misc_feature (1)..(356): Homolog of NCBI NO: 18418013 NR Description: Expressed protein; protein id: At5g16570.1, by cDNA: gi_16649124 [Arabidopsis thaliana] glutamine synthetase [Arabidopsis thaliana]
  misc_feature (1)..(356): Homolog of NCBI NO: 15240288 NR Description: glutamate--ammonia ligase; protein id: supported by cDNA: gi_16226386, supported by cDNA: gi_16930508, by cDNA: gi_19310526 [Arabidopsis thaliana]
  misc_feature (1)..(356): Homolog of NCBI NO: 121368 NR Description: Glutamine synthetase, cytosolic isozyme
  misc_feature (1)..(356): Homolog of NCBI NO: 1934756 NR Description: cytosolic glutamine synthetase [Brassica napus]
  misc_feature (1)..(356): Homolog of NCBI NO: 2213877 NR Description: glutamine synthetase [Hevea brasiliensis]
  misc_feature (1)..(356): Homolog of NCBI NO: 1835156 NR Description: glutamine synthetase [Medicago truncatula]
  misc_feature (1)..(356): Homolog of NCBI NO: 12643762 NR Description: GLUTAMINE SYNTHETASE, CYTOSOLIC ISOZYME
  misc_feature (1)..(356): Homolog of NCBI NO: 417060 NR Description: Glutamine synthetase nodule isozyme ligase) (GS) >gi|170637|gb|AAA34239.1| glutamine synthetase
  misc_feature (1)..(356): Homolog of NCBI NO: 2073448 NR Description: glutamine synthetase [Lotus japonicus]
  misc_feature (1)..(356): Homolog of NCBI NO: 481914 NR Description: glutamate-ammonia ligase (EC 6.3.1.2) - rape
MSSLADLINLDLSDSTDQIIAEYIWIGGSGLDMRSKARTLPGPVTDPSQLPKWNYDGSSTGQAPGDDSEVIIYPQAIFKDPFRRGNNILVMCDAYTPAGEPIPTNKRHAAAKIFEDPSVVAEETWYGIEQEYTLLQKDIKWPVGWPVGGFPGPQGPYYCGVGADKAFGRDIVDSHYKACLYAGINVSGTNGEVMPGQWEFQVGPTVGIAAADQVWVARYILERITELAGVVLSLDPKPIPGDWNGAGAHTNYSTKSMREDGGYEVIKKAIEKLGLRHKEHIAAYGEGNERRLTGKHETADINTFLWGVANRGASIRVGRDTEQAGKGYFEDRRPASNMDPYTVTSMIAESTILWKP

SEQ ID NO: 83453 - protein, 324 aa, Arabidopsis thaliana
  peptide (1)..(324): Ceres Seq. ID no. 12670262
  misc_feature (71)..(323): Pfam Name: Glutamine synthetase, catalytic domain Pfam Description: Glutamine synthetase, catalytic domain
  misc_feature (1)..(324): Homolog of NCBI NO: 18418013 NR Description: Expressed protein; protein id: At5g16570.1, by cDNA: gi_16649124 [Arabidopsis thaliana] glutamine synthetase [Arabidopsis thaliana]
  misc_feature (1)..(324): Homolog of NCBI NO: 15240288 NR Description: glutamate--ammonia ligase; protein id: supported by cDNA: gi_16226386, supported by cDNA: gi_16930508, by cDNA: gi_19310526 [Arabidopsis thaliana]
  misc_feature (1)..(324): Homolog of NCBI NO: 121368 NR Description: Glutamine synthetase, cytosolic isozyme
  misc_feature (1)..(324): Homolog of NCBI NO: 1934756 NR Description: cytosolic glutamine synthetase [Brassica napus]
  misc_feature (1)..(324): Homolog of NCBI NO: 2213877 NR Description: glutamine synthetase [Hevea brasiliensis]
  misc_feature (1)..(324): Homolog of NCBI NO: 1835156 NR Description: glutamine synthetase [Medicago truncatula]
  misc_feature (1)..(324): Homolog of NCBI NO: 12643762 NR Description: GLUTAMINE SYNTHETASE, CYTOSOLIC ISOZYME
  misc_feature (1)..(324): Homolog of NCBI NO: 417060 NR Description: Glutamine synthetase nodule isozyme ligase) (GS) >gi|170637|gb|AAA34239.1| glutamine synthetase
  misc_feature (1)..(324): Homolog of NCBI NO: 2073448 NR Description: glutamine synthetase [Lotus japonicus]
  misc_feature (1)..(324): Homolog of NCBI NO: 481914 NR Description: glutamate-ammonia ligase (EC 6.3.1.2) - rape
MRSKARTLPGPVTDPSQLPKWNYDGSSTGQAPGDDSEVIIYPQAIFKDPFRRGNNILVMCDAYTPAGEPIPTNKRHAAAKIFEDPSVVAEETWYGIEQEYTLLQKDIKWPVGWPVGGFPGPQGPYYCGVGADKAFGRDIVDSHYKACLYAGINVSGTNGEVMPGQWEFQVGPTVGIAAADQVWVARYILERITELAGVVLSLDPKPIPGDWNGAGAHTNYSTKSMREDGGYEVIKKAIEKLGLRHKEHIAAYGEGNERRLTGKHETADINTFLWGVANRGASIRVGRDTEQAGKGYFEDRRPASNMDPYTVTSMIAESTILWKP

SEQ ID NO: 83454 - protein, 266 aa, Arabidopsis thaliana
  peptide (1)..(266): Ceres Seq. ID no. 12670263
  misc_feature (13)..(265): Pfam Name: Glutamine synthetase, catalytic domain Pfam Description: Glutamine synthetase, catalytic domain
  misc_feature (1)..(266): Homolog of NCBI NO: 18418013 NR Description: Expressed protein; protein id: At5g16570.1, by cDNA: gi_16649124 [Arabidopsis thaliana] glutamine synthetase [Arabidopsis thaliana]
  misc_feature (1)..(266): Homolog of NCBI NO: 15240288 NR Description: glutamate--ammonia ligase; protein id: supported by cDNA: gi_16226386, supported by cDNA: gi_16930508, by cDNA: gi_19310526 [Arabidopsis thaliana]
  misc_feature (1)..(266): Homolog of NCBI NO: 121368 NR Description: Glutamine synthetase, cytosolic isozyme
  misc_feature (1)..(266): Homolog of NCBI NO: 1934756 NR Description: cytosolic glutamine synthetase [Brassica napus]
  misc_feature (1)..(266): Homolog of NCBI NO: 2213877 NR Description: glutamine synthetase [Hevea brasiliensis]
  misc_feature (1)..(266): Homolog of NCBI NO: 1835156 NR Description: glutamine synthetase [Medicago truncatula]
  misc_feature (1)..(266): Homolog of NCBI NO: 12643762 NR Description: GLUTAMINE SYNTHETASE, CYTOSOLIC ISOZYME
  misc_feature (1)..(266): Homolog of NCBI NO: 417060 NR Description: Glutamine synthetase nodule isozyme ligase) (GS) >gi|170637|gb|AAA34239.1| glutamine synthetase
  misc_feature (1)..(266): Homolog of NCBI NO: 2073448 NR Description: glutamine synthetase [Lotus japonicus]
  misc_feature (1)..(266): Homolog of NCBI NO: 481914 NR Description: glutamate-ammonia ligase (EC 6.3.1.2) - rape
MCDAYTPAGEPIPTNKRHAAAKIFEDPSVVAEETWYGIEQEYTLLQKDIKWPVGWPVGGFPGPQGPYYCGVGADKAFGRDIVDSHYKACLYAGINVSGTNGEVMPGQWEFQVGPTVGIAAADQVWVARYILERITELAGVVLSLDPKPIPGDWNGAGAHTNYSTKSMREDGGYEVIKKAIEKLGLRHKEHIAAYGEGNERRLTGKHETADINTFLWGVANRGASIRVGRDTEQAGKGYFEDRRPASNMDPYTVTSMIAESTILWKP

SEQ ID NO: 83455 - DNA, 1213 bp, Arabidopsis thaliana
  misc_feature (1)..(1213): Ceres Seq. ID no. 12670268
  misc_feature: MA Experiment ID: 20000314 Result: Up-regulated in Transcription
  misc_feature: MA Experiment 20000314 PARAMETER Experiment Name: At_14day_Shoots-Roots_Sub_P Parameter: Age (day) Value: 14
  misc_feature: MA Experiment 20000314 PARAMETER Experiment Name: At_14day_Shoots-Roots_Sub_P Parameter: Organism Value: A. thaliana
  misc_feature: MA Experiment 20000314 PARAMETER Experiment Name: At_14day_Shoots-Roots_Sub_P Parameter: Plant Line Value: WS
  misc_feature: MA Experiment 20000314 PARAMETER Experiment Name: At_14day_Shoots-Roots_Sub_P Parameter: Tissue Value: Roots vs. Whole Plant
atggggcgatcaccatgttgcgatgagaatggtctaaagaaagggccatggacacaagaggaggatgataaactgatagatcacattcaaaaacatggccatggcagctggagagctcttccaaagcaagccggtttaaaccgatgcggaaagagttgtagattaagatggaccaactacttgagacctgacatcaagagaggaaatttcactgaagaggaagaacaaactattatcaacctccattcccttcttggaaacaagtggtcgtcgatagccggtaatcttcctggaagaacggacaatgaaataaaaaactattggaacacacatttgagaaagaaacttctccaaatggggattgatccggtgacccataggccaagaaccgaccatctaaacgttttagcagctctcccgcagcttatagccgccgcaaatttcaacagcctcttgaatctcaaccaaaatgtgcaactggatgcaacaactcttgctaaagctcaactgctacacactatgattcaagtccttagcaccaataacaacaccaccaatccttctttttcttcatcaactatgcaaaacagtaacaccaatctctttggccaagcttcttacttagagaaccaaaatctttttggtcagtctcaaaacttctctcacattcttgaggatgagaatttgatggtcaaaacccaaattattgataaccctttggactctttttcttcccccatacaacccggttttcaagatgatcataattcactccctctattggttccggcgtctcctgaagaatctaaagaaactcaaaggatgatcaagaacaaagacatcgtcgattaccatcatcatgatgcttcaaacccttcatcatcaaactcaacgtttacacaagatcatcatcacccatggtgtgacactattgatgatggagcaagtgattctttttggaaagagataatagagcaaacttgttcggaaccatggccatttcctgaatagacaagattgaaaaatgattaaagagagagtatatttatttttcttgttatttgttgtcgatagagttaaaagcatatttattcttcactaatccttaccgtgttttttttgtaagaccatgtgtgtgtggtaaacattgatcttgtacaaacttgattacattactgtattaatacaaatattcgtgtttgtaattactttc

SEQ ID NO: 83456 - protein, 336 aa, Arabidopsis thaliana
  peptide (1)..(336): Ceres Seq. ID no. 12670269
  misc_feature (14)..(61): Pfam Name: Myb-like DNA-binding domain Pfam Description: Myb-like DNA-binding domain
  misc_feature (1)..(336): Homolog of NCBI NO: 30686014 NR Description: myb DNA-binding protein(AtMYB9) [Arabidopsis
  misc_feature (1)..(325): Homolog of NCBI NO: 11358678 NR Description: probable transcription factor (MYB9) - thaliana >gi|9755729|emb|CAC01841.1| putative transcription
  misc_feature (75)..(336): Homolog of NCBI NO: 11358565 NR Description: myb-related transcription factor MYB9 [imported] Arabidopsis thaliana (fragment) >gi|3941414|gb|AAC83583.1|
  misc_feature (1)..(336): Homolog of NCBI NO: 15233021 NR Description: myb family transcription factor; protein id: supported by cDNA: gi_15375289 [Arabidopsis thaliana] putative MYB family transcription factor [Arabidopsis thaliana]
  misc_feature (1)..(181): Homolog of NCBI NO: 30024598 NR Description: transcription factor MYB101 [Lotus japonicus]
  misc_feature (1)..(249): Homolog of NCBI NO: 30024600 NR Description: transcription factor MYB102 [Lotus japonicus]
  misc_feature (1)..(294): Homolog of NCBI NO: 15218730 NR Description: myb family transcription factor; protein id:
MGRSPCCDENGLKKGPWTQEEDDKLIDHIQKHGHGSWRALPKQAGLNRCGKSCRLRWTNYLRPDIKRGNFTEEEEQTIINLHSLLGNKWSSIAGNLPGRTDNEIKNYWNTHLRKKLLQMGIDPVTHRPRTDHLNVLAALPQLIAAANFNSLLNLNQNVQLDATTLAKAQLLHTMIQVLSTNNNTTNPSFSSSTMQNSNTNLFGQASYLENQNLFGQSQNFSHILEDENLMVKTQIIDNPLDSFSSPIQPGFQDDHNSLPLLVPASPEESKETQRMIKNKDIVDYHHHDASNPSSSNSTFTQDHHHPWCDTIDDGASDSFWKEIIEQTCSEPWPFPE

SEQ ID NO: 83457 - protein, 218 aa, Arabidopsis thaliana
  peptide (1)..(218): Ceres Seq. ID no. 12670270
  misc_feature (1)..(218): Homolog of NCBI NO: 30686014 NR Description: myb DNA-binding protein(AtMYB9) [Arabidopsis
  misc_feature (1)..(207): Homolog of NCBI NO: 11358678 NR Description: probable transcription factor (MYB9) - thaliana >gi|9755729|emb|CAC01841.1| putative transcription
  misc_feature (1)..(218): Homolog of NCBI NO: 11358565 NR Description: myb-related transcription factor MYB9 [imported] Arabidopsis thaliana (fragment) >gi|3941414|gb|AAC83583.1|
  misc_feature (1)..(218): Homolog of NCBI NO: 15233021 NR Description: myb family transcription factor; protein id: supported by cDNA: gi_15375289 [Arabidopsis thaliana] putative MYB family transcription factor [Arabidopsis thaliana]
  misc_feature (1)..(63): Homolog of NCBI NO: 30024598 NR Description: transcription factor MYB101 [Lotus japonicus]
  misc_feature (1)..(131): Homolog of NCBI NO: 30024600 NR Description: transcription factor MYB102 [Lotus japonicus]
  misc_feature (1)..(176): Homolog of NCBI NO: 15218730 NR Description: myb family transcription factor; protein id:
MGIDPVTHRPRTDHLNVLAALPQLIAAANFNSLLNLNQNVQLDATTLAKAQLLHTMIQVLSTNNNTTNPSFSSSTMQNSNTNLFGQASYLENQNLFGQSQNFSHILEDENLMVKTQIIDNPLDSFSSPIQPGFQDDHNSLPLLVPASPEESKETQRMIKNKDIVDYHHHDASNPSSSNSTFTQDHHHPWCDTIDDGASDSFWKEIIEQTCSEPWPFPE

SEQ ID NO: 83458 - DNA, 1032 bp, Arabidopsis thaliana
  misc_feature (1)..(1032): Ceres Seq. ID no. 12670279
  misc_feature: MA Experiment ID: 20000314 Result: Down-regulated in Transcription
  misc_feature: MA Experiment 20000314 PARAMETER Experiment Name: At_14day_Shoots-Roots_Sub_P Parameter: Age (day) Value: 14
  misc_feature: MA Experiment 20000314 PARAMETER Experiment Name: At_14day_Shoots-Roots_Sub_P Parameter: Organism Value: A. thaliana
  misc_feature: MA Experiment 20000314 PARAMETER Experiment Name: At_14day_Shoots-Roots_Sub_P Parameter: Plant Line Value: WS
  misc_feature: MA Experiment 20000314 PARAMETER Experiment Name: At_14day_Shoots-Roots_Sub_P Parameter: Tissue Value: Roots vs. Whole Plant
  misc_feature: MA Experiment ID: 20000346 Result: Up-regulated in Transcription
  misc_feature: MA Experiment 20000346 PARAMETER Experiment Name: At_2mM_SA_Sub_P Parameter: Age (day) Value: 14
  misc_feature: MA Experiment 20000346 PARAMETER Experiment Name: At_2mM_SA_Sub_P Parameter: Organism Value: A. thaliana
  misc_feature: MA Experiment 20000346 PARAMETER Experiment Name: At_2mM_SA_Sub_P Parameter: Plant Line Value: WS
  misc_feature: MA Experiment 20000346 PARAMETER Experiment Name: At_2mM_SA_Sub_P Parameter: Timepoint (hr) Value: 1
  misc_feature: MA Experiment 20000346 PARAMETER Experiment Name: At_2mM_SA_Sub_P Parameter: Tissue Value: Aerial
  misc_feature: MA Experiment 20000346 PARAMETER Experiment Name: At_2mM_SA_Sub_P Parameter: Treatment Value: 2mM SA vs. No Treatment
  misc_feature: MA Experiment ID: 20000355 Result: Down-regulated in Transcription
  misc_feature: MA Experiment 20000355 PARAMETER Experiment Name: At_Siliques_Sub_P Parameter: Age (day) Value: 21
  misc_feature: MA Experiment 20000355 PARAMETER Experiment Name: At_Siliques_Sub_P Parameter: Organism Value: A. thaliana
  misc_feature: MA Experiment 20000355 PARAMETER Experiment Name: At_Siliques_Sub_P Parameter: Plant Line Value: WS
  misc_feature: MA Experiment 20000355 PARAMETER Experiment Name: At_Siliques_Sub_P Parameter: Tissue Value: Less Than 5mm Siliques vs. Whole Plant
atgacgacgaacaagcaggtcatattcaaagaccacgtgagtggtttccctaaggaatccgatttcaatttcaccaccaccaccgtcgaacttagggttccggaaggttctaaatcggttcttgtgaagaatctctacctgtcatgcgatccttatatgcggtctcgcatggggaaacctgatccctcctctgctcttgctcaagcttacgctcccggcaagccaatctatgggtatggagtgtctagagtgatagaatctgggcatccagattacaagaaaggtgatttactctggggaatagttggatgggaggagtatagtgttattacaccaatggctcacatgcatttcaagatccaacatacagatgttccattatcctactatactggacttctcggtatgcctggtatgactgcctatgctgggttttatgaagtttgttctccaaagaaaggagagacagtttatgtgtcagctgcatctggtgcggttggtcagcttgtgggacaatttgctaagatgatgggctgttatgttgttggaagcgctggaagtaaagaaaaggttgatctcctgaagaccaagtttgggtttgatgatgcatttaactacaaggaagaatctgaccttagtgctgccctcaaaaggtgttttcccaagggcatcgacatgtactttgagaacgtaggaggcaaaatgctagatgcagtgctcttaaacatgaacccacacgggcgtatcgctgtctgtggaatgatctcacagtacaatcttgaaaatcaagaaggtgtacacaacctatccaatatcatctacaaacgaatacgcattcaaggctttgtagtggctgatttctacgacaaatacccaaagttcttggagttggtgcttccgcgcattaaagaagggaagataacgtatgtggaagatgtagctgatgggctcgagaaagctcctgaagctcttgtggggcttttccatggtaagaacgttgggaaacaagttgttgttattgctcgtgagtga

SEQ ID NO: 83459 - protein, 343 aa, Arabidopsis thaliana; identical to SEQ ID NO: 43475
  peptide (1)..(343): Ceres Seq. ID no. 12670280
  misc_feature (132)..(340): Pfam Name: Zinc-binding dehydrogenase Pfam Description: Zinc-binding dehydrogenase
  misc_feature (1)..(343): Homolog of NCBI NO: 15237890 NR Description: quinone oxidoreductase - like protein; protein At5g16990.1, supported by cDNA: gi_17529037, supported by cDNA:
  misc_feature (1)..(343): Homolog of NCBI NO: 21554121 NR Description: quinone oxidoreductase-like protein [Arabidopsis
  misc_feature (1)..(343): Homolog of NCBI NO: 1362014 NR Description: probable NADPH2:quinone reductase (EC 1.6.5.5) P2
  misc_feature (1)..(343): Homolog of NCBI NO: 15237888 NR Description: quinone oxidoreductase -like protein; protein id:
  misc_feature (1)..(343): Homolog of NCBI NO: 22326861 NR Description: quinone oxidoreductase - like protein; protein At5g17000.1, supported by cDNA: gi_16604343, supported by cDNA: [Arabidopsis thaliana] >gi|16604344|gb|AAL24178.1|
  misc_feature (1)..(343): Homolog of NCBI NO: 17529140 NR Description: putative quinone oxidoreductase [Arabidopsis
  misc_feature (1)..(343): Homolog of NCBI NO: 21539447 NR Description: quinone oxidoreductase-like protein [Arabidopsis
  misc_feature (1)..(343): Homolog of NCBI NO: 11358742 NR Description: quinone oxidoreductase-like protein - Arabidopsis
  misc_feature (4)..(343): Homolog of NCBI NO: 15228456 NR Description: putative NADP-dependent oxidoreductase; protein At3g03080.1 [Arabidopsis thaliana]
  misc_feature (3)..(343): Homolog of NCBI NO: 21593645 NR Description: allyl alcohol dehydrogenase, putative

SEQ ID NO: 83460 - protein, 291 aa, Arabidopsis thaliana; identical to SEQ ID NO: 43476
  peptide (1)..(291): Ceres Seq. ID no. 12670281
  misc_feature (80)..(288): Pfam Name: Zinc-binding dehydrogenase Pfam Description: Zinc-binding dehydrogenase
  misc_feature (1)..(291): Homolog of NCBI NO: 15237890 NR Description: quinone oxidoreductase - like protein; protein At5g16990.1, supported by cDNA: gi_17529037, supported by cDNA:
  misc_feature (1)..(291): Homolog of NCBI NO: 21554121 NR Description: quinone oxidoreductase-like protein [Arabidopsis
  misc_feature (1)..(291): Homolog of NCBI NO: 1362014 NR Description: probable NADPH2:quinone reductase (EC 1.6.5.5) P2
  misc_feature (1)..(291): Homolog of NCBI NO: 15237888 NR Description: quinone oxidoreductase -like protein; protein id:
  misc_feature (1)..(291): Homolog of NCBI NO: 22326861 NR Description: quinone oxidoreductase - like protein; protein At5g17000.1, supported by cDNA: gi_16604343, supported by cDNA: [Arabidopsis thaliana] >gi|16604344|gb|AAL24178.1|
  misc_feature (1)..(291): Homolog of NCBI NO: 17529140 NR Description: putative quinone oxidoreductase [Arabidopsis
  misc_feature (1)..(291): Homolog of NCBI NO: 21539447 NR Description: quinone oxidoreductase-like protein [Arabidopsis
  misc_feature (1)..(291): Homolog of NCBI NO: 11358742 NR Description: quinone oxidoreductase-like protein - Arabidopsis
  misc_feature (1)..(291): Homolog of NCBI NO: 15228456 NR Description: putative NADP-dependent oxidoreductase; protein At3g03080.1 [Arabidopsis thaliana]
  misc_feature (1)..(291): Homolog of NCBI NO: 21593645 NR Description: allyl alcohol dehydrogenase, putative

SEQ ID NO: 83461 - protein, 287 aa, Arabidopsis thaliana; identical to SEQ ID NO: 43477
  peptide (1)..(287): Ceres Seq. ID no. 12670282
  misc_feature (76)..(284): Pfam Name: Zinc-binding dehydrogenase Pfam Description: Zinc-binding dehydrogenase
  misc_feature (1)..(287): Homolog of NCBI NO: 15237890 NR Description: quinone oxidoreductase - like protein; protein At5g16990.1, supported by cDNA: gi_17529037, supported by cDNA:
  misc_feature (1)..(287): Homolog of NCBI NO: 21554121 NR Description: quinone oxidoreductase-like protein [Arabidopsis
  misc_feature (1)..(287): Homolog of NCBI NO: 1362014 NR Description: probable NADPH2:quinone reductase (EC 1.6.5.5) P2
  misc_feature (1)..(287): Homolog of NCBI NO: 15237888 NR Description: quinone oxidoreductase -like protein; protein id:
  misc_feature (1)..(287): Homolog of NCBI NO: 22326861 NR Description: quinone oxidoreductase - like protein; protein At5g17000.1, supported by cDNA: gi_16604343, supported by cDNA: [Arabidopsis thaliana] >gi|16604344|gb|AAL24178.1|
  misc_feature (1)..(287): Homolog of NCBI NO: 17529140 NR Description: putative quinone oxidoreductase [Arabidopsis
  misc_feature (1)..(287): Homolog of NCBI NO: 21539447 NR Description: quinone oxidoreductase-like protein [Arabidopsis
  misc_feature (1)..(287): Homolog of NCBI NO: 11358742 NR Description: quinone oxidoreductase-like protein - Arabidopsis
  misc_feature (1)..(287): Homolog of NCBI NO: 15228456 NR Description: putative NADP-dependent oxidoreductase; protein At3g03080.1 [Arabidopsis thaliana]
  misc_feature (1)..(287): Homolog of NCBI NO: 21593645 NR Description: allyl alcohol dehydrogenase, putative

SEQ ID NO: 83462 - DNA, 921 bp, Arabidopsis thaliana
  misc_feature (1)..(921): Ceres Seq. ID no. 12670296
  misc_feature: MA Experiment ID: 20000171 Result: Up-regulated in Transcription
  misc_feature: MA Experiment 20000171 PARAMETER Experiment Name: At_42deg_Heat_P Parameter: Age (day) Value: 14
  misc_feature: MA Experiment 20000171 PARAMETER Experiment Name: At_42deg_Heat_P Parameter: Organism Value: A. thaliana
  misc_feature: MA Experiment 20000171 PARAMETER Experiment Name: At_42deg_Heat_P Parameter: Plant Line Value: WS
  misc_feature: MA Experiment 20000171 PARAMETER Experiment Name: At_42deg_Heat_P Parameter: Temperature (deg C) Value: 42 vs. 22
  misc_feature: MA Experiment 20000171 PARAMETER Experiment Name: At_42deg_Heat_P Parameter: Timepoint (hr) Value: 1
  misc_feature: MA Experiment 20000171 PARAMETER Experiment Name: At_42deg_Heat_P Parameter: Tissue Value: Aerial
  misc_feature: MA Experiment ID: 20000173 Result: Up-regulated in Transcription
  misc_feature: MA Experiment 20000173 PARAMETER Experiment Name: At_42deg_Heat_P Parameter: Age (day) Value: 14
  misc_feature: MA Experiment 20000173 PARAMETER Experiment Name: At_42deg_Heat_P Parameter: Organism Value: A. thaliana
  misc_feature: MA Experiment 20000173 PARAMETER Experiment Name: At_42deg_Heat_P Parameter: Plant Line Value: WS
  misc_feature: MA Experiment 20000173 PARAMETER Experiment Name: At_42deg_Heat_P Parameter: Temperature (deg C) Value: 42 vs. 22
  misc_feature: MA Experiment 20000173 PARAMETER Experiment Name: At_42deg_Heat_P Parameter: Timepoint (hr) Value: 6
  misc_feature: MA Experiment 20000173 PARAMETER Experiment Name: At_42deg_Heat_P Parameter: Tissue Value: Aerial
  misc_feature: MA Experiment ID: 20000184 Result: Down-regulated in Transcription
  misc_feature: MA Experiment 20000184 PARAMETER Experiment Name: At_Shoots__P Parameter: Age (day) Value: 7
  misc_feature: MA Experiment 20000184 PARAMETER Experiment Name: At_Shoots__P Parameter: Tissue Value: Shoots vs. Whole Plant
  misc_feature: MA Experiment ID: 20001904 Result: Up-regulated in Transcription
  misc_feature: MA Experiment 20001904 PARAMETER Experiment Name: At_Drought_Reproduction_P Parameter: Age (day) Value: 37
  misc_feature: MA Experiment 20001904 PARAMETER Experiment Name: At_Drought_Reproduction_P Parameter: Organism Value: A. thaliana
  misc_feature: MA Experiment 20001904 PARAMETER Experiment Name: At_Drought_Reproduction_P Parameter: Plant Line Value: WS
  misc_feature: MA Experiment 20001904 PARAMETER Experiment Name: At_Drought_Reproduction_P Parameter: Timepoint (day) Value: 7
  misc_feature: MA Experiment 20001904 PARAMETER Experiment Name: At_Drought_Reproduction_P Parameter: Tissue Value: Rosettes
  misc_feature: MA Experiment 20001904 PARAMETER Experiment Name: At_Drought_Reproduction_P Parameter: Treatment Value: Drought vs. No Drought
  misc_feature: MA Experiment ID: 20001905 Result: Up-regulated in Transcription
  misc_feature: MA Experiment 20001905 PARAMETER Experiment Name: At_Drought_Reproduction_P Parameter: Age (day) Value: 40
  misc_feature: MA Experiment 20001905 PARAMETER Experiment Name: At_Drought_Reproduction_P Parameter: Organism Value: A. thaliana
  misc_feature: MA Experiment 20001905 PARAMETER Experiment Name: At_Drought_Reproduction_P Parameter: Plant Line Value: WS
  misc_feature: MA Experiment 20001905 PARAMETER Experiment Name: At_Drought_Reproduction_P Parameter: Timepoint (day) Value: 10
  misc_feature: MA Experiment 20001905 PARAMETER Experiment Name: At_Drought_Reproduction_P Parameter: Tissue Value: Rosettes
  misc_feature: MA Experiment 20001905 PARAMETER Experiment Name: At_Drought_Reproduction_P Parameter: Treatment Value: Drought vs. No Drought
attatattccgtacaatccgatcgatttcccggcgccagatctcaccgcgactcgtctactttccgatttggttcgtgttgactcagttacgattaaactatggatccaatggatatagtcggcaaatccaaggaagacgcttctcttccaaaagctacgatgactaaaattataaaggagatgttaccaccagatgttcgtgttgcaagagatgctcaagatcttctcattgaatgttgtgtagagtttataaatcttgtatcttcagaatctaatgatgtttgtaacaaagaggataaacggacgattgctcctgagcatgttctcaaggcattacaggttcttggttttggagaatacattgaagaagtctatgctgcgtatgagcaacataagtatgaaacaatgcaggacacacagaggagcgtgaaatggaaccctggagctcaaatgactgaggaggaagcagcagctgagcaacaacgtatgtttgcagaagcacgtgcaagaatgaatggaggtgtttcggttcctcaacctgaacatccagaaactgaccagagaagtccgcaaagctaactgaaaccgtaagggtaagtgttaggcaagaaaaaacaacatccttttaacattcccttgtaagttgcaaatgcgtatgttctctgtttatatgctcttagtatgatatatgttagttagtgtttcacgatctaaaaacacttgtgattcagatgtaattagtaagcattccttgttttgtgtttacttgtgtcttgactaagcatggtgggtcaggtctacacaaagcatctgattcgatgacttacaggaatcttaatgtttgtagattggataaatttggtgattggtgtaattgtttttccataaacacaatgcaatcattgtttagtgttgttaac

SEQ ID NO: 83463 - protein, 159 aa, Arabidopsis thaliana
  peptide (1)..(159): Ceres Seq. ID no. 12670297
  misc_feature (1)..(159): Homolog of NCBI NO: 30688804 NR Description: TATA-binding protein-associated phosphoprotein
  misc_feature (1)..(159): Homolog of NCBI NO: 2129748 NR Description: TATA-binding protein-associated phosphoprotein
  misc_feature (1)..(159): Homolog of NCBI NO: 18415737 NR Description: DR1-like protein; protein id: At5g08190.1, by cDNA: 30536., supported by cDNA: gi_16226437 [Arabidopsis >gi|16226438|gb|AAL16168.1|AF428400_1 AT5g08190/T22D6_130
  misc_feature (1)..(159): Homolog of NCBI NO: 30688817 NR Description: TATA-binding protein-associated phosphoprotein
  misc_feature (1)..(159): Homolog of NCBI NO: 11279032 NR Description: DR1-like protein - Arabidopsis thaliana
MDPMDIVGKSKEDASLPKATMTKIIKEMLPPDVRVARDAQDLLIECCVEFINLVSSESNDVCNKEDKRTIAPEHVLKALQVLGFGEYIEEVYAAYEQHKYETMQDTQRSVKWNPGAQMTEEEAAAEQQRMFAEARARMNGGVSVPQPEHPETDQRSPQS

SEQ ID NO: 83464 - protein, 156 aa, Arabidopsis thaliana
  peptide (1)..(156): Ceres Seq. ID no. 12670298
  misc_feature (1)..(156): Homolog of NCBI NO: 30688804 NR Description: TATA-binding protein-associated phosphoprotein
  misc_feature (1)..(156): Homolog of NCBI NO: 2129748 NR Description: TATA-binding protein-associated phosphoprotein
  misc_feature (1)..(156): Homolog of NCBI NO: 18415737 NR Description: DR1-like protein; protein id: At5g08190.1, by cDNA: 30536., supported by cDNA: gi_16226437 [Arabidopsis >gi|16226438|gb|AAL16168.1|AF428400_1 AT5g08190/T22D6_130
  misc_feature (1)..(156): Homolog of NCBI NO: 30688817 NR Description: TATA-binding protein-associated phosphoprotein
  misc_feature (1)..(156): Homolog of NCBI NO: 11279032 NR Description: DR1-like protein - Arabidopsis thaliana
MDIVGKSKEDASLPKATMTKIIKEMLPPDVRVARDAQDLLIECCVEFINLVSSESNDVCNKEDKRTIAPEHVLKALQVLGFGEYIEEVYAAYEQHKYETMQDTQRSVKWNPGAQMTEEEAAAEQQRMFAEARARMNGGVSVPQPEHPETDQRSPQS

SEQ ID NO: 83465 - protein, 139 aa, Arabidopsis thaliana
  peptide (1)..(139): Ceres Seq. ID no. 12670299
  misc_feature (1)..(139): Homolog of NCBI NO: 30688804 NR Description: TATA-binding protein-associated phosphoprotein
  misc_feature (1)..(139): Homolog of NCBI NO: 2129748 NR Description: TATA-binding protein-associated phosphoprotein
  misc_feature (1)..(139): Homolog of NCBI NO: 18415737 NR Description: DR1-like protein; protein id: At5g08190.1, by cDNA: 30536., supported by cDNA: gi_16226437 [Arabidopsis >gi|16226438|gb|AAL16168.1|AF428400_1 AT5g08190/T22D6_130
  misc_feature (1)..(139): Homolog of NCBI NO: 30688817 NR Description: TATA-binding protein-associated phosphoprotein
  misc_feature (1)..(139): Homolog of NCBI NO: 11279032 NR Description: DR1-like protein - Arabidopsis thaliana
MTKIIKEMLPPDVRVARDAQDLLIECCVEFINLVSSESNDVCNKEDKRTIAPEHVLKALQVLGFGEYIEEVYAAYEQHKYETMQDTQRSVKWNPGAQMTEEEAAAEQQRMFAEARARMNGGVSVPQPEHPETDQRSPQS

SEQ ID NO: 83466 - DNA, 1500 bp, Arabidopsis thaliana
  misc_feature (1)..(1500): Ceres Seq. ID no. 12670304
  misc_feature: MA Experiment ID: 20000171 Result: Down-regulated in Transcription
  misc_feature: MA Experiment 20000171 PARAMETER Experiment Name: At_42deg_Heat_P Parameter: Age (day) Value: 14
  misc_feature: MA Experiment 20000171 PARAMETER Experiment Name: At_42deg_Heat_P Parameter: Organism Value: A. thaliana
  misc_feature: MA Experiment 20000171 PARAMETER Experiment Name: At_42deg_Heat_P Parameter: Plant Line Value: WS
  misc_feature: MA Experiment 20000171 PARAMETER Experiment Name: At_42deg_Heat_P Parameter: Temperature (deg C) Value: 42 vs. 22
  misc_feature: MA Experiment 20000171 PARAMETER Experiment Name: At_42deg_Heat_P Parameter: Timepoint (hr) Value: 1
  misc_feature: MA Experiment 20000171 PARAMETER Experiment Name: At_42deg_Heat_P Parameter: Tissue Value: Aerial
  misc_feature: MA Experiment ID: 20000173 Result: Down-regulated in Transcription
  misc_feature: MA Experiment 20000173 PARAMETER Experiment Name: At_42deg_Heat_P Parameter: Age (day) Value: 14
  misc_feature: MA Experiment 20000173 PARAMETER Experiment Name: At_42deg_Heat_P Parameter: Organism Value: A. thaliana
  misc_feature: MA Experiment 20000173 PARAMETER Experiment Name: At_42deg_Heat_P Parameter: Plant Line Value: WS
  misc_feature: MA Experiment 20000173 PARAMETER Experiment Name: At_42deg_Heat_P Parameter: Temperature (deg C) Value: 42 vs. 22
  misc_feature: MA Experiment 20000173 PARAMETER Experiment Name: At_42deg_Heat_P Parameter: Timepoint (hr) Value: 6
  misc_feature: MA Experiment 20000173 PARAMETER Experiment Name: At_42deg_Heat_P Parameter: Tissue Value: Aerial
  misc_feature: MA Experiment ID: 20000180 Result: Up-regulated in Transcription
  misc_feature: MA Experiment 20000180 PARAMETER Experiment Name: At_Germinating_Seeds_P Parameter: Age (hr) Value: 24 vs. 0
  misc_feature: MA Experiment 20000180 PARAMETER Experiment Name: At_Germinating_Seeds_P Parameter: Tissue Value: Germinating Seeds
  misc_feature: MA Experiment ID: 20000182 Result: Down-regulated in Transcription
  misc_feature: MA Experiment 20000182 PARAMETER Experiment Name: At_2mM_SA_P Parameter: Age (day) Value: 14
  misc_feature: MA Experiment 20000182 PARAMETER Experiment Name: At_2mM_SA_P Parameter: Organism Value: A. thaliana
  misc_feature: MA Experiment 20000182 PARAMETER Experiment Name: At_2mM_SA_P Parameter: Plant Line Value: WS
  misc_feature: MA Experiment 20000182 PARAMETER Experiment Name: At_2mM_SA_P Parameter: Timepoint (hr) Value: 6
  misc_feature: MA Experiment 20000182 PARAMETER Experiment Name: At_2mM_SA_P Parameter: Tissue Value: Aerial
  misc_feature: MA Experiment 20000182 PARAMETER Experiment Name: At_2mM_SA_P Parameter: Treatment Value: 2mM SA vs. No Treatment
  misc_feature: MA Experiment ID: 20000184 Result: Down-regulated in Transcription
  misc_feature: MA Experiment 20000184 PARAMETER Experiment Name: At_Shoots__P Parameter: Age (day) Value: 7
  misc_feature: MA Experiment 20000184 PARAMETER Experiment Name: At_Shoots__P Parameter: Tissue Value: Shoots vs. Whole Plant
  misc_feature: MA Experiment ID: 20000227 Result: Up-regulated in Transcription
  misc_feature: MA Experiment 20000227 PARAMETER Experiment Name: At_Root-Tips-vs-Tops_P Parameter: Tissue Value: Root Tips vs. Root Tops
  misc_feature: MA Experiment ID: 20000264 Result: Down-regulated in Transcription
  misc_feature: MA Experiment 20000264 PARAMETER Experiment Name: At_Open_Flower_P Parameter: Age (day) Value: 21
  misc_feature: MA Experiment 20000264 PARAMETER Experiment Name: At_Open_Flower_P Parameter: Plant Line Value: WS
  misc_feature: MA Experiment 20000264 PARAMETER Experiment Name: At_Open_Flower_P Parameter: Tissue Value: Open Flower vs. Whole Plant
  misc_feature: MA Experiment ID: 20000265 Result: Down-regulated in Transcription
  misc_feature: MA Experiment 20000265 PARAMETER Experiment Name: At_Open_Flower_P Parameter: Age (day) Value: 21
  misc_feature: MA Experiment 20000265 PARAMETER Experiment Name: At_Open_Flower_P Parameter: Plant Line Value: WS
  misc_feature: MA Experiment 20000265 PARAMETER Experiment Name: At_Open_Flower_P Parameter: Tissue Value: Closed Flower vs. Whole Plant
  misc_feature: MA Experiment ID: 20000268 Result: Down-regulated in Transcription
  misc_feature: MA Experiment 20000268 PARAMETER Experiment Name: At_100mM_NaCl__P Parameter: Age (day) Value: 14
  misc_feature: MA Experiment 20000268 PARAMETER Experiment Name: At_100mM_NaCl__P Parameter: Organism Value: A. thaliana
  misc_feature: MA Experiment 20000268 PARAMETER Experiment Name: At_100mM_NaCl__P Parameter: Plant Line Value: WS
  misc_feature: MA Experiment 20000268 PARAMETER Experiment Name: At_100mM_NaCl__P Parameter: Timepoint (hr) Value: 6
  misc_feature: MA Experiment 20000268 PARAMETER Experiment Name: At_100mM_NaCl__P Parameter: Tissue Value: Whole Plant
  misc_feature: MA Experiment 20000268 PARAMETER Experiment Name: At_100mM_NaCl__P Parameter: Treatment Value: 100mM NaCl vs. No Treatment
  misc_feature: MA Experiment ID: 20000286 Result: Down-regulated in Transcription
  misc_feature: MA Experiment 20000286 PARAMETER Experiment Name: At_Open_Flower_P Parameter: Age (day) Value: 21
  misc_feature: MA Experiment 20000286 PARAMETER Experiment Name: At_Open_Flower_P Parameter: Plant Line Value: WS
  misc_feature: MA Experiment 20000286 PARAMETER Experiment Name: At_Open_Flower_P Parameter: Tissue Value: Half Open vs. Whole Plant
  misc_feature: MA Experiment ID: 20000436 Result: Down-regulated in Transcription
  misc_feature: MA Experiment 20000436 PARAMETER Experiment Name: At_Drought_P Parameter: Age (day) Value: 7
  misc_feature: MA Experiment 20000436 PARAMETER Experiment Name: At_Drought_P Parameter: Organism Value: A. thaliana
  misc_feature: MA Experiment 20000436 PARAMETER Experiment Name: At_Drought_P Parameter: Plant Line Value: WS
  misc_feature: MA Experiment 20000436 PARAMETER Experiment Name: At_Drought_P Parameter: Timepoint (hr) Value: 12
  misc_feature: MA Experiment 20000436 PARAMETER Experiment Name: At_Drought_P Parameter: Tissue Value: Whole Plant
  misc_feature: MA Experiment 20000436 PARAMETER Experiment Name: At_Drought_P Parameter: Treatment Value: Drought vs. No Drought
  misc_feature: MA Experiment ID: 20000439 Result: Down-regulated in Transcription
  misc_feature: MA Experiment 20000439 PARAMETER Experiment Name: At_Roots__P Parameter: Age (day) Value: 14 vs. 21
  misc_feature: MA Experiment 20000439 PARAMETER Experiment Name: At_Roots__P Parameter: Organism Value: A. thaliana
  misc_feature: MA Experiment 20000439 PARAMETER Experiment Name: At_Roots__P Parameter: Tissue Value: Roots vs. Whole Plant
  misc_feature: MA Experiment ID: 20000495 Result: Up-regulated in Transcription
  misc_feature: MA Experiment 20000495 PARAMETER Experiment Name: At_Guard_Cells_P Parameter: Harvest Date Value: 8/2/2002
  misc_feature: MA Experiment 20000495 PARAMETER Experiment Name: At_Guard_Cells_P Parameter: Organism Value: A. thaliana
  misc_feature: MA Experiment 20000495 PARAMETER Experiment Name: At_Guard_Cells_P Parameter: Tissue Value: Guard Cells vs. Leaves
  misc_feature: MA Experiment ID: 20000496 Result: Up-regulated in Transcription
  misc_feature: MA Experiment 20000496 PARAMETER Experiment Name: At_Guard_Cells_P Parameter: Harvest Date Value: 7/19/2002
  misc_feature: MA Experiment 20000496 PARAMETER Experiment Name: At_Guard_Cells_P Parameter: Organism Value: Canola
  misc_feature: MA Experiment 20000496 PARAMETER Experiment Name: At_Guard_Cells_P Parameter: Tissue Value: Guard Cells vs. Leaves
  misc_feature: MA Experiment ID: 20000573 Result: Up-regulated in Transcription
  misc_feature: MA Experiment 20000573 PARAMETER Experiment Name: At_100uM_ABA_Mutants__P Parameter: Organism Value: A. thaliana
  misc_feature: MA Experiment 20000573 PARAMETER Experiment Name: At_100uM_ABA_Mutants__P Parameter: Plant Line Value: CS22 vs. Ler wt
  misc_feature: MA Experiment 20000573 PARAMETER Experiment Name: At_100uM_ABA_Mutants__P Parameter: Timepoint (hr) Value: N/A
  misc_feature: MA Experiment 20000573 PARAMETER Experiment Name: At_100uM_ABA_Mutants__P Parameter: Tissue Value: Whole Plant
  misc_feature: MA Experiment 20000573 PARAMETER Experiment Name: At_100uM_ABA_Mutants__P Parameter: Treatment Value: None
  misc_feature: MA Experiment ID: 20000574 Result: Up-regulated in Transcription
  misc_feature: MA Experiment 20000574 PARAMETER Experiment Name: At_100uM_ABA_Mutants__P Parameter: Organism Value: A. thaliana
  misc_feature: MA Experiment 20000574 PARAMETER Experiment Name: At_100uM_ABA_Mutants__P Parameter: Plant Line Value: CS23 vs. Ler wt
  misc_feature: MA Experiment 20000574 PARAMETER Experiment Name: At_100uM_ABA_Mutants__P Parameter: Timepoint (hr) Value: N/A
  misc_feature: MA Experiment 20000574 PARAMETER Experiment Name: At_100uM_ABA_Mutants__P Parameter: Tissue Value: Whole Plant
  misc_feature: MA Experiment 20000574 PARAMETER Experiment Name: At_100uM_ABA_Mutants__P Parameter: Treatment Value: None
  misc_feature: MA Experiment ID: 20000606 Result: Up-regulated in Transcription
  misc_feature: MA Experiment 20000606 PARAMETER Experiment Name: At_CS8548_Mutant_P Parameter: Age (day) Value: 14
  misc_feature: MA Experiment 20000606 PARAMETER Experiment Name: At_CS8548_Mutant_P Parameter: Plant Line Value: CS8548 vs. wt
  misc_feature: MA Experiment 20000606 PARAMETER Experiment Name: At_CS8548_Mutant_P Parameter: Tissue Value: Whole Plant
  misc_feature: MA Experiment ID: 20001247 Result: Up-regulated in Transcription
  misc_feature: MA Experiment 20001247 PARAMETER Experiment Name: At_Far-red-induction_P Parameter: Age (day) Value: 7
  misc_feature: MA Experiment 20001247 PARAMETER Experiment Name: At_Far-red-induction_P Parameter: Light Value: Far-red vs. White
  misc_feature: MA Experiment 20001247 PARAMETER Experiment Name: At_Far-red-induction_P Parameter: Organism Value: A. thaliana
  misc_feature: MA Experiment 20001247 PARAMETER Experiment Name: At_Far-red-induction_P Parameter: Plant Line Value: Columbia
  misc_feature: MA Experiment 20001247 PARAMETER Experiment Name: At_Far-red-induction_P Parameter: Timepoint (hr) Value: 1
  misc_feature: MA Experiment 20001247 PARAMETER Experiment Name: At_Far-red-induction_P Parameter: Tissue Value: Whole Plant
  misc_feature: MA Experiment ID: 20001555 Result: Down-regulated in Transcription
  misc_feature: MA Experiment 20001555 PARAMETER Experiment Name: At_Drought_Soil_Dry_P Parameter: Age (day) Value: 24
  misc_feature: MA Experiment 20001555 PARAMETER Experiment Name: At_Drought_Soil_Dry_P Parameter: Organism Value: A. thaliana
  misc_feature: MA Experiment 20001555 PARAMETER Experiment Name: At_Drought_Soil_Dry_P Parameter: Plant Line Value: WS
  misc_feature: MA Experiment 20001555 PARAMETER Experiment Name: At_Drought_Soil_Dry_P Parameter: Post Timepoint (hr) Value: None
  misc_feature: MA Experiment 20001555 PARAMETER Experiment Name: At_Drought_Soil_Dry_P Parameter: Post-Treatment Value: None
  misc_feature: MA Experiment 20001555 PARAMETER Experiment Name: At_Drought_Soil_Dry_P Parameter: Timepoint (day) Value: 10
  misc_feature: MA Experiment 20001555 PARAMETER Experiment Name: At_Drought_Soil_Dry_P Parameter: Treatment Value: Drought vs. No Drought
  misc_feature: MA Experiment ID: 20001556 Result: Down-regulated in Transcription
  misc_feature: MA Experiment 20001556 PARAMETER Experiment Name: At_Drought_Soil_Dry_P Parameter: Age (day) Value: 26
  misc_feature: MA Experiment 20001556 PARAMETER Experiment Name: At_Drought_Soil_Dry_P Parameter: Organism Value: A. thaliana
  misc_feature: MA Experiment 20001556 PARAMETER Experiment Name: At_Drought_Soil_Dry_P Parameter: Plant Line Value: WS
  misc_feature: MA Experiment 20001556 PARAMETER Experiment Name: At_Drought_Soil_Dry_P Parameter: Post Timepoint (hr) Value: None
  misc_feature: MA Experiment 20001556 PARAMETER Experiment Name: At_Drought_Soil_Dry_P Parameter: Post-Treatment Value: None
  misc_feature: MA Experiment 20001556 PARAMETER Experiment Name: At_Drought_Soil_Dry_P Parameter: Timepoint (day) Value: 12
  misc_feature: MA Experiment 20001556 PARAMETER Experiment Name: At_Drought_Soil_Dry_P Parameter: Treatment Value: Drought vs. No Drought
  misc_feature: MA Experiment ID: 20001904 Result: Down-regulated in Transcription
  misc_feature: MA Experiment 20001904 PARAMETER Experiment Name: At_Drought_Reproduction_P Parameter: Age (day) Value: 37
  misc_feature: MA Experiment 20001904 PARAMETER Experiment Name: At_Drought_Reproduction_P Parameter: Organism Value: A. thaliana
  misc_feature: MA Experiment 20001904 PARAMETER Experiment Name: At_Drought_Reproduction_P Parameter: Plant Line Value: WS
  misc_feature: MA Experiment 20001904 PARAMETER Experiment Name: At_Drought_Reproduction_P Parameter: Timepoint (day) Value: 7
  misc_feature: MA Experiment 20001904 PARAMETER Experiment Name: At_Drought_Reproduction_P Parameter: Tissue Value: Rosettes
  misc_feature: MA Experiment 20001904 PARAMETER Experiment Name: At_Drought_Reproduction_P Parameter: Treatment Value: Drought vs. No Drought
  misc_feature: MA Experiment ID: 20001906 Result: Down-regulated in Transcription
  misc_feature: MA Experiment 20001906 PARAMETER Experiment Name: At_Drought_Reproduction_P Parameter: Age (day) Value: 35
  misc_feature: MA Experiment 20001906 PARAMETER Experiment Name: At_Drought_Reproduction_P Parameter: Organism Value: A. thaliana
  misc_feature: MA Experiment 20001906 PARAMETER Experiment Name: At_Drought_Reproduction_P Parameter: Plant Line Value: WS
  misc_feature: MA Experiment 20001906 PARAMETER Experiment Name: At_Drought_Reproduction_P Parameter: Timepoint (day) Value: 5
  misc_feature: MA Experiment 20001906 PARAMETER Experiment Name: At_Drought_Reproduction_P Parameter: Tissue Value: Siliques
  misc_feature: MA Experiment 20001906 PARAMETER Experiment Name: At_Drought_Reproduction_P Parameter: Treatment Value: Drought vs. No Drought
  misc_feature: MA Experiment ID: 20001908 Result: Down-regulated in Transcription
  misc_feature: MA Experiment 20001908 PARAMETER Experiment Name: At_Drought_Reproduction_P Parameter: Age (day) Value: 40
  misc_feature: MA Experiment 20001908 PARAMETER Experiment Name: At_Drought_Reproduction_P Parameter: Organism Value: A. thaliana
  misc_feature: MA Experiment 20001908 PARAMETER Experiment Name: At_Drought_Reproduction_P Parameter: Plant Line Value: WS
  misc_feature: MA Experiment 20001908 PARAMETER Experiment Name: At_Drought_Reproduction_P Parameter: Timepoint (day) Value: 10
  misc_feature: MA Experiment 20001908 PARAMETER Experiment Name: At_Drought_Reproduction_P Parameter: Tissue Value: Siliques
  misc_feature: MA Experiment 20001908 PARAMETER Experiment Name: At_Drought_Reproduction_P Parameter: Treatment Value: Drought vs. No Drought
atgggttctcatagtgttgagttctctgttcttgtcctatttcttgtgtcctttcttcttggctcaacatcagcagaaaagctgtgcagtgacaacgacggcgacaacggttgtttccggtctagggttttggcagcgcaacgagctgatcgagtgaaagagcttccgggacagccgccagtgaaattccggcaatacgccggttatgtgacggttaatgaaacacatggaagagcattgttctattggttctttgaagccactcagaatccaagcaaaaaacctgtcctcctttggctcaatggaggaccgggatgttcatcaatcggattcggagctgcagaagaactgggaccattcttcccacaaaactcgagtcagcctaaactcaagctaaatccatacagctggaacaaagcggcgaatttgttattcttggaatcgccggttggagttggattctcctatactaacacaagccgtgatataaaacaactcggcgacactgtcacagcgagagactcgtacaacttccttgtcaactggttcaagagatttccccagtacaagtcacacgacttctacattgccggagaaagctacgccggccattacgtcccacaactttcggagctcatctacaaagaaaacaagattgcgtccaagaaagatttcattaatctcaagggtttaatgataggaaacgcgttattggatgacgaaacggatcaaaaggggatgatagaatatgcatgggatcacgcggtgatatcagatgcattgtacgagaaagtgaacaaaaactgcgatttcaaacaaaaacttgtgaccaaggaatgcaacgacgctttagatgagtattttgatgtatacaagatccttgacatgtacagtctgtacgctccaaagtgtgtccccacctccacgaactcctctacttctcattcagtcgccggaaaccgccccctacccgcattccgaagcattctacgaccccgtctcatctctcacaatgaaggatggaggaggatggccgccgggtacgatccatgtgcatcagagtatacagaaaaatatatgaacagaaaagatgttcaggaggcacttcacgctaatgtcaccaacatctcttacccttggactcattgcagtgacactgtctcattctggtctgacgctcccgcttctatgcttccaaccttaagaacacttgtttcagcgggattacgcgtatgggttttcagtggggatacagacgggcgaatccccgtgaccgcaaccagatactcactaaagaagctaggtcttaagatagtccaagactggacaccttggtacaccaaactacaggtcggagggtggacggtggagtatgacggtttaatgtttgtgacggtaagaggagcgggacaccaggttccgacatttaaacctagagaagctcttcagctcattcatcattttctaggcaataagaaacttcctacttttcccttttga

SEQ ID NO: 83467 - protein, 499 aa, Arabidopsis thaliana
  peptide (1)..(499): Ceres Seq. ID no. 12670305
  misc_feature (1)..(499): Homolog of NCBI NO: 10177810 NR Description: serine carboxypeptidase II-like protein
  misc_feature (104)..(499): Homolog of NCBI NO: 30688865 NR Description: serine carboxypeptidase -related [Arabidopsis
  misc_feature (104)..(451): Homolog of NCBI NO: 30688861 NR Description: serine carboxypeptidase -related [Arabidopsis
  misc_feature (41)..(459): Homolog of NCBI NO: 38344436 NR Description: OSJNBa0038O10.8 [Oryza sativa (japonica
  misc_feature (442)..(495): Homolog of NCBI NO: 38344436 NR Description: OSJNBa0038O10.8 [Oryza sativa (japonica
  misc_feature (50)..(499): Homolog of NCBI NO: 15241571 NR Description: serine-type carboxypeptidase II-like protein; id: At5g08260.1, supported by cDNA: gi_13877962, supported by gi_17065641 [Arabidopsis thaliana] >gi|11264740|pir||T50511
  misc_feature (47)..(304): Homolog of NCBI NO: 10140766 NR Description: putative serine carboxypeptidase [Oryza sativa]
  misc_feature (343)..(499): Homolog of NCBI NO: 10140766 NR Description: putative serine carboxypeptidase [Oryza sativa]
  misc_feature (47)..(304): Homolog of NCBI NO: 37536528 NR Description: putative serine carboxypeptidase [Oryza sativa
  misc_feature (343)..(499): Homolog of NCBI NO: 37536528 NR Description: putative serine carboxypeptidase [Oryza sativa
MGSHSVEFSVLVLFLVSFLLGSTSAEKLCSDNDGDNGCFRSRVLAAQRADRVKELPGQPPVKFRQYAGYVTVNETHGRALFYWFFEATQNPSKKPVLLWLNGGPGCSSIGFGAAEELGPFFPQNSSQPKLKLNPYSWNKAANLLFLESPVGVGFSYTNTSRDIKQLGDTVTARDSYNFLVNWFKRFPQYKSHDFYIAGESYAGHYVPQLSELIYKENKIASKKDFINLKGLMIGNALLDDETDQKGMIEYAWDHAVISDALYEKVNKNCDFKQKLVTKECNDALDEYFDVYKILDMYSLYAPKCVPTSTNSSTSHSVAGNRPLPAFRSILRPRLISHNEGWRRMAAGYDPCASEYTEKYMNRKDVQEALHANVTNISYPWTHCSDTVSFWSDAPASMLPTLRTLVSAGLRVWVFSGDTDGRIPVTATRYSLKKLGLKIVQDWTPWYTKLQVGGWTVEYDGLMFVTVRGAGHQVPTFKPREALQLIHHFLGNKKLPTFPF

SEQ ID NO: 83468 - protein, 268 aa, Arabidopsis thaliana
  peptide (1)..(268): Ceres Seq. ID no. 12670306
  misc_feature (1)..(268): Homolog of NCBI NO: 10177810 NR Description: serine carboxypeptidase II-like protein
  misc_feature (1)..(268): Homolog of NCBI NO: 30688865 NR Description: serine carboxypeptidase -related [Arabidopsis
  misc_feature (1)..(220): Homolog of NCBI NO: 30688861 NR Description: serine carboxypeptidase -related [Arabidopsis
  misc_feature (1)..(228): Homolog of NCBI NO: 38344436 NR Description: OSJNBa0038O10.8 [Oryza sativa (japonica
  misc_feature (211)..(264): Homolog of NCBI NO: 38344436 NR Description: OSJNBa0038O10.8 [Oryza sativa (japonica
  misc_feature (1)..(268): Homolog of NCBI NO: 15241571 NR Description: serine-type carboxypeptidase II-like protein; id: At5g08260.1, supported by cDNA: gi_13877962, supported by gi_17065641 [Arabidopsis thaliana] >gi|11264740|pir||T50511
  misc_feature (1)..(73): Homolog of NCBI NO: 10140766 NR Description: putative serine carboxypeptidase [Oryza sativa]
  misc_feature (112)..(268): Homolog of NCBI NO: 10140766 NR Description: putative serine carboxypeptidase [Oryza sativa]
  misc_feature (1)..(73): Homolog of NCBI NO: 37536528 NR Description: putative serine carboxypeptidase [Oryza sativa
  misc_feature (112)..(268): Homolog of NCBI NO: 37536528 NR Description: putative serine carboxypeptidase [Oryza sativa
MIGNALLDDETDQKGMIEYAWDHAVISDALYEKVNKNCDFKQKLVTKECNDALDEYFDVYKILDMYSLYAPKCVPTSTNSSTSHSVAGNRPLPAFRSILRPRLISHNEGWRRMAAGYDPCASEYTEKYMNRKDVQEALHANVTNISYPWTHCSDTVSFWSDAPASMLPTLRTLVSAGLRVWVFSGDTDGRIPVTATRYSLKKLGLKIVQDWTPWYTKLQVGGWTVEYDGLMFVTVRGAGHQVPTFKPREALQLIHHFLGNKKLPTFPF

SEQ ID NO: 83469 - protein, 253 aa, Arabidopsis thaliana
  peptide (1)..(253): Ceres Seq. ID no. 12670307
  misc_feature (1)..(253): Homolog of NCBI NO: 10177810 NR Description: serine carboxypeptidase II-like protein
  misc_feature (1)..(253): Homolog of NCBI NO: 30688865 NR Description: serine carboxypeptidase -related [Arabidopsis
  misc_feature (1)..(205): Homolog of NCBI NO: 30688861 NR Description: serine carboxypeptidase -related [Arabidopsis
  misc_feature (1)..(213): Homolog of NCBI NO: 38344436 NR Description: OSJNBa0038O10.8 [Oryza sativa (japonica
  misc_feature (196)..(249): Homolog of NCBI NO: 38344436 NR Description: OSJNBa0038O10.8 [Oryza sativa (japonica
  misc_feature (1)..(253): Homolog of NCBI NO: 15241571 NR Description: serine-type carboxypeptidase II-like protein; id: At5g08260.1, supported by cDNA: gi_13877962, supported by gi_17065641 [Arabidopsis thaliana] >gi|11264740|pir||T50511
  misc_feature (1)..(58): Homolog of NCBI NO: 10140766 NR Description: putative serine carboxypeptidase [Oryza sativa]
  misc_feature (97)..(253): Homolog of NCBI NO: 10140766 NR Description: putative serine carboxypeptidase [Oryza sativa]
  misc_feature (1)..(58): Homolog of NCBI NO: 37536528 NR Description: putative serine carboxypeptidase [Oryza sativa
  misc_feature (97)..(253): Homolog of NCBI NO: 37536528 NR Description: putative serine carboxypeptidase [Oryza sativa
MIEYAWDHAVISDALYEKVNKNCDFKQKLVTKECNDALDEYFDVYKILDMYSLYAPKCVPTSTNSSTSHSVAGNRPLPAFRSILRPRLISHNEGWRRMAAGYDPCASEYTEKYMNRKDVQEALHANVTNISYPWTHCSDTVSFWSDAPASMLPTLRTLVSAGLRVWVFSGDTDGRIPVTATRYSLKKLGLKIVQDWTPWYTKLQVGGWTVEYDGLMFVTVRGAGHQVPTFKPREALQLIHHFLGNKKLPTFPF

SEQ ID NO: 83470 - DNA, 906 bp, Arabidopsis thaliana
  misc_feature (1)..(906): Ceres Seq. ID no. 12670312
  misc_feature: MA Experiment ID: 20000227 Result: Down-regulated in Transcription
  misc_feature: MA Experiment 20000227 PARAMETER Experiment Name: At_Root-Tips-vs-Tops_P Parameter: Tissue Value: Root Tips vs. Root Tops
  misc_feature: MA Experiment ID: 20000437 Result: Up-regulated in Transcription
  misc_feature: MA Experiment 20000437 PARAMETER Experiment Name: At_Drought_P Parameter: Age (day) Value: 8
  misc_feature: MA Experiment 20000437 PARAMETER Experiment Name: At_Drought_P Parameter: Organism Value: A. thaliana
  misc_feature: MA Experiment 20000437 PARAMETER Experiment Name: At_Drought_P Parameter: Plant Line Value: WS
  misc_feature: MA Experiment 20000437 PARAMETER Experiment Name: At_Drought_P Parameter: Timepoint (hr) Value: 24
  misc_feature: MA Experiment 20000437 PARAMETER Experiment Name: At_Drought_P Parameter: Tissue Value: Whole Plant
  misc_feature: MA Experiment 20000437 PARAMETER Experiment Name: At_Drought_P Parameter: Treatment Value: Drought vs. No Drought
  misc_feature: MA Experiment ID: 20001248 Result: Up-regulated in Transcription
  misc_feature: MA Experiment 20001248 PARAMETER Experiment Name: At_Far-red-induction_P Parameter: Age (day) Value: 7
  misc_feature: MA Experiment 20001248 PARAMETER Experiment Name: At_Far-red-induction_P Parameter: Light Value: Far-red vs. White
  misc_feature: MA Experiment 20001248 PARAMETER Experiment Name: At_Far-red-induction_P Parameter: Organism Value: A. thaliana
  misc_feature: MA Experiment 20001248 PARAMETER Experiment Name: At_Far-red-induction_P Parameter: Plant Line Value: Columbia
  misc_feature: MA Experiment 20001248 PARAMETER Experiment Name: At_Far-red-induction_P Parameter: Timepoint (hr) Value: 4
  misc_feature: MA Experiment 20001248 PARAMETER Experiment Name: At_Far-red-induction_P Parameter: Tissue Value: Whole Plant
  misc_feature: MA Experiment ID: 20001450 Result: Up-regulated in Transcription
  misc_feature: MA Experiment 20001450 PARAMETER Experiment Name: At_Far-red-induction_P Parameter: Age (day) Value: 7
  misc_feature: MA Experiment 20001450 PARAMETER Experiment Name: At_Far-red-induction_P Parameter: Light Value: Far-red vs. White
  misc_feature: MA Experiment 20001450 PARAMETER Experiment Name: At_Far-red-induction_P Parameter: Organism Value: A. thaliana
  misc_feature: MA Experiment 20001450 PARAMETER Experiment Name: At_Far-red-induction_P Parameter: Plant Line Value: Columbia
  misc_feature: MA Experiment 20001450 PARAMETER Experiment Name: At_Far-red-induction_P Parameter: Timepoint (hr) Value: 8
  misc_feature: MA Experiment 20001450 PARAMETER Experiment Name: At_Far-red-induction_P Parameter: Tissue Value: Whole Plant
  misc_feature: MA Experiment ID: 20001451 Result: Up-regulated in Transcription
  misc_feature: MA Experiment 20001451 PARAMETER Experiment Name: At_Far-red-induction_P Parameter: Age (day) Value: 7
  misc_feature: MA Experiment 20001451 PARAMETER Experiment Name: At_Far-red-induction_P Parameter: Light Value: Far-red vs. White
  misc_feature: MA Experiment 20001451 PARAMETER Experiment Name: At_Far-red-induction_P Parameter: Organism Value: A. thaliana
  misc_feature: MA Experiment 20001451 PARAMETER Experiment Name: At_Far-red-induction_P Parameter: Plant Line Value: Columbia
  misc_feature: MA Experiment 20001451 PARAMETER Experiment Name: At_Far-red-induction_P Parameter: Timepoint (hr) Value: 24
  misc_feature: MA Experiment 20001451 PARAMETER Experiment Name: At_Far-red-induction_P Parameter: Tissue Value: Whole Plant
  misc_feature: MA Experiment ID: 20001911 Result: Up-regulated in Transcription
  misc_feature: MA Experiment 20001911 PARAMETER Experiment Name: At_Drought_Reproduction_P Parameter: Age (day) Value: 40
  misc_feature: MA Experiment 20001911 PARAMETER Experiment Name: At_Drought_Reproduction_P Parameter: Organism Value: A. thaliana
  misc_feature: MA Experiment 20001911 PARAMETER Experiment Name: At_Drought_Reproduction_P Parameter: Plant Line Value: WS
  misc_feature: MA Experiment 20001911 PARAMETER Experiment Name: At_Drought_Reproduction_P Parameter: Timepoint (day) Value: 10
  misc_feature: MA Experiment 20001911 PARAMETER Experiment Name: At_Drought_Reproduction_P Parameter: Tissue Value: Flowers
  misc_feature: MA Experiment 20001911 PARAMETER Experiment Name: At_Drought_Reproduction_P Parameter: Treatment Value: Drought vs. No Drought
atgaatgggagagttagaactaattttgagaggtttctcgaatgttcatctccacgtgtcccgattcaattttatactcaggcaaggggatcgtcttcttcttcaccaatagctttgggagctattgaagaagaagaagtgagaaagcctcgcatcgtcctcaatgatatttggtctgcctgtaaaaactggagcactgttggtatcgaagtccctctttcgctggaaaacttcgactccgatgttaaacagtactataatccttcactctccgccattcagatctttaccatcaaacccttctctgatgattcaaggagctctgccattgggatagatggtacagagacaggatctgctataactgactctgacagcaacggcaagcttcagtgtttggatgctggtgacttgggctacctttattttcaatataatgaggtagaaaggccatttgataggtttcctctcactttcaagatggctgacctagctgaggagcacactggactgtctagtctgacgagttcagatctttctccaaatagctggatttcgatagcttggtatcccatttatccaattccaccagtgataggcgtggacgggatatctgccgctttcctaacgtaccatttattgaagccaaactttccagaaacaattggtaaggatgataaggggaatgaacaaggagagtcaagtacaccagaagttctacttcctccatttggagcaatgacttacaaggcctttggtaacctgtggatgatgcctgggacatcagattatcagaacagagagatgaatgaagaatctgctgactcgtggctgagaaaacgcggcttctcccacagcgatttcaacttctttatgtcccgtaagttttacggcggaccctattaa

SEQ ID NO: 83471 - protein, 301 aa, Arabidopsis thaliana
  peptide (1)..(301): Ceres Seq. ID no. 12670313
  misc_feature (7)..(291): Pfam Name: Protein of unknown function (DUF789) Pfam Description: Protein of unknown function (DUF789)
  misc_feature (1)..(301): Homolog of NCBI NO: 15237306 NR Description: putative protein; protein id: At5g23380.1 thaliana] >gi|9758537|dbj|BAB08944.1|
  misc_feature (7)..(299): Homolog of NCBI NO: 22328289 NR Description: hypothetical protein; protein id: At4g03420.1, by cDNA: gi_18650615, supported by cDNA: gi_20453246 [Arabidopsis >gi|18650616|gb|AAL75907.1| AT4g03420/F9H3_4 [Arabidopsis
  misc_feature (7)..(291): Homolog of NCBI NO: 25373431 NR Description: hypothetical protein AT4g03420 [imported] - thaliana >gi|4206196|gb|AAD11584.1|AAD11584 hypothetical protein thaliana] >gi|7270212|emb|CAB77827.1| hypothetical protein
  misc_feature (6)..(291): Homolog of NCBI NO: 18379117 NR Description: expressed protein; protein id: At1g03610.1, by cDNA: 123030., supported by cDNA: gi_18958012 [Arabidopsis
  misc_feature (6)..(291): Homolog of NCBI NO: 18958013 NR Description: At1g03610/F21B7_13 [Arabidopsis thaliana]
  misc_feature (6)..(291): Homolog of NCBI NO: 9280648 NR Description: F21B7.22 [Arabidopsis thaliana]
  misc_feature (139)..(294): Homolog of NCBI NO: 22329567 NR Description: hypothetical protein; protein id: At1g15030.1, by cDNA: gi_17979166, supported by cDNA: gi_20259122 [Arabidopsis
  misc_feature (7)..(128): Homolog of NCBI NO: 22329567 NR Description: hypothetical protein; protein id: At1g15030.1, by cDNA: gi_17979166, supported by cDNA: gi_20259122 [Arabidopsis
  misc_feature (136)..(294): Homolog of NCBI NO: 18379188 NR Description: predicted by genscan and genefinder; protein id: supported by cDNA: 8949. [Arabidopsis thaliana]
  misc_feature (7)..(137): Homolog of NCBI NO: 18379188 NR Description: predicted by genscan and genefinder; protein id: supported by cDNA: 8949. [Arabidopsis thaliana]
MNGRVRTNFERFLECSSPRVPIQFYTQARGSSSSSPIALGAIEEEEVRKPRIVLNDIWSACKNWSTVGIEVPLSLENFDSDVKQYYNPSLSAIQIFTIKPFSDDSRSSAIGIDGTETGSAITDSDSNGKLQCLDAGDLGYLYFQYNEVERPFDRFPLTFKMADLAEEHTGLSSLTSSDLSPNSWISIAWYPIYPIPPVIGVDGISAAFLTYHLLKPNFPETIGKDDKGNEQGESSTPEVLLPPFGAMTYKAFGNLWMMPGTSDYQNREMNEESADSWLRKRGFSHSDFNFFMSRKFYGGPY

SEQ ID NO: 83472 - DNA, 693 bp, Arabidopsis thaliana
  misc_feature (1)..(693): Ceres Seq. ID no. 12670318
  misc_feature: MA Experiment ID: 20000180 Result: Down-regulated in Transcription
  misc_feature: MA Experiment 20000180 PARAMETER Experiment Name: At_Germinating_Seeds_P Parameter: Age (hr) Value: 24 vs. 0
  misc_feature: MA Experiment 20000180 PARAMETER Experiment Name: At_Germinating_Seeds_P Parameter: Tissue Value: Germinating Seeds
  misc_feature: MA Experiment ID: 20001451 Result: Up-regulated in Transcription
  misc_feature: MA Experiment 20001451 PARAMETER Experiment Name: At_Far-red-induction_P Parameter: Age (day) Value: 7
  misc_feature: MA Experiment 20001451 PARAMETER Experiment Name: At_Far-red-induction_P Parameter: Light Value: Far-red vs. White
  misc_feature: MA Experiment 20001451 PARAMETER Experiment Name: At_Far-red-induction_P Parameter: Organism Value: A. thaliana
  misc_feature: MA Experiment 20001451 PARAMETER Experiment Name: At_Far-red-induction_P Parameter: Plant Line Value: Columbia
  misc_feature: MA Experiment 20001451 PARAMETER Experiment Name: At_Far-red-induction_P Parameter: Timepoint (hr) Value: 24
  misc_feature: MA Experiment 20001451 PARAMETER Experiment Name: At_Far-red-induction_P Parameter: Tissue Value: Whole Plant
atgagtaaacgaaaacgtccggatccgaaatcatcgggaggtgatctaaacgagccacacgagaagaagcttctggatctgattcgaataaaccaaggaagaggcgcaactatgttcgaattgaaacgcgagaaaacgatcccagcaactatagttactcgattgatcgcttctctacggaagaagaatctcatcaaagaagtagcaaacatgaacaacaaaggtgtcaaacattatcttgcaatggagtttgagccttgtagtgaacttactggtggtgaatggtacactgatggagctcttgacctgtcgaaaatcgaagatttgaaagccaagtgtgtgatgattttggagaggcataggcagagggttgttactttggaggttttgtgtgggtattttgttaaagaggagaagctgagtgttgatcagactaaggagatacttaagaacttgattttggataatttgatcatggaggtgaagagtaatggaatgaatgagtttgcttctacgagaatcggagaagtttgctacaggttgaccgggaaaaagttcggtaatggcgaaccgagagctggagcttttgcttcgattccttgcggggtttgtccgcatatagcgatctgttcacctgatggtgttatctctcccactacatgtgtttattttcagaaatggttagacttttag

SEQ ID NO: 83473 - protein, 230 aa, Arabidopsis thaliana
  peptide (1)..(230): Ceres Seq. ID no. 12670319
  misc_feature (1)..(229): Pfam Name: RNA polymerase Rpc34 subunit Pfam Description: RNA polymerase Rpc34 subunit
  misc_feature (1)..(230): Homolog of NCBI NO: 15237811 NR Description: unknown protein; protein id: At5g23710.1 thaliana] >gi|8809689|dbj|BAA97230.1| gene_id:MQM1.2~unknown
  misc_feature (24)..(229): Homolog of NCBI NO: 28828938 NR Description: similar to Mus musculus (Mouse). 16 days neonate
  misc_feature (3)..(229): Homolog of NCBI NO: 24648960 NR Description: CG5380-PA [Drosophila melanogaster]
  misc_feature (18)..(229): Homolog of NCBI NO: 19075898 NR Description: dna-directed rna polymerase iii subunit
  misc_feature (8)..(230): Homolog of NCBI NO: 39794390 NR Description: Unknown (protein for MGC:76106) [Silurana
  misc_feature (10)..(230): Homolog of NCBI NO: 30353810 NR Description: Unknown (protein for MGC:56299) [Danio rerio]
  misc_feature (3)..(230): Homolog of NCBI NO: 26325236 NR Description: unnamed protein product [Mus musculus]
  misc_feature (10)..(230): Homolog of NCBI NO: 27754160 NR Description: RIKEN cDNA 2810411G20; RIKEN cDNA 3010019O03 gene
  misc_feature (10)..(230): Homolog of NCBI NO: 27703680 NR Description: similar to DNA-directed RNA polymerases III 39
  misc_feature (10)..(230): Homolog of NCBI NO: 33598952 NR Description: DNA-directed RNA polymerase III 39 kDa F; DNA- directed RNA polymerases III 39 kDa polypeptide; RNA III C39 subunit [Homo sapiens] >gi|20139728|sp|Q9H1D9|RPC6_HUMAN
MSKRKRPDPKSSGGDLNEPHEKKLLDLIRINQGRGATMFELKREKTIPATIVTRLIASLRKKNLIKEVANMNNKGVKHYLAMEFEPCSELTGGEWYTDGALDLSKIEDLKAKCVMILERHRQRVVTLEVLCGYFVKEEKLSVDQTKEILKNLILDNLIMEVKSNGMNEFASTRIGEVCYRLTGKKFGNGEPRAGAFASIPCGVCPHIAICSPDGVISPTTCVYFQKWLDF

SEQ ID NO: 83474 - protein, 193 aa, Arabidopsis thaliana
  peptide (1)..(193): Ceres Seq. ID no. 12670320
  misc_feature (1)..(192): Pfam Name: RNA polymerase Rpc34 subunit Pfam Description: RNA polymerase Rpc34 subunit
  misc_feature (1)..(193): Homolog of NCBI NO: 15237811 NR Description: unknown protein; protein id: At5g23710.1 thaliana] >gi|8809689|dbj|BAA97230.1| gene_id:MQM1.2~unknown
  misc_feature (1)..(192): Homolog of NCBI NO: 28828938 NR Description: similar to Mus musculus (Mouse). 16 days neonate
  misc_feature (1)..(192): Homolog of NCBI NO: 24648960 NR Description: CG5380-PA [Drosophila melanogaster]
  misc_feature (1)..(192): Homolog of NCBI NO: 19075898 NR Description: dna-directed rna polymerase iii subunit
  misc_feature (1)..(193): Homolog of NCBI NO: 39794390 NR Description: Unknown (protein for MGC:76106) [Silurana
  misc_feature (1)..(193): Homolog of NCBI NO: 30353810 NR Description: Unknown (protein for MGC:56299) [Danio rerio]
  misc_feature (1)..(193): Homolog of NCBI NO: 26325236 NR Description: unnamed protein product [Mus musculus]
  misc_feature (1)..(193): Homolog of NCBI NO: 27754160 NR Description: RIKEN cDNA 2810411G20; RIKEN cDNA 3010019O03 gene
  misc_feature (1)..(193): Homolog of NCBI NO: 27703680 NR Description: similar to DNA-directed RNA polymerases III 39
  misc_feature (1)..(193): Homolog of NCBI NO: 33598952 NR Description: DNA-directed RNA polymerase III 39 kDa F; DNA- directed RNA polymerases III 39 kDa polypeptide; RNA III C39 subunit [Homo sapiens] >gi|20139728|sp|Q9H1D9|RPC6_HUMAN
MFELKREKTIPATIVTRLIASLRKKNLIKEVANMNNKGVKHYLAMEFEPCSELTGGEWYTDGALDLSKIEDLKAKCVMILERHRQRVVTLEVLCGYFVKEEKLSVDQTKEILKNLILDNLIMEVKSNGMNEFASTRIGEVCYRLTGKKFGNGEPRAGAFASIPCGVCPHIAICSPDGVISPTTCVYFQKWLDF

SEQ ID NO: 83475 - protein, 160 aa, Arabidopsis thaliana
  peptide (1)..(160): Ceres Seq. ID no. 12670321
  misc_feature (1)..(159): Pfam Name: RNA polymerase Rpc34 subunit Pfam Description: RNA polymerase Rpc34 subunit
  misc_feature (1)..(160): Homolog of NCBI NO: 15237811 NR Description: unknown protein; protein id: At5g23710.1 thaliana] >gi|8809689|dbj|BAA97230.1| gene_id:MQM1.2~unknown
  misc_feature (1)..(159): Homolog of NCBI NO: 28828938 NR Description: similar to Mus musculus (Mouse). 16 days neonate
  misc_feature (1)..(159): Homolog of NCBI NO: 24648960 NR Description: CG5380-PA [Drosophila melanogaster]
  misc_feature (1)..(159): Homolog of NCBI NO: 19075898 NR Description: dna-directed rna polymerase iii subunit
  misc_feature (1)..(160): Homolog of NCBI NO: 39794390 NR Description: Unknown (protein for MGC:76106) [Silurana
  misc_feature (1)..(160): Homolog of NCBI NO: 30353810 NR Description: Unknown (protein for MGC:56299) [Danio rerio]
  misc_feature (1)..(160): Homolog of NCBI NO: 26325236 NR Description: unnamed protein product [Mus musculus]
  misc_feature (1)..(160): Homolog of NCBI NO: 27754160 NR Description: RIKEN cDNA 2810411G20; RIKEN cDNA 3010019O03 gene
  misc_feature (1)..(160): Homolog of NCBI NO: 27703680 NR Description: similar to DNA-directed RNA polymerases III 39
  misc_feature (1)..(160): Homolog of NCBI NO: 33598952 NR Description: DNA-directed RNA polymerase III 39 kDa F; DNA- directed RNA polymerases III 39 kDa polypeptide; RNA III C39 subunit [Homo sapiens] >gi|20139728|sp|Q9H1D9|RPC6_HUMAN
MNNKGVKHYLAMEFEPCSELTGGEWYTDGALDLSKIEDLKAKCVMILERHRQRVVTLEVLCGYFVKEEKLSVDQTKEILKNLILDNLIMEVKSNGMNEFASTRIGEVCYRLTGKKFGNGEPRAGAFASIPCGVCPHIAICSPDGVISPTTCVYFQKWLDF

SEQ ID NO: 83476 - DNA, 1725 bp, Arabidopsis thaliana
  misc_feature (1)..(1725): Ceres Seq. ID no. 12670341
  misc_feature: MA Experiment ID: 20000182 Result: Up-regulated in Transcription
  misc_feature: MA Experiment 20000182 PARAMETER Experiment Name: At_2mM_SA_P Parameter: Age (day) Value: 14
  misc_feature: MA Experiment 20000182 PARAMETER Experiment Name: At_2mM_SA_P Parameter: Organism Value: A. thaliana
  misc_feature: MA Experiment 20000182 PARAMETER Experiment Name: At_2mM_SA_P Parameter: Plant Line Value: WS
  misc_feature: MA Experiment 20000182 PARAMETER Experiment Name: At_2mM_SA_P Parameter: Timepoint (hr) Value: 6
  misc_feature: MA Experiment 20000182 PARAMETER Experiment Name: At_2mM_SA_P Parameter: Tissue Value: Aerial
  misc_feature: MA Experiment 20000182 PARAMETER Experiment Name: At_2mM_SA_P Parameter: Treatment Value: 2mM SA vs. No Treatment
  misc_feature: MA Experiment ID: 20000185 Result: Up-regulated in Transcription
  misc_feature: MA Experiment 20000185 PARAMETER Experiment Name: At_Roots__P Parameter: Age (day) Value: 7 vs. 21
  misc_feature: MA Experiment 20000185 PARAMETER Experiment Name: At_Roots__P Parameter: Organism Value: A. thaliana
  misc_feature: MA Experiment 20000185 PARAMETER Experiment Name: At_Roots__P Parameter: Tissue Value: Roots vs. Whole Plant
  misc_feature: MA Experiment ID: 20000234 Result: Up-regulated in Transcription
  misc_feature: MA Experiment 20000234 PARAMETER Experiment Name: At_Siliques_P Parameter: Age (day) Value: 21
  misc_feature: MA Experiment 20000234 PARAMETER Experiment Name: At_Siliques_P Parameter: Organism Value: A. thaliana
  misc_feature: MA Experiment 20000234 PARAMETER Experiment Name: At_Siliques_P Parameter: Plant Line Value: WS
  misc_feature: MA Experiment 20000234 PARAMETER Experiment Name: At_Siliques_P Parameter: Tissue Value: Less Than 5mm Siliques vs. Whole Plant
  misc_feature: MA Experiment ID: 20000264 Result: Up-regulated in Transcription
  misc_feature: MA Experiment 20000264 PARAMETER Experiment Name: At_Open_Flower_P Parameter: Age (day) Value: 21
  misc_feature: MA Experiment 20000264 PARAMETER Experiment Name: At_Open_Flower_P Parameter: Plant Line Value: WS
  misc_feature: MA Experiment 20000264 PARAMETER Experiment Name: At_Open_Flower_P Parameter: Tissue Value: Open Flower vs. Whole Plant
  misc_feature: MA Experiment ID: 20000265 Result: Up-regulated in Transcription
  misc_feature: MA Experiment 20000265 PARAMETER Experiment Name: At_Open_Flower_P Parameter: Age (day) Value: 21
  misc_feature: MA Experiment 20000265 PARAMETER Experiment Name: At_Open_Flower_P Parameter: Plant Line Value: WS
  misc_feature: MA Experiment 20000265 PARAMETER Experiment Name: At_Open_Flower_P Parameter: Tissue Value: Closed Flower vs. Whole Plant
  misc_feature: MA Experiment ID: 20000286 Result: Up-regulated in Transcription
  misc_feature: MA Experiment 20000286 PARAMETER Experiment Name: At_Open_Flower_P Parameter: Age (day) Value: 21
  misc_feature: MA Experiment 20000286 PARAMETER Experiment Name: At_Open_Flower_P Parameter: Plant Line Value: WS
  misc_feature: MA Experiment 20000286 PARAMETER Experiment Name: At_Open_Flower_P Parameter: Tissue Value: Half Open vs. Whole Plant
  misc_feature: MA Experiment ID: 20000439 Result: Up-regulated in Transcription
  misc_feature: MA Experiment 20000439 PARAMETER Experiment Name: At_Roots__P Parameter: Age (day) Value: 14 vs. 21
  misc_feature: MA Experiment 20000439 PARAMETER Experiment Name: At_Roots__P Parameter: Organism Value: A. thaliana
  misc_feature: MA Experiment 20000439 PARAMETER Experiment Name: At_Roots__P Parameter: Tissue Value: Roots vs. Whole Plant
  misc_feature: MA Experiment ID: 20000496 Result: Down-regulated in Transcription
  misc_feature: MA Experiment 20000496 PARAMETER Experiment Name: At_Guard_Cells_P Parameter: Harvest Date Value: 7/19/2002
  misc_feature: MA Experiment 20000496 PARAMETER Experiment Name: At_Guard_Cells_P Parameter: Organism Value: Canola
  misc_feature: MA Experiment 20000496 PARAMETER Experiment Name: At_Guard_Cells_P Parameter: Tissue Value: Guard Cells vs. Leaves
  misc_feature: MA Experiment ID: 20000573 Result: Up-regulated in Transcription
  misc_feature: MA Experiment 20000573 PARAMETER Experiment Name: At_100uM_ABA_Mutants__P Parameter: Organism Value: A. thaliana
  misc_feature: MA Experiment 20000573 PARAMETER Experiment Name: At_100uM_ABA_Mutants__P Parameter: Plant Line Value: CS22 vs. Ler wt
  misc_feature: MA Experiment 20000573 PARAMETER Experiment Name: At_100uM_ABA_Mutants__P Parameter: Timepoint (hr) Value: N/A
  misc_feature: MA Experiment 20000573 PARAMETER Experiment Name: At_100uM_ABA_Mutants__P Parameter: Tissue Value: Whole Plant
  misc_feature: MA Experiment 20000573 PARAMETER Experiment Name: At_100uM_ABA_Mutants__P Parameter: Treatment Value: None
  misc_feature: MA Experiment ID: 20000574 Result: Up-regulated in Transcription
  misc_feature: MA Experiment 20000574 PARAMETER Experiment Name: At_100uM_ABA_Mutants__P Parameter: Organism Value: A. thaliana
  misc_feature: MA Experiment 20000574 PARAMETER Experiment Name: At_100uM_ABA_Mutants__P Parameter: Plant Line Value: CS23 vs. Ler wt
  misc_feature: MA Experiment 20000574 PARAMETER Experiment Name: At_100uM_ABA_Mutants__P Parameter: Timepoint (hr) Value: N/A
  misc_feature: MA Experiment 20000574 PARAMETER Experiment Name: At_100uM_ABA_Mutants__P Parameter: Tissue Value: Whole Plant
  misc_feature: MA Experiment 20000574 PARAMETER Experiment Name: At_100uM_ABA_Mutants__P Parameter: Treatment Value: None
atgtcagttgctagtgtagcgttgagtccagccctggaggaacttgtcaactttccaggtattattggacggtttggtttcaacttagacgacccaatcctggtttttctgactattgctggatctgtgatccctaagcgggtcatggagtcagattcaatagcatctgtgaagctaaggattcagagtatcaagggtttttttgtgaagaagcagaaacttctgtatgatggtagagaggtatctcgaaatgattcccaaattcgagattatggccttgctgatgggaaactgttgcatttggttattagactttcagatcttcaagccatttctgtaagaactgttgatgggaaagagtttgagctcgttgttgagaggagtagaaatgttggttacgtgaagcagcaaattgcttcaaaggaaaaagagctcggaatccccagggatcatgaactcacattagatggtgaagagctggatgaccagagactcatcactgatctctgtcaaaatggagacaatgtgattcacttgctaattagcaaatccgctaaagtcagagctaaaccagtggggaaggattttgaagtgtttatcgaagatgtaaatcacaagcacaatgtggatggtagaagaggaaaaaacatatcatcagaagcgaagcctaaagagttcttcgtggagccttttattgttaatcctgaaattaaacttccgatattgctgaaagagcttatcagctccactttagaaggcttggagaagggaaatggcccaattcgatcatctgatggatcaggaggagcttattttatgcaagatccatctggacacaagtatgtctctgtcttcaagcccattgacgaggaaccaatggctgtgaacaatccgcatggacagcctgtttcagtagatggcgagggactaaagaaaggcacacaggttggtgaaggagctatcagagaagtagcagcctacattttggactatcctatgactggaccacgaacttttcctcatgaccaaaccggttttgctggtgttccgccaacaacaatggtcaaatgcttgcacaaagatttcaaccatcccaatggttacagtttctctcctgagaacacaaagataggctcactgcagatgtttgtgagtaatgttggaagttgcgaagatatgggataccgagtattccctgtcgatcaggttcacaagatatcagtactagacataagactggctaatgctgatcgtcatgctggcaacattttggttagccgagatggaaaagatggtcagatggtgcttactccaatagaccatggctattgctttcccaataagtttgaagattgcacattcgaatggctatactggcctcaagcaaaagagccatactcttcagagacattggaatacatcaaatccttggaccccgagaaagacatcgaacttctgagattccatggttgggagattccaccttcatgcacccgtgtcctccgtatttcaaccatgcttctaaagaaaggttctgcaaagggtctcacaccttttaccatcggaagcataatgtgcagagaaacactcaaggaagaatctgtgatcgagcaaatcatacatgatgcagaagccatagtgcccacagagacaaccgaagatgagtttataagcaccgtctctgccattatggacaaccggctcgaccagtatgcttggaactga

SEQ ID NO: 83477 - protein, 574 aa, Arabidopsis thaliana
  peptide (1)..(574): Ceres Seq. ID no. 12670342
  misc_feature (266)..(528): Pfam Name: Phosphatidylinositol 3- and 4-kinase Pfam Description: Phosphatidylinositol 3- and 4-kinase
  misc_feature (1)..(574): Homolog of NCBI NO: 15237921 NR Description: ubiquitin; protein id: At5g24240.1 [Arabidopsis
  misc_feature (1)..(569): Homolog of NCBI NO: 18407090 NR Description: expressed protein; protein id: At2g46500.1, by cDNA: gi_16930424 [Arabidopsis thaliana]
  misc_feature (34)..(570): Homolog of NCBI NO: 34904388 NR Description: unnamed protein product [Oryza sativa (japonica group)] >gi|8468000|dbj|BAA96601.1| unnamed protein product
  misc_feature (115)..(570): Homolog of NCBI NO: 6633833 NR Description: F1N19.4 [Arabidopsis thaliana]
  misc_feature (273)..(570): Homolog of NCBI NO: 15217655 NR Description: unknown protein; protein id: At1g64460.1
  misc_feature (243)..(554): Homolog of NCBI NO: 15226765 NR Description: hypothetical protein; protein id: At2g40850.1, by cDNA: gi_19310380 [Arabidopsis thaliana]
  misc_feature (243)..(561): Homolog of NCBI NO: 18394020 NR Description: ubiquitin, putative; protein id: At1g13640.1, by cDNA: gi_16974595 [Arabidopsis thaliana] At1g13640/F21F23_7 [Arabidopsis thaliana]
  misc_feature (243)..(561): Homolog of NCBI NO: 25363319 NR Description: F21F23.8 protein - Arabidopsis thaliana Strong similarity to an unknown protein At2g03890 gi|4582436 from thaliana BAC T18C20 gb|AC007196. ESTs gb|AI993825, gb|T13863,
  misc_feature (243)..(554): Homolog of NCBI NO: 19310381 NR Description: At2g40850/T20B5.5 [Arabidopsis thaliana]
  misc_feature (242)..(550): Homolog of NCBI NO: 18395629 NR Description: expressed protein; protein id: At2g03890.1, by cDNA: gi_15810174 [Arabidopsis thaliana] At2g03890/T18C20.9 [Arabidopsis thaliana]
MSVASVALSPALEELVNFPGIIGRFGFNLDDPILVFLTIAGSVIPKRVMESDSIASVKLRIQSIKGFFVKKQKLLYDGREVSRNDSQIRDYGLADGKLLHLVIRLSDLQAISVRTVDGKEFELVVERSRNVGYVKQQIASKEKELGIPRDHELTLDGEELDDQRLITDLCQNGDNVIHLLISKSAKVRAKPVGKDFEVFIEDVNHKHNVDGRRGKNISSEAKPKEFFVEPFIVNPEIKLPILLKELISSTLEGLEKGNGPIRSSDGSGGAYFMQDPSGHKYVSVFKPIDEEPMAVNNPHGQPVSVDGEGLKKGTQVGEGAIREVAAYILDYPMTGPRTFPHDQTGFAGVPPTTMVKCLHKDFNHPNGYSFSPENTKIGSLQMFVSNVGSCEDMGYRVFPVDQVHKISVLDIRLANADRHAGNILVSRDGKDGQMVLTPIDHGYCFPNKFEDCTFEWLYWPQAKEPYSSETLEYIKSLDPEKDIELLRFHGWEIPPSCTRVLRISTMLLKKGSAKGLTPFTIGSIMCRETLKEESVIEQIIHDAEAIVPTETTEDEFISTVSAIMDNRLDQYAWN

SEQ ID NO: 83478 - protein, 526 aa, Arabidopsis thaliana
  peptide (1)..(526): Ceres Seq. ID no. 12670343
  misc_feature (218)..(480): Pfam Name: Phosphatidylinositol 3- and 4-kinase Pfam Description: Phosphatidylinositol 3- and 4-kinase
  misc_feature (1)..(526): Homolog of NCBI NO: 15237921 NR Description: ubiquitin; protein id: At5g24240.1 [Arabidopsis
  misc_feature (1)..(521): Homolog of NCBI NO: 18407090 NR Description: expressed protein; protein id: At2g46500.1, by cDNA: gi_16930424 [Arabidopsis thaliana]
  misc_feature (1)..(522): Homolog of NCBI NO: 34904388 NR Description: unnamed protein product [Oryza sativa (japonica group)] >gi|8468000|dbj|BAA96601.1| unnamed protein product
  misc_feature (67)..(522): Homolog of NCBI NO: 6633833 NR Description: F1N19.4 [Arabidopsis thaliana]
  misc_feature (225)..(522): Homolog of NCBI NO: 15217655 NR Description: unknown protein; protein id: At1g64460.1
  misc_feature (195)..(506): Homolog of NCBI NO: 15226765 NR Description: hypothetical protein; protein id: At2g40850.1, by cDNA: gi_19310380 [Arabidopsis thaliana]
  misc_feature (195)..(513): Homolog of NCBI NO: 18394020 NR Description: ubiquitin, putative; protein id: At1g13640.1, by cDNA: gi_16974595 [Arabidopsis thaliana] At1g13640/F21F23_7 [Arabidopsis thaliana]
  misc_feature (195)..(513): Homolog of NCBI NO: 25363319 NR Description: F21F23.8 protein - Arabidopsis thaliana Strong similarity to an unknown protein At2g03890 gi|4582436 from thaliana BAC T18C20 gb|AC007196. ESTs gb|AI993825, gb|T13863,
  misc_feature (195)..(506): Homolog of NCBI NO: 19310381 NR Description: At2g40850/T20B5.5 [Arabidopsis thaliana]
  misc_feature (194)..(502): Homolog of NCBI NO: 18395629 NR Description: expressed protein; protein id: At2g03890.1, by cDNA: gi_15810174 [Arabidopsis thaliana] At2g03890/T18C20.9 [Arabidopsis thaliana]
MESDSIASVKLRIQSIKGFFVKKQKLLYDGREVSRNDSQIRDYGLADGKLLHLVIRLSDLQAISVRTVDGKEFELVVERSRNVGYVKQQIASKEKELGIPRDHELTLDGEELDDQRLITDLCQNGDNVIHLLISKSAKVRAKPVGKDFEVFIEDVNHKHNVDGRRGKNISSEAKPKEFFVEPFIVNPEIKLPILLKELISSTLEGLEKGNGPIRSSDGSGGAYFMQDPSGHKYVSVFKPIDEEPMAVNNPHGQPVSVDGEGLKKGTQVGEGAIREVAAYILDYPMTGPRTFPHDQTGFAGVPPTTMVKCLHKDFNHPNGYSFSPENTKIGSLQMFVSNVGSCEDMGYRVFPVDQVHKISVLDIRLANADRHAGNILVSRDGKDGQMVLTPIDHGYCFPNKFEDCTFEWLYWPQAKEPYSSETLEYIKSLDPEKDIELLRFHGWEIPPSCTRVLRISTMLLKKGSAKGLTPFTIGSIMCRETLKEESVIEQIIHDAEAIVPTETTEDEFISTVSAIMDNRLDQYAWN

SEQ ID NO: 83479 - protein, 302 aa, Arabidopsis thaliana
  peptide (1)..(302): Ceres Seq. ID no. 12670344
  misc_feature (1)..(256): Pfam Name: Phosphatidylinositol 3- and 4-kinase Pfam Description: Phosphatidylinositol 3- and 4-kinase
  misc_feature (1)..(302): Homolog of NCBI NO: 15237921 NR Description: ubiquitin; protein id: At5g24240.1 [Arabidopsis
  misc_feature (1)..(297): Homolog of NCBI NO: 18407090 NR Description: expressed protein; protein id: At2g46500.1, by cDNA: gi_16930424 [Arabidopsis thaliana]
  misc_feature (1)..(298): Homolog of NCBI NO: 34904388 NR Description: unnamed protein product [Oryza sativa (japonica group)] >gi|8468000|dbj|BAA96601.1| unnamed protein product
  misc_feature (1)..(298): Homolog of NCBI NO: 6633833 NR Description: F1N19.4 [Arabidopsis thaliana]
  misc_feature (1)..(298): Homolog of NCBI NO: 15217655 NR Description: unknown protein; protein id: At1g64460.1
  misc_feature (1)..(282): Homolog of NCBI NO: 15226765 NR Description: hypothetical protein; protein id: At2g40850.1, by cDNA: gi_19310380 [Arabidopsis thaliana]
  misc_feature (1)..(289): Homolog of NCBI NO: 18394020 NR Description: ubiquitin, putative; protein id: At1g13640.1, by cDNA: gi_16974595 [Arabidopsis thaliana] At1g13640/F21F23_7 [Arabidopsis thaliana]
  misc_feature (1)..(289): Homolog of NCBI NO: 25363319 NR Description: F21F23.8 protein - Arabidopsis thaliana Strong similarity to an unknown protein At2g03890 gi|4582436 from thaliana BAC T18C20 gb|AC007196. ESTs gb|AI993825, gb|T13863,
  misc_feature (1)..(282): Homolog of NCBI NO: 19310381 NR Description: At2g40850/T20B5.5 [Arabidopsis thaliana]
  misc_feature (1)..(278): Homolog of NCBI NO: 18395629 NR Description: expressed protein; protein id: At2g03890.1, by cDNA: gi_15810174 [Arabidopsis thaliana] At2g03890/T18C20.9 [Arabidopsis thaliana]
MQDPSGHKYVSVFKPIDEEPMAVNNPHGQPVSVDGEGLKKGTQVGEGAIREVAAYILDYPMTGPRTFPHDQTGFAGVPPTTMVKCLHKDFNHPNGYSFSPENTKIGSLQMFVSNVGSCEDMGYRVFPVDQVHKISVLDIRLANADRHAGNILVSRDGKDGQMVLTPIDHGYCFPNKFEDCTFEWLYWPQAKEPYSSETLEYIKSLDPEKDIELLRFHGWEIPPSCTRVLRISTMLLKKGSAKGLTPFTIGSIMCRETLKEESVIEQIIHDAEAIVPTETTEDEFISTVSAIMDNRLDQYAWN

SEQ ID NO: 83480 - DNA, 3114 bp, Arabidopsis thaliana
  misc_feature (1)..(3114): Ceres Seq. ID no. 12670424
  misc_feature: MA Experiment ID: 20000184 Result: Up-regulated in Transcription
  misc_feature: MA Experiment 20000184 PARAMETER Experiment Name: At_Shoots__P Parameter: Age (day) Value: 7
  misc_feature: MA Experiment 20000184 PARAMETER Experiment Name: At_Shoots__P Parameter: Tissue Value: Shoots vs. Whole Plant
  misc_feature: MA Experiment ID: 20000268 Result: Up-regulated in Transcription
  misc_feature: MA Experiment 20000268 PARAMETER Experiment Name: At_100mM_NaCl__P Parameter: Age (day) Value: 14
  misc_feature: MA Experiment 20000268 PARAMETER Experiment Name: At_100mM_NaCl__P Parameter: Organism Value: A. thaliana
  misc_feature: MA Experiment 20000268 PARAMETER Experiment Name: At_100mM_NaCl__P Parameter: Plant Line Value: WS
  misc_feature: MA Experiment 20000268 PARAMETER Experiment Name: At_100mM_NaCl__P Parameter: Timepoint (hr) Value: 6
  misc_feature: MA Experiment 20000268 PARAMETER Experiment Name: At_100mM_NaCl__P Parameter: Tissue Value: Whole Plant
  misc_feature: MA Experiment 20000268 PARAMETER Experiment Name: At_100mM_NaCl__P Parameter: Treatment Value: 100mM NaCl vs. No Treatment
  misc_feature: MA Experiment ID: 20000438 Result: Up-regulated in Transcription
  misc_feature: MA Experiment 20000438 PARAMETER Experiment Name: At_Shoots__P Parameter: Age (day) Value: 14
  misc_feature: MA Experiment 20000438 PARAMETER Experiment Name: At_Shoots__P Parameter: Tissue Value: Shoots vs. Whole Plant
  misc_feature: MA Experiment ID: 20000441 Result: Up-regulated in Transcription
  misc_feature: MA Experiment 20000441 PARAMETER Experiment Name: At_1uM_BR-BRZ__P Parameter: Tissue Value: Shoot Apices
  misc_feature: MA Experiment 20000441 PARAMETER Experiment Name: At_1uM_BR-BRZ__P Parameter: Treatment Value: 1uM BR vs. No Treatment
  misc_feature: MA Experiment ID: 20000455 Result: Up-regulated in Transcription
  misc_feature: MA Experiment 20000455 PARAMETER Experiment Name: At_100uM_ABA_P Parameter: Age (day) Value: 16
  misc_feature: MA Experiment 20000455 PARAMETER Experiment Name: At_100uM_ABA_P Parameter: Organism Value: A. thaliana
  misc_feature: MA Experiment 20000455 PARAMETER Experiment Name: At_100uM_ABA_P Parameter: Plant Line Value: WS
  misc_feature: MA Experiment 20000455 PARAMETER Experiment Name: At_100uM_ABA_P Parameter: Timepoint (hr) Value: 48
  misc_feature: MA Experiment 20000455 PARAMETER Experiment Name: At_100uM_ABA_P Parameter: Tissue Value: Aerial
  misc_feature: MA Experiment 20000455 PARAMETER Experiment Name: At_100uM_ABA_P Parameter: Treatment Value: 100uM ABA vs. No Treatment
  misc_feature: MA Experiment ID: 20000496 Result: Down-regulated in Transcription
  misc_feature: MA Experiment 20000496 PARAMETER Experiment Name: At_Guard_Cells_P Parameter: Harvest Date Value: 7/19/2002
  misc_feature: MA Experiment 20000496 PARAMETER Experiment Name: At_Guard_Cells_P Parameter: Organism Value: Canola
  misc_feature: MA Experiment 20000496 PARAMETER Experiment Name: At_Guard_Cells_P Parameter: Tissue Value: Guard Cells vs. Leaves
  misc_feature: MA Experiment ID: 20001247 Result: Up-regulated in Transcription
  misc_feature: MA Experiment 20001247 PARAMETER Experiment Name: At_Far-red-induction_P Parameter: Age (day) Value: 7
  misc_feature: MA Experiment 20001247 PARAMETER Experiment Name: At_Far-red-induction_P Parameter: Light Value: Far-red vs. White
  misc_feature: MA Experiment 20001247 PARAMETER Experiment Name: At_Far-red-induction_P Parameter: Organism Value: A. thaliana
  misc_feature: MA Experiment 20001247 PARAMETER Experiment Name: At_Far-red-induction_P Parameter: Plant Line Value: Columbia
  misc_feature: MA Experiment 20001247 PARAMETER Experiment Name: At_Far-red-induction_P Parameter: Timepoint (hr) Value: 1
  misc_feature: MA Experiment 20001247 PARAMETER Experiment Name: At_Far-red-induction_P Parameter: Tissue Value: Whole Plant
  misc_feature: MA Experiment ID: 20001248 Result: Down-regulated in Transcription
  misc_feature: MA Experiment 20001248 PARAMETER Experiment Name: At_Far-red-induction_P Parameter: Age (day) Value: 7
  misc_feature: MA Experiment 20001248 PARAMETER Experiment Name: At_Far-red-induction_P Parameter: Light Value: Far-red vs. White
  misc_feature: MA Experiment 20001248 PARAMETER Experiment Name: At_Far-red-induction_P Parameter: Organism Value: A. thaliana
  misc_feature: MA Experiment 20001248 PARAMETER Experiment Name: At_Far-red-induction_P Parameter: Plant Line Value: Columbia
  misc_feature: MA Experiment 20001248 PARAMETER Experiment Name: At_Far-red-induction_P Parameter: Timepoint (hr) Value: 4
  misc_feature: MA Experiment 20001248 PARAMETER Experiment Name: At_Far-red-induction_P Parameter: Tissue Value: Whole Plant
  misc_feature: MA Experiment ID: 20001555 Result: Down-regulated in Transcription
  misc_feature: MA Experiment 20001555 PARAMETER Experiment Name: At_Drought_Soil_Dry_P Parameter: Age (day) Value: 24
  misc_feature: MA Experiment 20001555 PARAMETER Experiment Name: At_Drought_Soil_Dry_P Parameter: Organism Value: A. thaliana
  misc_feature: MA Experiment 20001555 PARAMETER Experiment Name: At_Drought_Soil_Dry_P Parameter: Plant Line Value: WS
  misc_feature: MA Experiment 20001555 PARAMETER Experiment Name: At_Drought_Soil_Dry_P Parameter: Post Timepoint (hr) Value: None
  misc_feature: MA Experiment 20001555 PARAMETER Experiment Name: At_Drought_Soil_Dry_P Parameter: Post-Treatment Value: None
  misc_feature: MA Experiment 20001555 PARAMETER Experiment Name: At_Drought_Soil_Dry_P Parameter: Timepoint (day) Value: 10
  misc_feature: MA Experiment 20001555 PARAMETER Experiment Name: At_Drought_Soil_Dry_P Parameter: Treatment Value: Drought vs. No Drought
  misc_feature: MA Experiment ID: 20001556 Result: Down-regulated in Transcription
  misc_feature: MA Experiment 20001556 PARAMETER Experiment Name: At_Drought_Soil_Dry_P Parameter: Age (day) Value: 26
  misc_feature: MA Experiment 20001556 PARAMETER Experiment Name: At_Drought_Soil_Dry_P Parameter: Organism Value: A. thaliana
  misc_feature: MA Experiment 20001556 PARAMETER Experiment Name: At_Drought_Soil_Dry_P Parameter: Plant Line Value: WS
  misc_feature: MA Experiment 20001556 PARAMETER Experiment Name: At_Drought_Soil_Dry_P Parameter: Post Timepoint (hr) Value: None
  misc_feature: MA Experiment 20001556 PARAMETER Experiment Name: At_Drought_Soil_Dry_P Parameter: Post-Treatment Value: None
  misc_feature: MA Experiment 20001556 PARAMETER Experiment Name: At_Drought_Soil_Dry_P Parameter: Timepoint (day) Value: 12
  misc_feature: MA Experiment 20001556 PARAMETER Experiment Name: At_Drought_Soil_Dry_P Parameter: Treatment Value: Drought vs. No Drought
  misc_feature: MA Experiment ID: 20001557 Result: Down-regulated in Transcription
  misc_feature: MA Experiment 20001557 PARAMETER Experiment Name: At_Drought_Soil_Dry_P Parameter: Age (day) Value: 27
  misc_feature: MA Experiment 20001557 PARAMETER Experiment Name: At_Drought_Soil_Dry_P Parameter: Organism Value: A. thaliana
  misc_feature: MA Experiment 20001557 PARAMETER Experiment Name: At_Drought_Soil_Dry_P Parameter: Plant Line Value: WS
  misc_feature: MA Experiment 20001557 PARAMETER Experiment Name: At_Drought_Soil_Dry_P Parameter: Post Timepoint (hr) Value: 3
  misc_feature: MA Experiment 20001557 PARAMETER Experiment Name: At_Drought_Soil_Dry_P Parameter: Post-Treatment Value: Re-Water vs. No Drought
  misc_feature: MA Experiment 20001557 PARAMETER Experiment Name: At_Drought_Soil_Dry_P Parameter: Timepoint (day) Value: 13
  misc_feature: MA Experiment 20001557 PARAMETER Experiment Name: At_Drought_Soil_Dry_P Parameter: Treatment Value: Drought vs. No Drought
  misc_feature: MA Experiment ID: 20001558 Result: Down-regulated in Transcription
  misc_feature: MA Experiment 20001558 PARAMETER Experiment Name: At_Drought_Soil_Dry_P Parameter: Age (day) Value: 27
  misc_feature: MA Experiment 20001558 PARAMETER Experiment Name: At_Drought_Soil_Dry_P Parameter: Organism Value: A. thaliana
  misc_feature: MA Experiment 20001558 PARAMETER Experiment Name: At_Drought_Soil_Dry_P Parameter: Plant Line Value: WS
  misc_feature: MA Experiment 20001558 PARAMETER Experiment Name: At_Drought_Soil_Dry_P Parameter: Post Timepoint (hr) Value: 6
  misc_feature: MA Experiment 20001558 PARAMETER Experiment Name: At_Drought_Soil_Dry_P Parameter: Post-Treatment Value: Re-Water vs. No Drought
  misc_feature: MA Experiment 20001558 PARAMETER Experiment Name: At_Drought_Soil_Dry_P Parameter: Timepoint (day) Value: 13
  misc_feature: MA Experiment 20001558 PARAMETER Experiment Name: At_Drought_Soil_Dry_P Parameter: Treatment Value: Drought vs. No Drought
  misc_feature: MA Experiment ID: 20001559 Result: Down-regulated in Transcription
  misc_feature: MA Experiment 20001559 PARAMETER Experiment Name: At_Drought_Soil_Dry_P Parameter: Age (day) Value: 28
  misc_feature: MA Experiment 20001559 PARAMETER Experiment Name: At_Drought_Soil_Dry_P Parameter: Organism Value: A. thaliana
  misc_feature: MA Experiment 20001559 PARAMETER Experiment Name: At_Drought_Soil_Dry_P Parameter: Plant Line Value: WS
  misc_feature: MA Experiment 20001559 PARAMETER Experiment Name: At_Drought_Soil_Dry_P Parameter: Post Timepoint (hr) Value: 29
  misc_feature: MA Experiment 20001559 PARAMETER Experiment Name: At_Drought_Soil_Dry_P Parameter: Post-Treatment Value: Re-Water vs. No Drought
  misc_feature: MA Experiment 20001559 PARAMETER Experiment Name: At_Drought_Soil_Dry_P Parameter: Timepoint (day) Value: 14
  misc_feature: MA Experiment 20001559 PARAMETER Experiment Name: At_Drought_Soil_Dry_P Parameter: Treatment Value: Drought vs. No Drought
  misc_feature: MA Experiment ID: 20001560 Result: Down-regulated in Transcription
  misc_feature: MA Experiment 20001560 PARAMETER Experiment Name: At_Drought_Soil_Dry_P Parameter: Age (day) Value: 28
  misc_feature: MA Experiment 20001560 PARAMETER Experiment Name: At_Drought_Soil_Dry_P Parameter: Organism Value: A. thaliana
  misc_feature: MA Experiment 20001560 PARAMETER Experiment Name: At_Drought_Soil_Dry_P Parameter: Plant Line Value: WS
  misc_feature: MA Experiment 20001560 PARAMETER Experiment Name: At_Drought_Soil_Dry_P Parameter: Post Timepoint (hr) Value: None
  misc_feature: MA Experiment 20001560 PARAMETER Experiment Name: At_Drought_Soil_Dry_P Parameter: Post-Treatment Value: None
  misc_feature: MA Experiment 20001560 PARAMETER Experiment Name: At_Drought_Soil_Dry_P Parameter: Timepoint (day) Value: 14
  misc_feature: MA Experiment 20001560 PARAMETER Experiment Name: At_Drought_Soil_Dry_P Parameter: Treatment Value: Drought vs. No Drought
atggaagcagcttcaagttttttgtgtagaagtattcggattccgtcgactactacggcgacggcggcgttcacgttcactcgaccgccgttaaactacgtttgtgttgtcggagttcgtgttttcccgacgcggaaggtcttttgcagcggcgttaatggcggctccagtgttactaagaagaagccacgaaggaaaagtaacgtttccgataaacttaggtttaagaaaattgagaagaggaacgataatactgaatctgagagtttaagtgttgttgaggaaccgaagaacgataaagaattgagtcttcgagctttgaatcaaaatggtgatccattagggcggagagatttagggaggaacgtagtgaagtggattagtcaggcgatgaaagcgatggcttcggattttgcaactgcggaggttcagggggagttttcggagttgaggcagaacgtcggatctggtttgacgtttgtgattcaagctcaaccgtatctcaatgctattcccatgccattaggttctgaagtcatttgtttgaaggcttgtactcattatcctaccttgttcgatcatttccagagagagttgcgtgatgttcttcaagacctggagcggaagaatataatggagagttggaaggagtctgagtcttggaagctgctcaaggagattgcaaattcagctcagcatcgggaggttgctcgcaaagctgctcaagctaagcctgttcaaggagttttggggatggactcagagaaggtgaaggctatacaggaaaggattgatgagttcaccagccagatgtcgcagttacttcaagtggaacgagatacagaactggaagttacacaggaagaactagatgttgttcctactccagatgagagctctgattcctcaaaaccgattgagttcttggttaggcatggtgatgctccacaggaactttgtgatacaatttgcaatttgtatgcagttagtacctccacagggctcggaggtatgcacttggtgttgtttaaggttgggggaaaccaccgtcttcctcctactacactttcccctggtgacatggtttgcataagagtttgtgacagtaggggtgctggggcaactgcctgtacgcagggctttgttcacaaccttggagaagatgggtgtagcattggtgtggctctagaatctcgtcatggagatcctactttttccaagctctttggaaagagtgtgagaattgatcgtattcatgggttggccgatgcccttacttacgaggtatatctttgttccatattggttaaagatgcagtgttttatcacagtaacctccatcttaaatatgcttgtcatcgtaactgcgaagccctaatgcttctgcagaagaatggtctgcagaagaaaaatccatcaatatctgttgtggcgactttatttggggatggtgaagatataacatggctggagcaaaatgattatgtagactggagtgaagcggagttgagtgatgagccagtgagtaagttatttgattcttcccaaaggagagccatagctcttggagtaaacaaaaaaagacctgttatgatagtccaaggacctcctggcacgggaaagactggaatgcttaaggaggtcattaccctggctgttcaacagggggaaagagtacttgtaacagcgcctactaatgcagctgttgataacatggtcgagaagctcttgcatcttggactaaacattgtccgagtaggaaatcccgctagaatatcatctgctgttgcttcaaagtctttgggggaaattgtgaactctaagcttgcaagcttccgagcagaattggaaaggaagaagtcagatttaagaaaagatcttcggcaatgcctgagggatgatgttcttgcagctggcattcggcagctcttgaaacagcttggaaagacgttgaagaagaaggaaaaagagactgtgaaggaaatactatcaaatgcacaggttgtttttgccactaacattggagcagctgatcctttgattaggaggttagaaacatttgatttggttgttatagatgaagctggtcagtctatcgagccttcatgctggatcccaatattgcaagggaaacgttgtattctttccggtgatccatgccaattagcaccagttgttctatcacgtaaagctttagaaggtggacttggtgtatccttactggaaagagctgcatctttacatgatggagttcttgcgacaaaattaacaactcagtatcgtatgaacgatgtaatcgctggttgggcatcaaaggagatgtatggtggatggttgaaatctgctccaagtgtggcctctcatctgcttatcgattctccttttgtgaagaaattttccattttagcattatctggtttctcttgcaactctgttggtttgtctttcatgatactatctttacttgtggttgaaatatctactgattacagcttttttatggccttattgaaaagtgatgttgctcatgagcttgcaatagatgctacttggataacgcaatgcccactggttctgcttgacacaagaatgccatatgggagtttatccgtgggctgcgaggagcgtttggatccagctggcacaggctcattatacaatgaaggagaagcagatattgtggttaatcacgtcatttctttgatatacgcaggtgttagtccaatggctattgctgttcaatccccatatgttgctcaggttcaacttctcagagaaaggctggatgattttccagtggctgatggagttgaggtcgcaaccattgacagctttcaagggcgggaggctgatgcagtgatcatctcaatggtacggtcaaacaacctaggtgcagtgggattcctaggggatagcagacggatgaatgtagccattacaagagcccggaagcacgtggcagtggtatgtgacagctccacaatctgccacaacacgttcctagcaagactgttgcgccacatacgctatttcgggagagttaagcatgcagaccctggtagcttgggagggtcaggactaggcttggacccaatgttgccctaccttggttaa

SEQ ID NO: 83481 - protein, 1037 aa, Arabidopsis thaliana
  peptide (1)..(1037): Ceres Seq. ID no. 12670425
  misc_feature (513)..(565): Pfam Name: DEAD/DEAH box helicase Pfam Description: DEAD/DEAH box helicase
  misc_feature (457)..(800): Homolog of NCBI NO: 7446669 NR Description: probable helicase At2g03270 [imported] -
  misc_feature (457)..(800): Homolog of NCBI NO: 11191231 NR Description: putative helicase [Arabidopsis thaliana]
  misc_feature (457)..(800): Homolog of NCBI NO: 18395518 NR Description: putative helicase; protein id: At2g03270.1, by cDNA: gi_20259168 [Arabidopsis thaliana] putative helicase [Arabidopsis thaliana]
  misc_feature (853)..(1012): Homolog of NCBI NO: 7446669 NR Description: probable helicase At2g03270 [imported] -
  misc_feature (853)..(1012): Homolog of NCBI NO: 18395518 NR Description: putative helicase; protein id: At2g03270.1, by cDNA: gi_20259168 [Arabidopsis thaliana] putative helicase [Arabidopsis thaliana]
  misc_feature (853)..(1012): Homolog of NCBI NO: 11191231 NR Description: putative helicase [Arabidopsis thaliana]
  misc_feature (513)..(796): Homolog of NCBI NO: 1082534 NR Description: Ig mu chain switch region binding protein 2 -
  misc_feature (513)..(796): Homolog of NCBI NO: 4504623 NR Description: immunoglobulin mu binding protein 2 [Homo sapiens]
  misc_feature (847)..(1017): Homolog of NCBI NO: 1082534 NR Description: Ig mu chain switch region binding protein 2 -
  misc_feature (847)..(1017): Homolog of NCBI NO: 4504623 NR Description: immunoglobulin mu binding protein 2 [Homo sapiens]
MEAASSFLCRSIRIPSTTTATAAFTFTRPPLNYVCVVGVRVFPTRKVFCSGVNGGSSVTKKKPRRKSNVSDKLRFKKIEKRNDNTESESLSVVEEPKNDKELSLRALNQNGDPLGRRDLGRNVVKWISQAMKAMASDFATAEVQGEFSELRQNVGSGLTFVIQAQPYLNAIPMPLGSEVICLKACTHYPTLFDHFQRELRDVLQDLERKNIMESWKESESWKLLKEIANSAQHREVARKAAQAKPVQGVLGMDSEKVKAIQERIDEFTSQMSQLLQVERDTELEVTQEELDVVPTPDESSDSSKPIEFLVRHGDAPQELCDTICNLYAVSTSTGLGGMHLVLFKVGGNHRLPPTTLSPGDMVCIRVCDSRGAGATACTQGFVHNLGEDGCSIGVALESRHGDPTFSKLFGKSVRIDRIHGLADALTYEVYLCSILVKDAVFYHSNLHLKYACHRNCEALMLLQKNGLQKKNPSISVVATLFGDGEDITWLEQNDYVDWSEAELSDEPVSKLFDSSQRRAIALGVNKKRPVMIVQGPPGTGKTGMLKEVITLAVQQGERVLVTAPTNAAVDNMVEKLLHLGLNIVRVGNPARISSAVASKSLGEIVNSKLASFRAELERKKSDLRKDLRQCLRDDVLAAGIRQLLKQLGKTLKKKEKETVKEILSNAQVVFATNIGAADPLIRRLETFDLVVIDEAGQSIEPSCWIPILQGKRCILSGDPCQLAPVVLSRKALEGGLGVSLLERAASLHDGVLATKLTTQYRMNDVIAGWASKEMYGGWLKSAPSVASHLLIDSPFVKKFSILALSGFSCNSVGLSFMILSLLVVEISTDYSFFMALLKSDVAHELAIDATWITQCPLVLLDTRMPYGSLSVGCEERLDPAGTGSLYNEGEADIVVNHVISLIYAGVSPMAIAVQSPYVAQVQLLRERLDDFPVADGVEVATIDSFQGREADAVIISMVRSNNLGAVGFLGDSRRMNVAITRARKHVAVVCDSSTICHNTFLARLLRHIRYFGRVKHADPGSLGGSGLGLDPMLPYLG

SEQ ID NO: 83482 - protein, 907 aa, Arabidopsis thaliana
  peptide (1)..(907): Ceres Seq. ID no. 12670426
  misc_feature (383)..(435): Pfam Name: DEAD/DEAH box helicase Pfam Description: DEAD/DEAH box helicase
  misc_feature (327)..(670): Homolog of NCBI NO: 7446669 NR Description: probable helicase At2g03270 [imported] -
  misc_feature (327)..(670): Homolog of NCBI NO: 11191231 NR Description: putative helicase [Arabidopsis thaliana]
  misc_feature (327)..(670): Homolog of NCBI NO: 18395518 NR Description: putative helicase; protein id: At2g03270.1, by cDNA: gi_20259168 [Arabidopsis thaliana] putative helicase [Arabidopsis thaliana]
  misc_feature (723)..(882): Homolog of NCBI NO: 7446669 NR Description: probable helicase At2g03270 [imported] -
  misc_feature (723)..(882): Homolog of NCBI NO: 11191231 NR Description: putative helicase [Arabidopsis thaliana]
  misc_feature (723)..(882): Homolog of NCBI NO: 18395518 NR Description: putative helicase; protein id: At2g03270.1, by cDNA: gi_20259168 [Arabidopsis thaliana] putative helicase [Arabidopsis thaliana]
  misc_feature (383)..(666): Homolog of NCBI NO: 1082534 NR Description: Ig mu chain switch region binding protein 2 -
  misc_feature (383)..(666): Homolog of NCBI NO: 4504623 NR Description: immunoglobulin mu binding protein 2 [Homo sapiens]
  misc_feature (717)..(887): Homolog of NCBI NO: 1082534 NR Description: Ig mu chain switch region binding protein 2 -
  misc_feature (717)..(887): Homolog of NCBI NO: 4504623 NR Description: immunoglobulin mu binding protein 2 [Homo sapiens]
MKAMASDFATAEVQGEFSELRQNVGSGLTFVIQAQPYLNAIPMPLGSEVICLKACTHYPTLFDHFQRELRDVLQDLERKNIMESWKESESWKLLKEIANSAQHREVARKAAQAKPVQGVLGMDSEKVKAIQERIDEFTSQMSQLLQVERDTELEVTQEELDVVPTPDESSDSSKPIEFLVRHGDAPQELCDTICNLYAVSTSTGLGGMHLVLFKVGGNHRLPPTTLSPGDMVCIRVCDSRGAGATACTQGFVHNLGEDGCSIGVALESRHGDPTFSKLFGKSVRIDRIHGLADALTYEVYLCSILVKDAVFYHSNLHLKYACHRNCEALMLLQKNGLQKKNPSISVVATLFGDGEDITWLEQNDYVDWSEAELSDEPVSKLFDSSQRRAIALGVNKKRPVMIVQGPPGTGKTGMLKEVITLAVQQGERVLVTAPTNAAVDNMVEKLLHLGLNIVRVGNPARISSAVASKSLGEIVNSKLASFRAELERKKSDLRKDLRQCLRDDVLAAGIRQLLKQLGKTLKKKEKETVKEILSNAQVVFATNIGAADPLIRRLETFDLVVIDEAGQSIEPSCWIPILQGKRCILSGDPCQLAPVVLSRKALEGGLGVSLLERAASLHDGVLATKLTTQYRMNDVIAGWASKEMYGGWLKSAPSVASHLLIDSPFVKKFSILALSGFSCNSVGLSFMILSLLVVEISTDYSFFMALLKSDVAHELAIDATWITQCPLVLLDTRMPYGSLSVGCEERLDPAGTGSLYNEGEADIVVNHVISLIYAGVSPMAIAVQSPYVAQVQLLRERLDDFPVADGVEVATIDSFQGREADAVIISMVRSNNLGAVGFLGDSRRMNVAITRARKHVAVVCDSSTICHNTFLARLLRHIRYFGRVKHADPGSLGGSGLGLDPMLPYLG

SEQ ID NO: 83483 - protein, 904 aa, Arabidopsis thaliana
  peptide (1)..(904): Ceres Seq. ID no. 12670427
  misc_feature (380)..(432): Pfam Name: DEAD/DEAH box helicase Pfam Description: DEAD/DEAH box helicase
  misc_feature (324)..(667): Homolog of NCBI NO: 7446669 NR Description: probable helicase At2g03270 [imported] -
  misc_feature (324)..(667): Homolog of NCBI NO: 11191231 NR Description: putative helicase [Arabidopsis thaliana]
  misc_feature (324)..(667): Homolog of NCBI NO: 18395518 NR Description: putative helicase; protein id: At2g03270.1, by cDNA: gi_20259168 [Arabidopsis thaliana] putative helicase [Arabidopsis thaliana]
  misc_feature (720)..(879): Homolog of NCBI NO: 7446669 NR Description: probable helicase At2g03270 [imported] -
  misc_feature (720)..(879): Homolog of NCBI NO: 18395518 NR Description: putative helicase; protein id: At2g03270.1, by cDNA: gi_20259168 [Arabidopsis thaliana] putative helicase [Arabidopsis thaliana]
  misc_feature (720)..(879): Homolog of NCBI NO: 11191231 NR Description: putative helicase [Arabidopsis thaliana]
  misc_feature (380)..(663): Homolog of NCBI NO: 1082534 NR Description: Ig mu chain switch region binding protein 2 -
  misc_feature (380)..(663): Homolog of NCBI NO: 4504623 NR Description: immunoglobulin mu binding protein 2 [Homo sapiens]
  misc_feature (714)..(884): Homolog of NCBI NO: 1082534 NR Description: Ig mu chain switch region binding protein 2 -
  misc_feature (714)..(884): Homolog of NCBI NO: 4504623 NR Description: immunoglobulin mu binding protein 2 [Homo sapiens]
MASDFATAEVQGEFSELRQNVGSGLTFVIQAQPYLNAIPMPLGSEVICLKACTHYPTLFDHFQRELRDVLQDLERKNIMESWKESESWKLLKEIANSAQHREVARKAAQAKPVQGVLGMDSEKVKAIQERIDEFTSQMSQLLQVERDTELEVTQEELDVVPTPDESSDSSKPIEFLVRHGDAPQELCDTICNLYAVSTSTGLGGMHLVLFKVGGNHRLPPTTLSPGDMVCIRVCDSRGAGATACTQGFVHNLGEDGCSIGVALESRHGDPTFSKLFGKSVRIDRIHGLADALTYEVYLCSILVKDAVFYHSNLHLKYACHRNCEALMLLQKNGLQKKNPSISVVATLFGDGEDITWLEQNDYVDWSEAELSDEPVSKLFDSSQRRAIALGVNKKRPVMIVQGPPGTGKTGMLKEVITLAVQQGERVLVTAPTNAAVDNMVEKLLHLGLNIVRVGNPARISSAVASKSLGEIVNSKLASFRAELERKKSDLRKDLRQCLRDDVLAAGIRQLLKQLGKTLKKKEKETVKEILSNAQVVFATNIGAADPLIRRLETFDLVVIDEAGQSIEPSCWIPILQGKRCILSGDPCQLAPVVLSRKALEGGLGVSLLERAASLHDGVLATKLTTQYRMNDVIAGWASKEMYGGWLKSAPSVASHLLIDSPFVKKFSILALSGFSCNSVGLSFMILSLLVVEISTDYSFFMALLKSDVAHELAIDATWITQCPLVLLDTRMPYGSLSVGCEERLDPAGTGSLYNEGEADIVVNHVISLIYAGVSPMAIAVQSPYVAQVQLLRERLDDFPVADGVEVATIDSFQGREADAVIISMVRSNNLGAVGFLGDSRRMNVAITRARKHVAVVCDSSTICHNTFLARLLRHIRYFGRVKHADPGSLGGSGLGLDPMLPYLG

SEQ ID NO: 83484 - DNA, 2133 bp, Arabidopsis thaliana
  misc_feature (1)..(2133): Ceres Seq. ID no. 12670478
  misc_feature: MA Experiment ID: 20000307 Result: Down-regulated in Transcription
  misc_feature: MA Experiment 20000307 PARAMETER Experiment Name: At_Germinating_Seeds_Sub_P Parameter: Age (hr) Value: 24 vs. 0
  misc_feature: MA Experiment 20000307 PARAMETER Experiment Name: At_Germinating_Seeds_Sub_P Parameter: Organism Value: A. thaliana
  misc_feature: MA Experiment 20000307 PARAMETER Experiment Name: At_Germinating_Seeds_Sub_P Parameter: Plant Line Value: WS
  misc_feature: MA Experiment 20000307 PARAMETER Experiment Name: At_Germinating_Seeds_Sub_P Parameter: Tissue Value: Germinating Seeds
atgtcagccttgtctgtgatcgaacaacgattgttaaagtgggacaagctcgcgtctttagtacccaaatcaaaaaaaactccttttccgattgatcgtctaaacgagcttttgaaagtctgtgctaattcaagttatctaagaattggagaatcgattcacgctcatttgattgttaccaaccaatcatctagagctgaagacgcgtatcagatcaattctctgatcaatctctatgtgaaatgcagagaaactgttcgtgcacgcaagctgttcgatttaatgcctgagagaaatgttgtttcttggtgtgcgatgatgaagggatatcaaaattctgggtttgattttgaagttttgaagctttttaaaagtatgtttttttctggtgaatcgagacctaatgagtttgtagctactgtggtttttaagtcttgttcaaactctgggaggattgaagaaggtaaacagtttcatggatgttttcttaagtatggtttgatttctcatgagtttgtacggaacactcttgtttacatgtattctttgtgttcggggaatggcgaggctatacgagttttggatgatcttccttattgtgatctttctgtgtttagttctgctcttagtggttatctagagtgtggtgcttttaaagaagggcttgatgttttgagaaagacagctaacgaagattttgtttggaacaacctcacgtatttgtcttctttacggcttttctccaatctcagagatttgaatttggctctgcaggttcatagccgaatggtgaggtttggtttcaacgctgaagttgaggcttgtggtgcactcattaatatgtatggcaaatgtggtaaagtcctttatgctcagagagttttcgatgatacacacgctcaaaacattttcttgaatacaacgatcatggatgcttacttccaggataagtctttcgaggaggctctgaatctgttttcaaagatggatactaaagaggttccaccaaatgagtacacctttgctattttgctgaattcaattgcagagctatcgcttctaaaacagggcgatcttctacatggacttgttttgaaatccggctataggaaccatgtaatggtaggcaatgcattggttaacatgtacgccaaaagtggcagcattgaggatgcaaggaaagcattctcaggcatgacttttagagatatagttacttggaacacaatgatatctggatgctcacatcatggattggggagggaagcgcttgaagcctttgatagaatgatttttacaggagagattcccaaccgcataacttttatcggcgttttgcaggcttgtagccatattggttttgtggagcaagggcttcattactttaatcagctgatgaagaaatttgatgtccagcctgatatacagcattatacatgcattgttggacttttgagcaaggctggaatgttcaaggatgctgaggatttcatgagaacagctccaattgaatgggatgttgttgcatggagaactttgctaaatgcttgttatgttcgccggaattacaggttaggaaaaaaagtagcagaatatgccattgagaagtatccaaacgactcaggagtttacgtattgttatccaatatccacgccaagtcaagggagtgggaaggtgtggcaaaagtgcgttctttgatgaataacagaggtgttaagaaggagcctggagtaagctggatagggatacgtaatcaaacccatgtgtttcttgcagaggataatcaacaccccgagattacgctgatttatgcaaaggttaaggaagttatgtcgaagattaaaccattagggtattcgcctgatgttgctggagctttccatgatgtcgatgaagaacagagagaagataacctctcttatcatagtgagaagctagctgtggcatatggtctgataaaaacgccagagaaatcaccattgtacgtgactaaaaacgtgaggatatgtgatgattgtcactctgcaattaagcttatctcgaagatctcaaaacgatacatagttatcagagattccaatcggttccatcatttcctagatggtcagtgttcttgctgtgattactggtga

SEQ ID NO: 83485 - protein, 710 aa, Arabidopsis thaliana
  peptide (1)..(710): Ceres Seq. ID no. 12670479
  misc_feature (405)..(439): Pfam Name: PPR repeat Pfam Description: PPR repeat
  misc_feature (37)..(710): Homolog of NCBI NO: 34915012 NR Description: P0458A05.10 [Oryza sativa (japonica
  misc_feature (50)..(710): Homolog of NCBI NO: 15226200 NR Description: putative selenium-binding protein; protein id:
  misc_feature (34)..(710): Homolog of NCBI NO: 37535570 NR Description: hypothetical protein [Oryza sativa (japonica group)] >gi|16905194|gb|AAL31064.1| hypothetical protein [Oryza >gi|31432781|gb|AAP54374.1| hypothetical protein [Oryza sativa
  misc_feature (37)..(710): Homolog of NCBI NO: 30693150 NR Description: pentatricopeptide (PPR) repeat-containing protein
  misc_feature (34)..(710): Homolog of NCBI NO: 15236324 NR Description: putative protein; protein id: At4g13650.1
  misc_feature (21)..(710): Homolog of NCBI NO: 18483237 NR Description: putative vegetative storage protein [Sorghum
  misc_feature (37)..(710): Homolog of NCBI NO: 15220337 NR Description: hypothetical protein; protein id: At1g11290.1
  misc_feature (23)..(710): Homolog of NCBI NO: 34905780 NR Description: selenium-binding protein-like [Oryza sativa
  misc_feature (73)..(710): Homolog of NCBI NO: 15234095 NR Description: putative protein; protein id: At4g33170.1
  misc_feature (17)..(710): Homolog of NCBI NO: 34897884 NR Description: Similar to Arabidopsis thaliana DNA chromosome 4,
MSALSVIEQRLLKWDKLASLVPKSKKTPFPIDRLNELLKVCANSSYLRIGESIHAHLIVTNQSSRAEDAYQINSLINLYVKCRETVRARKLFDLMPERNVVSWCAMMKGYQNSGFDFEVLKLFKSMFFSGESRPNEFVATVVFKSCSNSGRIEEGKQFHGCFLKYGLISHEFVRNTLVYMYSLCSGNGEAIRVLDDLPYCDLSVFSSALSGYLECGAFKEGLDVLRKTANEDFVWNNLTYLSSLRLFSNLRDLNLALQVHSRMVRFGFNAEVEACGALINMYGKCGKVLYAQRVFDDTHAQNIFLNTTIMDAYFQDKSFEEALNLFSKMDTKEVPPNEYTFAILLNSIAELSLLKQGDLLHGLVLKSGYRNHVMVGNALVNMYAKSGSIEDARKAFSGMTFRDIVTWNTMISGCSHHGLGREALEAFDRMIFTGEIPNRITFIGVLQACSHIGFVEQGLHYFNQLMKKFDVQPDIQHYTCIVGLLSKAGMFKDAEDFMRTAPIEWDVVAWRTLLNACYVRRNYRLGKKVAEYAIEKYPNDSGVYVLLSNIHAKSREWEGVAKVRSLMNNRGVKKEPGVSWIGIRNQTHVFLAEDNQHPEITLIYAKVKEVMSKIKPLGYSPDVAGAFHDVDEEQREDNLSYHSEKLAVAYGLIKTPEKSPLYVTKNVRICDDCHSAIKLISKISKRYIVIRDSNRFHHFLDGQCSCCDYW

SEQ ID NO: 83486 - protein, 616 aa, Arabidopsis thaliana
  peptide (1)..(616): Ceres Seq. ID no. 12670480
  misc_feature (311)..(345): Pfam Name: PPR repeat Pfam Description: PPR repeat
  misc_feature (1)..(616): Homolog of NCBI NO: 34915012 NR Description: P0458A05.10 [Oryza sativa (japonica
  misc_feature (1)..(616): Homolog of NCBI NO: 15226200 NR Description: putative selenium-binding protein; protein id:
  misc_feature (1)..(616): Homolog of NCBI NO: 37535570 NR Description: hypothetical protein [Oryza sativa (japonica group)] >gi|16905194|gb|AAL31064.1| hypothetical protein [Oryza >gi|31432781|gb|AAP54374.1| hypothetical protein [Oryza sativa
  misc_feature (1)..(616): Homolog of NCBI NO: 30693150 NR Description: pentatricopeptide (PPR) repeat-containing protein
  misc_feature (1)..(616): Homolog of NCBI NO: 15236324 NR Description: putative protein; protein id: At4g13650.1
  misc_feature (1)..(616): Homolog of NCBI NO: 18483237 NR Description: putative vegetative storage protein [Sorghum
  misc_feature (1)..(616): Homolog of NCBI NO: 15220337 NR Description: hypothetical protein; protein id: At1g11290.1
  misc_feature (1)..(616): Homolog of NCBI NO: 34905780 NR Description: selenium-binding protein-like [Oryza sativa
  misc_feature (1)..(616): Homolog of NCBI NO: 15234095 NR Description: putative protein; protein id: At4g33170.1
  misc_feature (1)..(616): Homolog of NCBI NO: 34897884 NR Description: Similar to Arabidopsis thaliana DNA chromosome 4,
MPERNVVSWCAMMKGYQNSGFDFEVLKLFKSMFFSGESRPNEFVATVVFKSCSNSGRIEEGKQFHGCFLKYGLISHEFVRNTLVYMYSLCSGNGEAIRVLDDLPYCDLSVFSSALSGYLECGAFKEGLDVLRKTANEDFVWNNLTYLSSLRLFSNLRDLNLALQVHSRMVRFGFNAEVEACGALINMYGKCGKVLYAQRVFDDTHAQNIFLNTTIMDAYFQDKSFEEALNLFSKMDTKEVPPNEYTFAILLNSIAELSLLKQGDLLHGLVLKSGYRNHVMVGNALVNMYAKSGSIEDARKAFSGMTFRDIVTWNTMISGCSHHGLGREALEAFDRMIFTGEIPNRITFIGVLQACSHIGFVEQGLHYFNQLMKKFDVQPDIQHYTCIVGLLSKAGMFKDAEDFMRTAPIEWDVVAWRTLLNACYVRRNYRLGKKVAEYAIEKYPNDSGVYVLLSNIHAKSREWEGVAKVRSLMNNRGVKKEPGVSWIGIRNQTHVFLAEDNQHPEITLIYAKVKEVMSKIKPLGYSPDVAGAFHDVDEEQREDNLSYHSEKLAVAYGLIKTPEKSPLYVTKNVRICDDCHSAIKLISKISKRYIVIRDSNRFHHFLDGQCSCCDYW

SEQ ID NO: 83487 - protein, 605 aa, Arabidopsis thaliana
  peptide (1)..(605): Ceres Seq. ID no. 12670481
  misc_feature (300)..(334): Pfam Name: PPR repeat Pfam Description: PPR repeat
  misc_feature (1)..(605): Homolog of NCBI NO: 34915012 NR Description: P0458A05.10 [Oryza sativa (japonica
  misc_feature (1)..(605): Homolog of NCBI NO: 15226200 NR Description: putative selenium-binding protein; protein id:
  misc_feature (1)..(605): Homolog of NCBI NO: 37535570 NR Description: hypothetical protein [Oryza sativa (japonica group)] >gi|16905194|gb|AAL31064.1| hypothetical protein [Oryza >gi|31432781|gb|AAP54374.1| hypothetical protein [Oryza sativa
  misc_feature (1)..(605): Homolog of NCBI NO: 30693150 NR Description: pentatricopeptide (PPR) repeat-containing protein
  misc_feature (1)..(605): Homolog of NCBI NO: 15236324 NR Description: putative protein; protein id: At4g13650.1
  misc_feature (1)..(605): Homolog of NCBI NO: 18483237 NR Description: putative vegetative storage protein [Sorghum
  misc_feature (1)..(605): Homolog of NCBI NO: 15220337 NR Description: hypothetical protein; protein id: At1g11290.1
  misc_feature (1)..(605): Homolog of NCBI NO: 34905780 NR Description: selenium-binding protein-like [Oryza sativa
  misc_feature (1)..(605): Homolog of NCBI NO: 15234095 NR Description: putative protein; protein id: At4g33170.1
  misc_feature (1)..(605): Homolog of NCBI NO: 34897884 NR Description: Similar to Arabidopsis thaliana DNA chromosome 4,
MMKGYQNSGFDFEVLKLFKSMFFSGESRPNEFVATVVFKSCSNSGRIEEGKQFHGCFLKYGLISHEFVRNTLVYMYSLCSGNGEAIRVLDDLPYCDLSVFSSALSGYLECGAFKEGLDVLRKTANEDFVWNNLTYLSSLRLFSNLRDLNLALQVHSRMVRFGFNAEVEACGALINMYGKCGKVLYAQRVFDDTHAQNIFLNTTIMDAYFQDKSFEEALNLFSKMDTKEVPPNEYTFAILLNSIAELSLLKQGDLLHGLVLKSGYRNHVMVGNALVNMYAKSGSIEDARKAFSGMTFRDIVTWNTMISGCSHHGLGREALEAFDRMIFTGEIPNRITFIGVLQACSHIGFVEQGLHYFNQLMKKFDVQPDIQHYTCIVGLLSKAGMFKDAEDFMRTAPIEWDVVAWRTLLNACYVRRNYRLGKKVAEYAIEKYPNDSGVYVLLSNIHAKSREWEGVAKVRSLMNNRGVKKEPGVSWIGIRNQTHVFLAEDNQHPEITLIYAKVKEVMSKIKPLGYSPDVAGAFHDVDEEQREDNLSYHSEKLAVAYGLIKTPEKSPLYVTKNVRICDDCHSAIKLISKISKRYIVIRDSNRFHHFLDGQCSCCDYW

SEQ ID NO: 83488 - DNA, 2037 bp, Arabidopsis thaliana
  misc_feature (1)..(2037): Ceres Seq. ID no. 12670489
  misc_feature: MA Experiment ID: 20000437 Result: Down-regulated in Transcription
  misc_feature: MA Experiment 20000437 PARAMETER Experiment Name: At_Drought_P Parameter: Age (day) Value: 8
  misc_feature: MA Experiment 20000437 PARAMETER Experiment Name: At_Drought_P Parameter: Organism Value: A. thaliana
  misc_feature: MA Experiment 20000437 PARAMETER Experiment Name: At_Drought_P Parameter: Plant Line Value: WS
  misc_feature: MA Experiment 20000437 PARAMETER Experiment Name: At_Drought_P Parameter: Timepoint (hr) Value: 24
  misc_feature: MA Experiment 20000437 PARAMETER Experiment Name: At_Drought_P Parameter: Tissue Value: Whole Plant
  misc_feature: MA Experiment 20000437 PARAMETER Experiment Name: At_Drought_P Parameter: Treatment Value: Drought vs. No Drought
  misc_feature: MA Experiment ID: 20000527 Result: Up-regulated in Transcription
  misc_feature: MA Experiment 20000527 PARAMETER Experiment Name: At_10percent_PEG_P Parameter: Age (day) Value: 20
  misc_feature: MA Experiment 20000527 PARAMETER Experiment Name: At_10percent_PEG_P Parameter: Organism Value: A. thaliana
  misc_feature: MA Experiment 20000527 PARAMETER Experiment Name: At_10percent_PEG_P Parameter: Plant Line Value: WS
  misc_feature: MA Experiment 20000527 PARAMETER Experiment Name: At_10percent_PEG_P Parameter: Timepoint (day) Value: 20
  misc_feature: MA Experiment 20000527 PARAMETER Experiment Name: At_10percent_PEG_P Parameter: Tissue Value: Whole Plant
  misc_feature: MA Experiment 20000527 PARAMETER Experiment Name: At_10percent_PEG_P Parameter: Treatment Value: 10percent PEG vs. No Treatment
  misc_feature: MA Experiment ID: 20001451 Result: Down-regulated in Transcription
  misc_feature: MA Experiment 20001451 PARAMETER Experiment Name: At_Far-red-induction_P Parameter: Age (day) Value: 7
  misc_feature: MA Experiment 20001451 PARAMETER Experiment Name: At_Far-red-induction_P Parameter: Light Value: Far-red vs. White
  misc_feature: MA Experiment 20001451 PARAMETER Experiment Name: At_Far-red-induction_P Parameter: Organism Value: A. thaliana
  misc_feature: MA Experiment 20001451 PARAMETER Experiment Name: At_Far-red-induction_P Parameter: Plant Line Value: Columbia
  misc_feature: MA Experiment 20001451 PARAMETER Experiment Name: At_Far-red-induction_P Parameter: Timepoint (hr) Value: 24
  misc_feature: MA Experiment 20001451 PARAMETER Experiment Name: At_Far-red-induction_P Parameter: Tissue Value: Whole Plant
atgtacatagaaattgcttcatcttcttcactttctcttccattattacccttaaccagacctcatatctacacttcgatacccttctccaccattcctgaagctagacaacgcaatctcatcttcacagtctctgcttcttcttcttcagaatccacacaaaacaaaaaggtatggagaaaacaaccggagaagaacactacgtcgtcgtttcaggccttaaggaaacatcggaggtatcaaagatctgcttttctcgaccacaacgtcgatatggacgagcttttagcttcaattcaccagacccagaacgaaaaagagcttttttctttgctttcaacttacaaagacagacaattatctatacggttcatggtctctcttctttctcgagaaaatgattggcagagatcattggcattgctcgattgggttcatgaggaagccaaatacacaccttctgtgttcgcctacaatgttgttcttcgaaatgtgttgagagctaagcagtttgatattgcacacggactgttcgacgaaatgcgtcagagagctcttgcccctgataggtatacttattcaacgctaattacctcgtttggtaaagagggtatgtttgattctgctttgtcttggcttcaaaagatggaacaagaccgtgtttctggtgaccttgttttgtatagcaacctcattgagctttctaggaggctgtgtgattactctaaggctatctcgattttctcgaggttgaagaggtctggtattacgcctgatcttgttgcgtataattcgatgatcaatgtttatggaaaggccaaattgtttagagaggcgcggttgcttataaaggagatgaatgaagctggtgtcttaccaaatacagttagttactctactcttttgagtgtttatgtagagaatcacaagtttttagaagctttatcggttttcgcagagatgaaagaggtgaattgtgcgttggatctcacgacttgtaatataatgattgatgtttatggtcagcttgacatggttaaagaagctgataggttgttttggagtttgaggaaaatggatattgaacctaatgttgttagctacaatactatccttcgtgtttacggtgaggctgagcttttcggtgaagcgattcatcttttcaggttgatgcagaggaaagacattgaacagaacgttgttacttacaatacgatgattaagatctatgggaaaactatggagcacgaaaaggccacgaatcttgttcaagagatgcagagccgaggaattgaacctaatgccattacctactcaactattatatcaatatggggaaaagctgggaaattggaccgagctgcgacactgtttcagaagctgaggagctctggtgtggaaatcgatcaagttctgtatcaaaccatgattgtggcttatgaaagagttggtctaatgggtcatgctaaacgtctgcttcacgagttaaagctcccggataatattcctcgggaaaccgctatcaccattctggctaaagctgggagaacggaagaggcgacatgggtttttcgtcaagcctttgaatccggggaggtaaaagacatatcagtatttggctgtatgatcaatctttactcaagaaaccaaagatacgtaaatgtcatcgaagtgtttgagaaaatgagaaccgctggttactttccggattcgaatgtgatagctatggtgttgaacgcgtacgggaaacaaagagagtttgaaaaagcagacacggtttacagagaaatgcaagaggaaggatgtgttttccctgatgaagttcatttccaaatgctgagtttatactcatcgaagaaagattttgagatggttgagtcgttgtttcagagattagaatctgatcctaatgtcaatagcaaggagttgcatttggttgtggcggctttgtatgagagagcagataaactaaacgatgcttcaagagtcatgaatcggatgagagaacgaggaatcttaaagccatttcctggttga

SEQ ID NO: 83489 - protein, 678 aa, Arabidopsis thaliana
  peptide (1)..(678): Ceres Seq. ID no. 12670490
  misc_feature (331)..(365): Pfam Name: PPR repeat Pfam Description: PPR repeat
  misc_feature (45)..(668): Homolog of NCBI NO: 34908002 NR Description: P0460C04.10 [Oryza sativa (japonica
  misc_feature (138)..(597): Homolog of NCBI NO: 25404380 NR Description: hypothetical protein F16P17.7 [imported] - thaliana >gi|8493580|gb|AAF75803.1|AC011000_6 Contains weak to leaf protein from Ipomea nil gb|D85101 and contains a RepB
  misc_feature (138)..(589): Homolog of NCBI NO: 15221635 NR Description: unknown protein; protein id: At1g62930.1
  misc_feature (122)..(673): Homolog of NCBI NO: 15242557 NR Description: putative protein; protein id: At5g02860.1
  misc_feature (88)..(661): Homolog of NCBI NO: 15221411 NR Description: hypothetical protein; protein id: At1g74850.1
  misc_feature (138)..(579): Homolog of NCBI NO: 25404377 NR Description: hypothetical protein F16P17.5 [imported] - thaliana >gi|8493578|gb|AAF75801.1|AC011000_4 Contains a RepB protein domain and multiple PPR PF|01535 repeats. [Arabidopsis
  misc_feature (138)..(608): Homolog of NCBI NO: 15221621 NR Description: unknown protein; protein id: At1g62910.1
  misc_feature (138)..(579): Homolog of NCBI NO: 18407744 NR Description: expressed protein; protein id: At1g63150.1, by cDNA: gi_15810426 [Arabidopsis thaliana]
  misc_feature (148)..(579): Homolog of NCBI NO: 15221691 NR Description: unknown protein; protein id: At1g63130.1
  misc_feature (70)..(671): Homolog of NCBI NO: 15242557 NR Description: putative protein; protein id: At5g02860.1
MYIEIASSSSLSLPLLPLTRPHIYTSIPFSTIPEARQRNLIFTVSASSSSESTQNKKVWRKQPEKNTTSSFQALRKHRRYQRSAFLDHNVDMDELLASIHQTQNEKELFSLLSTYKDRQLSIRFMVSLLSRENDWQRSLALLDWVHEEAKYTPSVFAYNVVLRNVLRAKQFDIAHGLFDEMRQRALAPDRYTYSTLITSFGKEGMFDSALSWLQKMEQDRVSGDLVLYSNLIELSRRLCDYSKAISIFSRLKRSGITPDLVAYNSMINVYGKAKLFREARLLIKEMNEAGVLPNTVSYSTLLSVYVENHKFLEALSVFAEMKEVNCALDLTTCNIMIDVYGQLDMVKEADRLFWSLRKMDIEPNVVSYNTILRVYGEAELFGEAIHLFRLMQRKDIEQNVVTYNTMIKIYGKTMEHEKATNLVQEMQSRGIEPNAITYSTIISIWGKAGKLDRAATLFQKLRSSGVEIDQVLYQTMIVAYERVGLMGHAKRLLHELKLPDNIPRETAITILAKAGRTEEATWVFRQAFESGEVKDISVFGCMINLYSRNQRYVNVIEVFEKMRTAGYFPDSNVIAMVLNAYGKQREFEKADTVYREMQEEGCVFPDEVHFQMLSLYSSKKDFEMVESLFQRLESDPNVNSKELHLVVAALYERADKLNDASRVMNRMRERGILKPFPG

SEQ ID NO: 83490 - protein, 587 aa, Arabidopsis thaliana
  peptide (1)..(587): Ceres Seq. ID no. 12670491
  misc_feature (240)..(274): Pfam Name: PPR repeat Pfam Description: PPR repeat
  misc_feature (1)..(577): Homolog of NCBI NO: 34908002 NR Description: P0460C04.10 [Oryza sativa (japonica
  misc_feature (47)..(506): Homolog of NCBI NO: 25404380 NR Description: hypothetical protein F16P17.7 [imported] - thaliana >gi|8493580|gb|AAF75803.1|AC011000_6 Contains weak to leaf protein from Ipomea nil gb|D85101 and contains a RepB
  misc_feature (47)..(498): Homolog of NCBI NO: 15221635 NR Description: unknown protein; protein id: At1g62930.1
  misc_feature (31)..(582): Homolog of NCBI NO: 15242557 NR Description: putative protein; protein id: At5g02860.1
  misc_feature (1)..(570): Homolog of NCBI NO: 15221411 NR Description: hypothetical protein; protein id: At1g74850.1
  misc_feature (47)..(488): Homolog of NCBI NO: 25404377 NR Description: hypothetical protein F16P17.5 [imported] - thaliana >gi|8493578|gb|AAF75801.1|AC011000_4 Contains a RepB protein domain and multiple PPR PF|01535 repeats. [Arabidopsis
  misc_feature (47)..(517): Homolog of NCBI NO: 15221621 NR Description: unknown protein; protein id: At1g62910.1
  misc_feature (47)..(488): Homolog of NCBI NO: 18407744 NR Description: expressed protein; protein id: At1g63150.1, by cDNA: gi_15810426 [Arabidopsis thaliana]
  misc_feature (57)..(488): Homolog of NCBI NO: 15221691 NR Description: unknown protein; protein id: At1g63130.1
  misc_feature (1)..(580): Homolog of NCBI NO: 15242557 NR Description: putative protein; protein id: At5g02860.1
MDELLASIHQTQNEKELFSLLSTYKDRQLSIRFMVSLLSRENDWQRSLALLDWVHEEAKYTPSVFAYNVVLRNVLRAKQFDIAHGLFDEMRQRALAPDRYTYSTLITSFGKEGMFDSALSWLQKMEQDRVSGDLVLYSNLIELSRRLCDYSKAISIFSRLKRSGITPDLVAYNSMINVYGKAKLFREARLLIKEMNEAGVLPNTVSYSTLLSVYVENHKFLEALSVFAEMKEVNCALDLTTCNIMIDVYGQLDMVKEADRLFWSLRKMDIEPNVVSYNTILRVYGEAELFGEAIHLFRLMQRKDIEQNVVTYNTMIKIYGKTMEHEKATNLVQEMQSRGIEPNAITYSTIISIWGKAGKLDRAATLFQKLRSSGVEIDQVLYQTMIVAYERVGLMGHAKRLLHELKLPDNIPRETAITILAKAGRTEEATWVFRQAFESGEVKDISVFGCMINLYSRNQRYVNVIEVFEKMRTAGYFPDSNVIAMVLNAYGKQREFEKADTVYREMQEEGCVFPDEVHFQMLSLYSSKKDFEMVESLFQRLESDPNVNSKELHLVVAALYERADKLNDASRVMNRMRERGILKPFPG

SEQ ID NO: 83491 - protein, 554 aa, Arabidopsis thaliana
  peptide (1)..(554): Ceres Seq. ID no. 12670492
  misc_feature (207)..(241): Pfam Name: PPR repeat Pfam Description: PPR repeat
  misc_feature (1)..(544): Homolog of NCBI NO: 34908002 NR Description: P0460C04.10 [Oryza sativa (japonica
  misc_feature (14)..(473): Homolog of NCBI NO: 25404380 NR Description: hypothetical protein F16P17.7 [imported] - thaliana >gi|8493580|gb|AAF75803.1|AC011000_6 Contains weak to leaf protein from Ipomea nil gb|D85101 and contains a RepB
  misc_feature (14)..(465): Homolog of NCBI NO: 15221635 NR Description: unknown protein; protein id: At1g62930.1
  misc_feature (1)..(549): Homolog of NCBI NO: 15242557 NR Description: putative protein; protein id: At5g02860.1
  misc_feature (1)..(537): Homolog of NCBI NO: 15221411 NR Description: hypothetical protein; protein id: At1g74850.1
  misc_feature (14)..(455): Homolog of NCBI NO: 25404377 NR Description: hypothetical protein F16P17.5 [imported] - thaliana >gi|8493578|gb|AAF75801.1|AC011000_4 Contains a RepB protein domain and multiple PPR PF|01535 repeats. [Arabidopsis
  misc_feature (14)..(484): Homolog of NCBI NO: 15221621 NR Description: unknown protein; protein id: At1g62910.1
  misc_feature (14)..(455): Homolog of NCBI NO: 18407744 NR Description: expressed protein; protein id: At1g63150.1, by cDNA: gi_15810426 [Arabidopsis thaliana]
  misc_feature (24)..(455): Homolog of NCBI NO: 15221691 NR Description: unknown protein; protein id: At1g63130.1
  misc_feature (1)..(547): Homolog of NCBI NO: 15242557 NR Description: putative protein; protein id: At5g02860.1
MVSLLSRENDWQRSLALLDWVHEEAKYTPSVFAYNVVLRNVLRAKQFDIAHGLFDEMRQRALAPDRYTYSTLITSFGKEGMFDSALSWLQKMEQDRVSGDLVLYSNLIELSRRLCDYSKAISIFSRLKRSGITPDLVAYNSMINVYGKAKLFREARLLIKEMNEAGVLPNTVSYSTLLSVYVENHKFLEALSVFAEMKEVNCALDLTTCNIMIDVYGQLDMVKEADRLFWSLRKMDIEPNVVSYNTILRVYGEAELFGEAIHLFRLMQRKDIEQNVVTYNTMIKIYGKTMEHEKATNLVQEMQSRGIEPNAITYSTIISIWGKAGKLDRAATLFQKLRSSGVEIDQVLYQTMIVAYERVGLMGHAKRLLHELKLPDNIPRETAITILAKAGRTEEATWVFRQAFESGEVKDISVFGCMINLYSRNQRYVNVIEVFEKMRTAGYFPDSNVIAMVLNAYGKQREFEKADTVYREMQEEGCVFPDEVHFQMLSLYSSKKDFEMVESLFQRLESDPNVNSKELHLVVAALYERADKLNDASRVMNRMRERGILKPFPG

SEQ ID NO: 83492 - DNA, 771 bp, Arabidopsis thaliana
  misc_feature (1)..(771): Ceres Seq. ID no. 12670493
  misc_feature: MA Experiment ID: 20000184 Result: Down-regulated in Transcription
  misc_feature: MA Experiment 20000184 PARAMETER Experiment Name: At_Shoots__P Parameter: Age (day) Value: 7
  misc_feature: MA Experiment 20000184 PARAMETER Experiment Name: At_Shoots__P Parameter: Tissue Value: Shoots vs. Whole Plant
  misc_feature: MA Experiment ID: 20000794 Result: Down-regulated in Transcription
  misc_feature: MA Experiment 20000794 PARAMETER Experiment Name: At_Petals_P Parameter: Age (day) Value: 23-25 days
  misc_feature: MA Experiment 20000794 PARAMETER Experiment Name: At_Petals_P Parameter: Plant Line Value: WS
  misc_feature: MA Experiment 20000794 PARAMETER Experiment Name: At_Petals_P Parameter: Tissue Value: Petals vs. Whole plant
  misc_feature: MA Experiment ID: 20001558 Result: Down-regulated in Transcription
  misc_feature: MA Experiment 20001558 PARAMETER Experiment Name: At_Drought_Soil_Dry_P Parameter: Age (day) Value: 27
  misc_feature: MA Experiment 20001558 PARAMETER Experiment Name: At_Drought_Soil_Dry_P Parameter: Organism Value: A. thaliana
  misc_feature: MA Experiment 20001558 PARAMETER Experiment Name: At_Drought_Soil_Dry_P Parameter: Plant Line Value: WS
  misc_feature: MA Experiment 20001558 PARAMETER Experiment Name: At_Drought_Soil_Dry_P Parameter: Post Timepoint (hr) Value: 6
  misc_feature: MA Experiment 20001558 PARAMETER Experiment Name: At_Drought_Soil_Dry_P Parameter: Post-Treatment Value: Re-Water vs. No Drought
  misc_feature: MA Experiment 20001558 PARAMETER Experiment Name: At_Drought_Soil_Dry_P Parameter: Timepoint (day) Value: 13
  misc_feature: MA Experiment 20001558 PARAMETER Experiment Name: At_Drought_Soil_Dry_P Parameter: Treatment Value: Drought vs. No Drought
atgaaattccagtctacctccttgttacaacttttcataatatcgagttgtatagtatatggcaaagtaacaagccatgaggtaacgttttacgtgcaaaataaatgttcatttccgatttggccggccgttgccccaaactccggccatccggtgctagcctctggtggattttatctgccatgcggaggtattaaacgcattgatgctcctttgggttggagtggtcgcatttgggctagaacaggctgtgacttcacttcaaactcgaaacaagcttgtgaaacaggtgattgtgatggacatctggagtgtaatggattaatcggaaaacctccggcaacacttattcaaattgcggtacaagccgacaaatccaaacctaatttctacgatgtaagcctcgtggacggttataatcttcccgtcgtagtgaactcgaaacccgtatcatccaaatgcaccatcttagggtgccataaagatctcaaaaccacatgtcctgaagaactacaggttttgaacgaagagggacgagttgtggcgtgcaagagtgcatgtttagcgtttgataacgacagattttgttgccggaatgcatatggaacgccggaaaagtgcaaaagaaacacgtactctatgttgtttaaagaagcttgtcccaactattacagttatgcctacgagacacctcctcctttggtcacttgctccgccaaggaatatcttatcacgttttgtccatcaaactggggccatagttccacgtaa

SEQ ID NO: 83493 - protein, 256 aa, Arabidopsis thaliana
  peptide (1)..(256): Ceres Seq. ID no. 12670494
  misc_feature (34)..(248): Pfam Name: Thaumatin family Pfam Description: Thaumatin family
  misc_feature (1)..(256): Homolog of NCBI NO: 15242552 NR Description: thaumatin-like protein; protein id: At5g40020.1
  misc_feature (28)..(252): Homolog of NCBI NO: 37534308 NR Description: hypothetical protein [Oryza sativa (japonica group)] >gi|31432058|gb|AAP53743.1| hypothetical protein [Oryza
  misc_feature (9)..(248): Homolog of NCBI NO: 2129751 NR Description: thaumatin-like protein - Arabidopsis thaliana
  misc_feature (9)..(248): Homolog of NCBI NO: 15221033 NR Description: pathogenesis-related group 5 protein, putative; id: At1g18250.1, supported by cDNA: gi_536824 [Arabidopsis
  misc_feature (11)..(248): Homolog of NCBI NO: 15219508 NR Description: thaumatin-like protein; protein id: At1g73620.1,
  misc_feature (11)..(248): Homolog of NCBI NO: 21553814 NR Description: thaumatin-like protein [Arabidopsis thaliana]
  misc_feature (17)..(248): Homolog of NCBI NO: 6273385 NR Description: SCUTL2 [Vitis vinifera]
  misc_feature (11)..(248): Homolog of NCBI NO: 7442175 NR Description: thaumatin-like protein - turnip
  misc_feature (25)..(256): Homolog of NCBI NO: 7442168 NR Description: pathogenesis-related protein F20M13.220 -
  misc_feature (25)..(256): Homolog of NCBI NO: 18420282 NR Description: putative thaumatin-like protein; protein id: supported by cDNA: 32152., supported by cDNA: gi_17979354, by cDNA: gi_20466020 [Arabidopsis thaliana]
MKFQSTSLLQLFIISSCIVYGKVTSHEVTFYVQNKCSFPIWPAVAPNSGHPVLASGGFYLPCGGIKRIDAPLGWSGRIWARTGCDFTSNSKQACETGDCDGHLECNGLIGKPPATLIQIAVQADKSKPNFYDVSLVDGYNLPVVVNSKPVSSKCTILGCHKDLKTTCPEELQVLNEEGRVVACKSACLAFDNDRFCCRNAYGTPEKCKRNTYSMLFKEACPNYYSYAYETPPPLVTCSAKEYLITFCPSNWGHSST

SEQ ID NO: 83494 - DNA, 882 bp, Arabidopsis thaliana
  misc_feature (1)..(882): Ceres Seq. ID no. 12670506
  misc_feature: MA Experiment ID: 20001458 Result: Down-regulated in Transcription
  misc_feature: MA Experiment 20001458 PARAMETER Experiment Name: At_50mM_NH4NO3_L-to-H_P Parameter: Age (day) Value: Undefined
  misc_feature: MA Experiment 20001458 PARAMETER Experiment Name: At_50mM_NH4NO3_L-to-H_P Parameter: Organism Value: Undefined
  misc_feature: MA Experiment 20001458 PARAMETER Experiment Name: At_50mM_NH4NO3_L-to-H_P Parameter: Plant Line Value: Undefined
  misc_feature: MA Experiment 20001458 PARAMETER Experiment Name: At_50mM_NH4NO3_L-to-H_P Parameter: Timepoint (hr) Value: 2
  misc_feature: MA Experiment 20001458 PARAMETER Experiment Name: At_50mM_NH4NO3_L-to-H_P Parameter: Tissue Value: Siliques
  misc_feature: MA Experiment 20001458 PARAMETER Experiment Name: At_50mM_NH4NO3_L-to-H_P Parameter: Treatment Value: 50mM NH4NO3 vs. 100mM Manitol
  misc_feature: MA Experiment ID: 20001757 Result: Down-regulated in Transcription
  misc_feature: MA Experiment 20001757 PARAMETER Experiment Name: At_50mM_NH4NO3_L-to-H_P Parameter: Timepoint (hr) Value: 6
  misc_feature: MA Experiment 20001757 PARAMETER Experiment Name: At_50mM_NH4NO3_L-to-H_P Parameter: Tissue Value: Leaf
  misc_feature: MA Experiment 20001757 PARAMETER Experiment Name: At_50mM_NH4NO3_L-to-H_P Parameter: Treatment Value: 50mM NH4NO3 vs 100mM Mannitol
  misc_feature: MA Experiment ID: 20001904 Result: Down-regulated in Transcription
  misc_feature: MA Experiment 20001904 PARAMETER Experiment Name: At_Drought_Reproduction_P Parameter: Age (day) Value: 37
  misc_feature: MA Experiment 20001904 PARAMETER Experiment Name: At_Drought_Reproduction_P Parameter: Organism Value: A. thaliana
  misc_feature: MA Experiment 20001904 PARAMETER Experiment Name: At_Drought_Reproduction_P Parameter: Plant Line Value: WS
  misc_feature: MA Experiment 20001904 PARAMETER Experiment Name: At_Drought_Reproduction_P Parameter: Timepoint (day) Value: 7
  misc_feature: MA Experiment 20001904 PARAMETER Experiment Name: At_Drought_Reproduction_P Parameter: Tissue Value: Rosettes
  misc_feature: MA Experiment 20001904 PARAMETER Experiment Name: At_Drought_Reproduction_P Parameter: Treatment Value: Drought vs. No Drought
atggctctacgcagagcaatcactaaacgtctcattgactgttacagatccgatgtaacacaacaacactcatttttcagacaactctcaccctataacatgaagatccatcgtcagtacatgacttcacctaatggtccgaatcttacggaccggattgtcgggatccgcatcgagtccgtttctccgccgaggcgggaggaaacaccggtgatgggtttatcagttagtgagactaagaagttgttgaggctatatcaaatggagaaagtgaaagagagactcagagagattcctaaaagctctgtttcttattgggaatttattcagatctgttgtgagagttgtgggaatgatgagcaaggttctcaaatggctaagtctttggatcattcgggatgtgtcgtcgttttaggagacatagtttttcttcatccccatcagatagccaagtctatggaggcaatgatcaagcaaacatcagtacttccaaacgatccaaggaaagaagagttagttcagcttgcgactacaaagaagagtattgacatagaggcacgacgtatagtgcaggccgagttatattgtggtctcggtttcctagctgtgcaaactataggctttatgcgtcttaccttttgggaactaagctgggacgtaatggaacccatctgcttctttgtcacaaccattcatttcatcctcggttacatcttttttcttcggacatcgacggaaccatcattcgaaggactttttcgacagcggtttaagaccaaacagaagaagcttatggagaggcatggatttgattttctgaggtacaatgagctcaactctttgttcacaacatttccgtgtaaatttcattatccggtttag

SEQ ID NO: 83495 - protein, 293 aa, Arabidopsis thaliana
  peptide (1)..(293): Ceres Seq. ID no. 12670507
  misc_feature (111)..(291): Pfam Name: Protein of unknown function, DUF607 Pfam Description: Protein of unknown function, DUF607
  misc_feature (1)..(293): Homolog of NCBI NO: 15239011 NR Description: unknown protein; protein id: At5g42610.1 thaliana] >gi|10177139|dbj|BAB10499.1| gene_id:MFO20.2~unknown
  misc_feature (56)..(286): Homolog of NCBI NO: 15224063 NR Description: hypothetical protein; protein id: At2g23790.1
  misc_feature (56)..(286): Homolog of NCBI NO: 24496456 NR Description: hypothetical protein [Arabidopsis thaliana]
  misc_feature (56)..(286): Homolog of NCBI NO: 15234535 NR Description: putative protein; protein id: At4g36820.1
  misc_feature (65)..(278): Homolog of NCBI NO: 37535778 NR Description: unknown protein [Oryza sativa (japonica
  misc_feature (56)..(281): Homolog of NCBI NO: 14596231 NR Description: Unknown protein [Arabidopsis thaliana]
  misc_feature (56)..(281): Homolog of NCBI NO: 15240047 NR Description: putative protein; protein id: At5g66650.1, by cDNA: gi_14596230 [Arabidopsis thaliana] contains similarity to unknown
  misc_feature (44)..(278): Homolog of NCBI NO: 20330769 NR Description: Hypothetical protein [Oryza sativa (japonica
  misc_feature (62)..(287): Homolog of NCBI NO: 18391039 NR Description: Expressed protein; protein id: At1g09575.1,
  misc_feature (66)..(287): Homolog of NCBI NO: 22330290 NR Description: hypothetical protein; protein id: At1g57610.1, by cDNA: gi_17979162 [Arabidopsis thaliana]
MALRRAITKRLIDCYRSDVTQQHSFFRQLSPYNMKIHRQYMTSPNGPNLTDRIVGIRIESVSPPRREETPVMGLSVSETKKLLRLYQMEKVKERLREIPKSSVSYWEFIQICCESCGNDEQGSQMAKSLDHSGCVVVLGDIVFLHPHQIAKSMEAMIKQTSVLPNDPRKEELVQLATTKKSIDIEARRIVQAELYCGLGFLAVQTIGFMRLTFWELSWDVMEPICFFVTTIHFILGYIFFLRTSTEPSFEGLFRQRFKTKQKKLMERHGFDFLRYNELNSLFTTFPCKFHYPV

SEQ ID NO: 83496 - protein, 260 aa, Arabidopsis thaliana
  peptide (1)..(260): Ceres Seq. ID no. 12670508
  misc_feature (78)..(258): Pfam Name: Protein of unknown function, DUF607 Pfam Description: Protein of unknown function, DUF607
  misc_feature (1)..(260): Homolog of NCBI NO: 15239011 NR Description: unknown protein; protein id: At5g42610.1 thaliana] >gi|10177139|dbj|BAB10499.1| gene_id:MFO20.2~unknown
  misc_feature (23)..(253): Homolog of NCBI NO: 15224063 NR Description: hypothetical protein; protein id: At2g23790.1
  misc_feature (23)..(253): Homolog of NCBI NO: 24496456 NR Description: hypothetical protein [Arabidopsis thaliana]
  misc_feature (23)..(253): Homolog of NCBI NO: 15234535 NR Description: putative protein; protein id: At4g36820.1
  misc_feature (32)..(245): Homolog of NCBI NO: 37535778 NR Description: unknown protein [Oryza sativa (japonica
  misc_feature (23)..(248): Homolog of NCBI NO: 14596231 NR Description: Unknown protein [Arabidopsis thaliana]
  misc_feature (23)..(248): Homolog of NCBI NO: 15240047 NR Description: putative protein; protein id: At5g66650.1, by cDNA: gi_14596230 [Arabidopsis thaliana] contains similarity to unknown
  misc_feature (11)..(245): Homolog of NCBI NO: 20330769 NR Description: Hypothetical protein [Oryza sativa (japonica
  misc_feature (29)..(254): Homolog of NCBI NO: 18391039 NR Description: Expressed protein; protein id: At1g09575.1,
  misc_feature (33)..(254): Homolog of NCBI NO: 22330290 NR Description: hypothetical protein; protein id: At1g57610.1, by cDNA: gi_17979162 [Arabidopsis thaliana]
MKIHRQYMTSPNGPNLTDRIVGIRIESVSPPRREETPVMGLSVSETKKLLRLYQMEKVKERLREIPKSSVSYWEFIQICCESCGNDEQGSQMAKSLDHSGCVVVLGDIVFLHPHQIAKSMEAMIKQTSVLPNDPRKEELVQLATTKKSIDIEARRIVQAELYCGLGFLAVQTIGFMRLTFWELSWDVMEPICFFVTTIHFILGYIFFLRTSTEPSFEGLFRQRFKTKQKKLMERHGFDFLRYNELNSLFTTFPCKFHYPV

SEQ ID NO: 83497 - protein, 253 aa, Arabidopsis thaliana
  peptide (1)..(253): Ceres Seq. ID no. 12670509
  misc_feature (71)..(251): Pfam Name: Protein of unknown function, DUF607 Pfam Description: Protein of unknown function, DUF607
  misc_feature (1)..(253): Homolog of NCBI NO: 15239011 NR Description: unknown protein; protein id: At5g42610.1 thaliana] >gi|10177139|dbj|BAB10499.1| gene_id:MFO20.2~unknown
  misc_feature (16)..(246): Homolog of NCBI NO: 15224063 NR Description: hypothetical protein; protein id: At2g23790.1
  misc_feature (16)..(246): Homolog of NCBI NO: 24496456 NR Description: hypothetical protein [Arabidopsis thaliana]
  misc_feature (16)..(246): Homolog of NCBI NO: 15234535 NR Description: putative protein; protein id: At4g36820.1
  misc_feature (25)..(238): Homolog of NCBI NO: 37535778 NR Description: unknown protein [Oryza sativa (japonica
  misc_feature (16)..(241): Homolog of NCBI NO: 14596231 NR Description: Unknown protein [Arabidopsis thaliana]
  misc_feature (16)..(241): Homolog of NCBI NO: 15240047 NR Description: putative protein; protein id: At5g66650.1, by cDNA: gi_14596230 [Arabidopsis thaliana] contains similarity to unknown
  misc_feature (4)..(238): Homolog of NCBI NO: 20330769 NR Description: Hypothetical protein [Oryza sativa (japonica
  misc_feature (22)..(247): Homolog of NCBI NO: 18391039 NR Description: Expressed protein; protein id: At1g09575.1,
  misc_feature (26)..(247): Homolog of NCBI NO: 22330290 NR Description: hypothetical protein; protein id: At1g57610.1, by cDNA: gi_17979162 [Arabidopsis thaliana]
MTSPNGPNLTDRIVGIRIESVSPPRREETPVMGLSVSETKKLLRLYQMEKVKERLREIPKSSVSYWEFIQICCESCGNDEQGSQMAKSLDHSGCVVVLGDIVFLHPHQIAKSMEAMIKQTSVLPNDPRKEELVQLATTKKSIDIEARRIVQAELYCGLGFLAVQTIGFMRLTFWELSWDVMEPICFFVTTIHFILGYIFFLRTSTEPSFEGLFRQRFKTKQKKLMERHGFDFLRYNELNSLFTTFPCKFHYPV

SEQ ID NO: 83498 - DNA, 1775 bp, Arabidopsis thaliana
  misc_feature (1)..(1775): Ceres Seq. ID no. 12670510
  misc_feature: MA Experiment ID: 20000173 Result: Down-regulated in Transcription
  misc_feature: MA Experiment 20000173 PARAMETER Experiment Name: At_42deg_Heat_P Parameter: Age (day) Value: 14
  misc_feature: MA Experiment 20000173 PARAMETER Experiment Name: At_42deg_Heat_P Parameter: Organism Value: A. thaliana
  misc_feature: MA Experiment 20000173 PARAMETER Experiment Name: At_42deg_Heat_P Parameter: Plant Line Value: WS
  misc_feature: MA Experiment 20000173 PARAMETER Experiment Name: At_42deg_Heat_P Parameter: Temperature (deg C) Value: 42 vs. 22
  misc_feature: MA Experiment 20000173 PARAMETER Experiment Name: At_42deg_Heat_P Parameter: Timepoint (hr) Value: 6
  misc_feature: MA Experiment 20000173 PARAMETER Experiment Name: At_42deg_Heat_P Parameter: Tissue Value: Aerial
  misc_feature: MA Experiment ID: 20000179 Result: Up-regulated in Transcription
  misc_feature: MA Experiment 20000179 PARAMETER Experiment Name: At_Germinating_Seeds_P Parameter: Age (hr) Value: 6 vs. 0
  misc_feature: MA Experiment 20000179 PARAMETER Experiment Name: At_Germinating_Seeds_P Parameter: Tissue Value: Germinating Seeds
  misc_feature: MA Experiment ID: 20000180 Result: Up-regulated in Transcription
  misc_feature: MA Experiment 20000180 PARAMETER Experiment Name: At_Germinating_Seeds_P Parameter: Age (hr) Value: 24 vs. 0
  misc_feature: MA Experiment 20000180 PARAMETER Experiment Name: At_Germinating_Seeds_P Parameter: Tissue Value: Germinating Seeds
  misc_feature: MA Experiment ID: 20000185 Result: Down-regulated in Transcription
  misc_feature: MA Experiment 20000185 PARAMETER Experiment Name: At_Roots__P Parameter: Age (day) Value: 7 vs. 21
  misc_feature: MA Experiment 20000185 PARAMETER Experiment Name: At_Roots__P Parameter: Organism Value: A. thaliana
  misc_feature: MA Experiment 20000185 PARAMETER Experiment Name: At_Roots__P Parameter: Tissue Value: Roots vs. Whole Plant
  misc_feature: MA Experiment ID: 20000234 Result: Down-regulated in Transcription
  misc_feature: MA Experiment 20000234 PARAMETER Experiment Name: At_Siliques_P Parameter: Age (day) Value: 21
  misc_feature: MA Experiment 20000234 PARAMETER Experiment Name: At_Siliques_P Parameter: Organism Value: A. thaliana
  misc_feature: MA Experiment 20000234 PARAMETER Experiment Name: At_Siliques_P Parameter: Plant Line Value: WS
  misc_feature: MA Experiment 20000234 PARAMETER Experiment Name: At_Siliques_P Parameter: Tissue Value: Less Than 5mm Siliques vs. Whole Plant
  misc_feature: MA Experiment ID: 20000264 Result: Down-regulated in Transcription
  misc_feature: MA Experiment 20000264 PARAMETER Experiment Name: At_Open_Flower_P Parameter: Age (day) Value: 21
  misc_feature: MA Experiment 20000264 PARAMETER Experiment Name: At_Open_Flower_P Parameter: Plant Line Value: WS
  misc_feature: MA Experiment 20000264 PARAMETER Experiment Name: At_Open_Flower_P Parameter: Tissue Value: Open Flower vs. Whole Plant
  misc_feature: MA Experiment ID: 20000265 Result: Down-regulated in Transcription
  misc_feature: MA Experiment 20000265 PARAMETER Experiment Name: At_Open_Flower_P Parameter: Age (day) Value: 21
  misc_feature: MA Experiment 20000265 PARAMETER Experiment Name: At_Open_Flower_P Parameter: Plant Line Value: WS
  misc_feature: MA Experiment 20000265 PARAMETER Experiment Name: At_Open_Flower_P Parameter: Tissue Value: Closed Flower vs. Whole Plant
  misc_feature: MA Experiment ID: 20000267 Result: Up-regulated in Transcription
  misc_feature: MA Experiment 20000267 PARAMETER Experiment Name: At_Drought_P Parameter: Age (day) Value: 7
  misc_feature: MA Experiment 20000267 PARAMETER Experiment Name: At_Drought_P Parameter: Organism Value: A. thaliana
  misc_feature: MA Experiment 20000267 PARAMETER Experiment Name: At_Drought_P Parameter: Plant Line Value: WS
  misc_feature: MA Experiment 20000267 PARAMETER Experiment Name: At_Drought_P Parameter: Timepoint (hr) Value: 6
  misc_feature: MA Experiment 20000267 PARAMETER Experiment Name: At_Drought_P Parameter: Tissue Value: Whole Plant
  misc_feature: MA Experiment 20000267 PARAMETER Experiment Name: At_Drought_P Parameter: Treatment Value: Drought vs. No Drought
  misc_feature: MA Experiment ID: 20000286 Result: Down-regulated in Transcription
  misc_feature: MA Experiment 20000286 PARAMETER Experiment Name: At_Open_Flower_P Parameter: Age (day) Value: 21
  misc_feature: MA Experiment 20000286 PARAMETER Experiment Name: At_Open_Flower_P Parameter: Plant Line Value: WS
  misc_feature: MA Experiment 20000286 PARAMETER Experiment Name: At_Open_Flower_P Parameter: Tissue Value: Half Open vs. Whole Plant
  misc_feature: MA Experiment ID: 20000439 Result: Down-regulated in Transcription
  misc_feature: MA Experiment 20000439 PARAMETER Experiment Name: At_Roots__P Parameter: Age (day) Value: 14 vs. 21
  misc_feature: MA Experiment 20000439 PARAMETER Experiment Name: At_Roots__P Parameter: Organism Value: A. thaliana
  misc_feature: MA Experiment 20000439 PARAMETER Experiment Name: At_Roots__P Parameter: Tissue Value: Roots vs. Whole Plant
  misc_feature: MA Experiment ID: 20000496 Result: Down-regulated in Transcription
  misc_feature: MA Experiment 20000496 PARAMETER Experiment Name: At_Guard_Cells_P Parameter: Harvest Date Value: 7/19/2002
  misc_feature: MA Experiment 20000496 PARAMETER Experiment Name: At_Guard_Cells_P Parameter: Organism Value: Canola
  misc_feature: MA Experiment 20000496 PARAMETER Experiment Name: At_Guard_Cells_P Parameter: Tissue Value: Guard Cells vs. Leaves
  misc_feature: MA Experiment ID: 20000527 Result: Down-regulated in Transcription
  misc_feature: MA Experiment 20000527 PARAMETER Experiment Name: At_10percent_PEG_P Parameter: Age (day) Value: 20
  misc_feature: MA Experiment 20000527 PARAMETER Experiment Name: At_10percent_PEG_P Parameter: Organism Value: A. thaliana
  misc_feature: MA Experiment 20000527 PARAMETER Experiment Name: At_10percent_PEG_P Parameter: Plant Line Value: WS
  misc_feature: MA Experiment 20000527 PARAMETER Experiment Name: At_10percent_PEG_P Parameter: Timepoint (day) Value: 20
  misc_feature: MA Experiment 20000527 PARAMETER Experiment Name: At_10percent_PEG_P Parameter: Tissue Value: Whole Plant
  misc_feature: MA Experiment 20000527 PARAMETER Experiment Name: At_10percent_PEG_P Parameter: Treatment Value: 10percent PEG vs. No Treatment
  misc_feature: MA Experiment ID: 20000794 Result: Down-regulated in Transcription
  misc_feature: MA Experiment 20000794 PARAMETER Experiment Name: At_Petals_P Parameter: Age (day) Value: 23-25 days
  misc_feature: MA Experiment 20000794 PARAMETER Experiment Name: At_Petals_P Parameter: Plant Line Value: WS
  misc_feature: MA Experiment 20000794 PARAMETER Experiment Name: At_Petals_P Parameter: Tissue Value: Petals vs. Whole plant
  misc_feature: MA Experiment ID: 20001248 Result: Down-regulated in Transcription
  misc_feature: MA Experiment 20001248 PARAMETER Experiment Name: At_Far-red-induction_P Parameter: Age (day) Value: 7
  misc_feature: MA Experiment 20001248 PARAMETER Experiment Name: At_Far-red-induction_P Parameter: Light Value: Far-red vs. White
  misc_feature: MA Experiment 20001248 PARAMETER Experiment Name: At_Far-red-induction_P Parameter: Organism Value: A. thaliana
  misc_feature: MA Experiment 20001248 PARAMETER Experiment Name: At_Far-red-induction_P Parameter: Plant Line Value: Columbia
  misc_feature: MA Experiment 20001248 PARAMETER Experiment Name: At_Far-red-induction_P Parameter: Timepoint (hr) Value: 4
  misc_feature: MA Experiment 20001248 PARAMETER Experiment Name: At_Far-red-induction_P Parameter: Tissue Value: Whole Plant
  misc_feature: MA Experiment ID: 20001450 Result: Down-regulated in Transcription
  misc_feature: MA Experiment 20001450 PARAMETER Experiment Name: At_Far-red-induction_P Parameter: Age (day) Value: 7
  misc_feature: MA Experiment 20001450 PARAMETER Experiment Name: At_Far-red-induction_P Parameter: Light Value: Far-red vs. White
  misc_feature: MA Experiment 20001450 PARAMETER Experiment Name: At_Far-red-induction_P Parameter: Organism Value: A. thaliana
  misc_feature: MA Experiment 20001450 PARAMETER Experiment Name: At_Far-red-induction_P Parameter: Plant Line Value: Columbia
  misc_feature: MA Experiment 20001450 PARAMETER Experiment Name: At_Far-red-induction_P Parameter: Timepoint (hr) Value: 8
  misc_feature: MA Experiment 20001450 PARAMETER Experiment Name: At_Far-red-induction_P Parameter: Tissue Value: Whole Plant
  misc_feature: MA Experiment ID: 20001451 Result: Down-regulated in Transcription
  misc_feature: MA Experiment 20001451 PARAMETER Experiment Name: At_Far-red-induction_P Parameter: Age (day) Value: 7
  misc_feature: MA Experiment 20001451 PARAMETER Experiment Name: At_Far-red-induction_P Parameter: Light Value: Far-red vs. White
  misc_feature: MA Experiment 20001451 PARAMETER Experiment Name: At_Far-red-induction_P Parameter: Organism Value: A. thaliana
  misc_feature: MA Experiment 20001451 PARAMETER Experiment Name: At_Far-red-induction_P Parameter: Plant Line Value: Columbia
  misc_feature: MA Experiment 20001451 PARAMETER Experiment Name: At_Far-red-induction_P Parameter: Timepoint (hr) Value: 24
  misc_feature: MA Experiment 20001451 PARAMETER Experiment Name: At_Far-red-induction_P Parameter: Tissue Value: Whole Plant
  misc_feature: MA Experiment ID: 20001557 Result: Down-regulated in Transcription
  misc_feature: MA Experiment 20001557 PARAMETER Experiment Name: At_Drought_Soil_Dry_P Parameter: Age (day) Value: 27
  misc_feature: MA Experiment 20001557 PARAMETER Experiment Name: At_Drought_Soil_Dry_P Parameter: Organism Value: A. thaliana
  misc_feature: MA Experiment 20001557 PARAMETER Experiment Name: At_Drought_Soil_Dry_P Parameter: Plant Line Value: WS
  misc_feature: MA Experiment 20001557 PARAMETER Experiment Name: At_Drought_Soil_Dry_P Parameter: Post Timepoint (hr) Value: 3
  misc_feature: MA Experiment 20001557 PARAMETER Experiment Name: At_Drought_Soil_Dry_P Parameter: Post-Treatment Value: Re-Water vs. No Drought
  misc_feature: MA Experiment 20001557 PARAMETER Experiment Name: At_Drought_Soil_Dry_P Parameter: Timepoint (day) Value: 13
  misc_feature: MA Experiment 20001557 PARAMETER Experiment Name: At_Drought_Soil_Dry_P Parameter: Treatment Value: Drought vs. No Drought
  misc_feature: MA Experiment ID: 20001558 Result: Down-regulated in Transcription
  misc_feature: MA Experiment 20001558 PARAMETER Experiment Name: At_Drought_Soil_Dry_P Parameter: Age (day) Value: 27
  misc_feature: MA Experiment 20001558 PARAMETER Experiment Name: At_Drought_Soil_Dry_P Parameter: Organism Value: A. thaliana
  misc_feature: MA Experiment 20001558 PARAMETER Experiment Name: At_Drought_Soil_Dry_P Parameter: Plant Line Value: WS
  misc_feature: MA Experiment 20001558 PARAMETER Experiment Name: At_Drought_Soil_Dry_P Parameter: Post Timepoint (hr) Value: 6
  misc_feature: MA Experiment 20001558 PARAMETER Experiment Name: At_Drought_Soil_Dry_P Parameter: Post-Treatment Value: Re-Water vs. No Drought
  misc_feature: MA Experiment 20001558 PARAMETER Experiment Name: At_Drought_Soil_Dry_P Parameter: Timepoint (day) Value: 13
  misc_feature: MA Experiment 20001558 PARAMETER Experiment Name: At_Drought_Soil_Dry_P Parameter: Treatment Value: Drought vs. No Drought
  misc_feature: MA Experiment ID: 20001560 Result: Down-regulated in Transcription
  misc_feature: MA Experiment 20001560 PARAMETER Experiment Name: At_Drought_Soil_Dry_P Parameter: Age (day) Value: 28
  misc_feature: MA Experiment 20001560 PARAMETER Experiment Name: At_Drought_Soil_Dry_P Parameter: Organism Value: A. thaliana
  misc_feature: MA Experiment 20001560 PARAMETER Experiment Name: At_Drought_Soil_Dry_P Parameter: Plant Line Value: WS
  misc_feature: MA Experiment 20001560 PARAMETER Experiment Name: At_Drought_Soil_Dry_P Parameter: Post Timepoint (hr) Value: None
  misc_feature: MA Experiment 20001560 PARAMETER Experiment Name: At_Drought_Soil_Dry_P Parameter: Post-Treatment Value: None
  misc_feature: MA Experiment 20001560 PARAMETER Experiment Name: At_Drought_Soil_Dry_P Parameter: Timepoint (day) Value: 14
  misc_feature: MA Experiment 20001560 PARAMETER Experiment Name: At_Drought_Soil_Dry_P Parameter: Treatment Value: Drought vs. No Drought
  misc_feature: MA Experiment ID: 20001911 Result: Down-regulated in Transcription
  misc_feature: MA Experiment 20001911 PARAMETER Experiment Name: At_Drought_Reproduction_P Parameter: Age (day) Value: 40
  misc_feature: MA Experiment 20001911 PARAMETER Experiment Name: At_Drought_Reproduction_P Parameter: Organism Value: A. thaliana
  misc_feature: MA Experiment 20001911 PARAMETER Experiment Name: At_Drought_Reproduction_P Parameter: Plant Line Value: WS
  misc_feature: MA Experiment 20001911 PARAMETER Experiment Name: At_Drought_Reproduction_P Parameter: Timepoint (day) Value: 10
  misc_feature: MA Experiment 20001911 PARAMETER Experiment Name: At_Drought_Reproduction_P Parameter: Tissue Value: Flowers
  misc_feature: MA Experiment 20001911 PARAMETER Experiment Name: At_Drought_Reproduction_P Parameter: Treatment Value: Drought vs. No Drought
ctcaatcacaacactcgccactgtttcgaatagatggcttctatttcaaccccttttccgatttctctccacccaaaaaccgtacgatcaaagccgttgaaattccgagttttgacccgtccgatcaaagcttccgggtcagaaactcctgatctaaccgtagcgacacgaaccggatccaaagatctcccgatccgaaacataccgggaaactacggtttaccaatcgtaggaccaatcaaagaccgttgggattacttttacgaccaaggagctgaagagttcttcaaatcacgaatccgtaaatacaactccacggtgtacagagtcaacatgccaccgggagcttttatcgccgagaatccacaagtcgtggctttactcgacggtaaaagcttcccggttttattcgatgtcgataaagtcgaaaagaaagatcttttcaccggtacttacatgccgtcaacggaactaaccggaggctaccgtatcctctcgtacctcgatccatcggagcctaaacacgaaaagctcaaaaatctccttttcttcctcctcaagtcatctcgaaaccggatcttccctgagtttcaagctacttactccgagcttttcgattctttggagaaagagctttcccttaaagggaaagcggatttcggcggttccagcgacggaaccgcctttaatttcttggctcgagctttctacgggacgaatcccgcagatacaaagctcaaagccgacgctccgggtttgatcactaaatgggttttattcaatctccatccattactctctattggtttaccgagagttatagaagaacctctcatccatacatttagtctaccaccggcgttagtcaaatctgattaccagagactctacgagtttttcttagaatccgccggtgagattctcgttgaagccgataaattgggtatctcacgagaagaagctactcacaatcttctcttcgccacgtgcttcaacacgtggggtgggatgaagattttgtttccgaatatggttaaacgtatcgggcgggcgggtcatcaagttcataaccgattagcggaggagattagatctgtgattaaatccaacggcggagaactcacgatgggagcgattgagaaaatggagttaaccaaatcagtggtttacgaatgtctccggtttgaaccaccggttacggctcaatacggtagagcgaagaaggatctggttatcgaaagccacgacgcggcgtttaaagtcaaagccggtgaaatgctttacggttatcaaccgttggcgacgagagatccgaagatttttgatcgggcggatgagtttgtgccggagagattcgtcggagaagaaggagagaagcttttgaggcatgtgttgtggtcgaatggaccggagacggagactccgacggtggggaataaacaatgcgccggtaaggattttgttgttttggtggcgaggttgtttgtgattgagattttccggcgatatgattcgtttgatattgaggttggtacgtcgccgttaggaagctccgttaatttctcgtcgttaaggaaagctagcttttaggagccaagggtaaatttgtaattgtatatgttcgcacctgtgtagtccatctgttttcttgttccagtttcgtgaattttgagaaaatgttgtataatctgttgctgctctacatgttcgtttttttgtcataatattaaagttcaagctggtaataagtatttacaaatctgtgagataatttc

SEQ ID NO: 83499 - protein, 518 aa, Arabidopsis thaliana
  peptide (1)..(518): Ceres Seq. ID no. 12670511
  misc_feature (347)..(441): Pfam Name: Cytochrome P450 Pfam Description: Cytochrome P450
  misc_feature (1)..(518): Homolog of NCBI NO: 15239032 NR Description: allene oxide synthase; protein id: At5g42650.1, by cDNA: gi_17065503, supported by cDNA: gi_17473593, supported cDNA: gi_6002956 [Arabidopsis thaliana]
  misc_feature (1)..(518): Homolog of NCBI NO: 1890152 NR Description: allene oxide synthase [Arabidopsis thaliana]
  misc_feature (1)..(518): Homolog of NCBI NO: 20160362 NR Description: allene oxide synthase [Solanum tuberosum]
  misc_feature (2)..(516): Homolog of NCBI NO: 16973300 NR Description: allene oxide synthase [Nicotiana attenuata]
  misc_feature (12)..(518): Homolog of NCBI NO: 29373135 NR Description: allene oxide synthase [Citrus sinensis]
  misc_feature (1)..(518): Homolog of NCBI NO: 7581989 NR Description: allene oxide synthase [Lycopersicon esculentum]
  misc_feature (1)..(516): Homolog of NCBI NO: 23956572 NR Description: allene oxide synthase [Solanum tuberosum]
  misc_feature (3)..(516): Homolog of NCBI NO: 7677376 NR Description: allene oxide synthase [Lycopersicon esculentum]
  misc_feature (29)..(518): Homolog of NCBI NO: 1352186 NR Description: Allene oxide synthase, chloroplast precursor dehydrase) (Cytochrome P450 74A) >gi|404866|gb|AAA03353.1| allene
  misc_feature (8)..(518): Homolog of NCBI NO: 21616113 NR Description: allene oxide synthase [Cucumis melo]
MASISTPFPISLHPKTVRSKPLKFRVLTRPIKASGSETPDLTVATRTGSKDLPIRNIPGNYGLPIVGPIKDRWDYFYDQGAEEFFKSRIRKYNSTVYRVNMPPGAFIAENPQVVALLDGKSFPVLFDVDKVEKKDLFTGTYMPSTELTGGYRILSYLDPSEPKHEKLKNLLFFLLKSSRNRIFPEFQATYSELFDSLEKELSLKGKADFGGSSDGTAFNFLARAFYGTNPADTKLKADAPGLITKWVLFNLHPLLSIGLPRVIEEPLIHTFSLPPALVKSDYQRLYEFFLESAGEILVEADKLGISREEATHNLLFATCFNTWGGMKILFPNMVKRIGRAGHQVHNRLAEEIRSVIKSNGGELTMGAIEKMELTKSVVYECLRFEPPVTAQYGRAKKDLVIESHDAAFKVKAGEMLYGYQPLATRDPKIFDRADEFVPERFVGEEGEKLLRHVLWSNGPETETPTVGNKQCAGKDFVVLVARLFVIEIFRRYDSFDIEVGTSPLGSSVNFSSLRKASF

SEQ ID NO: 83500 - protein, 418 aa, Arabidopsis thaliana
  peptide (1)..(418): Ceres Seq. ID no. 12670512
  misc_feature (247)..(341): Pfam Name: Cytochrome P450 Pfam Description: Cytochrome P450
  misc_feature (1)..(418): Homolog of NCBI NO: 15239032 NR Description: allene oxide synthase; protein id: At5g42650.1, by cDNA: gi_17065503, supported by cDNA: gi_17473593, supported cDNA: gi_6002956 [Arabidopsis thaliana]
  misc_feature (1)..(418): Homolog of NCBI NO: 1890152 NR Description: allene oxide synthase [Arabidopsis thaliana]
  misc_feature (1)..(418): Homolog of NCBI NO: 20160362 NR Description: allene oxide synthase [Solanum tuberosum]
  misc_feature (1)..(416): Homolog of NCBI NO: 16973300 NR Description: allene oxide synthase [Nicotiana attenuata]
  misc_feature (1)..(418): Homolog of NCBI NO: 29373135 NR Description: allene oxide synthase [Citrus sinensis]
  misc_feature (1)..(418): Homolog of NCBI NO: 7581989 NR Description: allene oxide synthase [Lycopersicon esculentum]
  misc_feature (1)..(416): Homolog of NCBI NO: 23956572 NR Description: allene oxide synthase [Solanum tuberosum]
  misc_feature (1)..(416): Homolog of NCBI NO: 7677376 NR Description: allene oxide synthase [Lycopersicon esculentum]
  misc_feature (1)..(418): Homolog of NCBI NO: 1352186 NR Description: Allene oxide synthase, chloroplast precursor dehydrase) (Cytochrome P450 74A) >gi|404866|gb|AAA03353.1| allene
  misc_feature (1)..(418): Homolog of NCBI NO: 21616113 NR Description: allene oxide synthase [Cucumis melo]
MPPGAFIAENPQVVALLDGKSFPVLFDVDKVEKKDLFTGTYMPSTELTGGYRILSYLDPSEPKHEKLKNLLFFLLKSSRNRIFPEFQATYSELFDSLEKELSLKGKADFGGSSDGTAFNFLARAFYGTNPADTKLKADAPGLITKWVLFNLHPLLSIGLPRVIEEPLIHTFSLPPALVKSDYQRLYEFFLESAGEILVEADKLGISREEATHNLLFATCFNTWGGMKILFPNMVKRIGRAGHQVHNRLAEEIRSVIKSNGGELTMGAIEKMELTKSVVYECLRFEPPVTAQYGRAKKDLVIESHDAAFKVKAGEMLYGYQPLATRDPKIFDRADEFVPERFVGEEGEKLLRHVLWSNGPETETPTVGNKQCAGKDFVVLVARLFVIEIFRRYDSFDIEVGTSPLGSSVNFSSLRKASF

SEQ ID NO: 83501 - protein, 377 aa, Arabidopsis thaliana
  peptide (1)..(377): Ceres Seq. ID no. 12670513
  misc_feature (206)..(300): Pfam Name: Cytochrome P450 Pfam Description: Cytochrome P450
  misc_feature (1)..(377): Homolog of NCBI NO: 15239032 NR Description: allene oxide synthase; protein id: At5g42650.1, by cDNA: gi_17065503, supported by cDNA: gi_17473593, supported cDNA: gi_6002956 [Arabidopsis thaliana]
  misc_feature (1)..(377): Homolog of NCBI NO: 1890152 NR Description: allene oxide synthase [Arabidopsis thaliana]
  misc_feature (1)..(377): Homolog of NCBI NO: 20160362 NR Description: allene oxide synthase [Solanum tuberosum]
  misc_feature (1)..(375): Homolog of NCBI NO: 16973300 NR Description: allene oxide synthase [Nicotiana attenuata]
  misc_feature (1)..(377): Homolog of NCBI NO: 29373135 NR Description: allene oxide synthase [Citrus sinensis]
  misc_feature (1)..(377): Homolog of NCBI NO: 7581989 NR Description: allene oxide synthase [Lycopersicon esculentum]
  misc_feature (1)..(375): Homolog of NCBI NO: 23956572 NR Description: allene oxide synthase [Solanum tuberosum]
  misc_feature (1)..(375): Homolog of NCBI NO: 7677376 NR Description: allene oxide synthase [Lycopersicon esculentum]
  misc_feature (1)..(377): Homolog of NCBI NO: 1352186 NR Description: Allene oxide synthase, chloroplast precursor dehydrase) (Cytochrome P450 74A) >gi|404866|gb|AAA03353.1| allene
  misc_feature (1)..(377): Homolog of NCBI NO: 21616113 NR Description: allene oxide synthase [Cucumis melo]
MPSTELTGGYRILSYLDPSEPKHEKLKNLLFFLLKSSRNRIFPEFQATYSELFDSLEKELSLKGKADFGGSSDGTAFNFLARAFYGTNPADTKLKADAPGLITKWVLFNLHPLLSIGLPRVIEEPLIHTFSLPPALVKSDYQRLYEFFLESAGEILVEADKLGISREEATHNLLFATCFNTWGGMKILFPNMVKRIGRAGHQVHNRLAEEIRSVIKSNGGELTMGAIEKMELTKSVVYECLRFEPPVTAQYGRAKKDLVIESHDAAFKVKAGEMLYGYQPLATRDPKIFDRADEFVPERFVGEEGEKLLRHVLWSNGPETETPTVGNKQCAGKDFVVLVARLFVIEIFRRYDSFDIEVGTSPLGSSVNFSSLRKASF

SEQ ID NO: 83502 - DNA, 2038 bp, Arabidopsis thaliana
  misc_feature (1)..(2038): Ceres Seq. ID no. 12670548
  misc_feature: MA Experiment ID: 20000069 Result: Up-regulated in Transcription
  misc_feature: MA Experiment 20000069 PARAMETER Experiment Name: At_100uM_ABA_Mutants_cDNA_P Parameter: Plant Line Value: CS23
  misc_feature: MA Experiment 20000069 PARAMETER Experiment Name: At_100uM_ABA_Mutants_cDNA_P Parameter: Timepoint (hr) Value: 6
  misc_feature: MA Experiment 20000069 PARAMETER Experiment Name: At_100uM_ABA_Mutants_cDNA_P Parameter: Tissue Value: Aerial
  misc_feature: MA Experiment 20000069 PARAMETER Experiment Name: At_100uM_ABA_Mutants_cDNA_P Parameter: Treatment Value: 100uM ABA vs. No Treatment
  misc_feature: MA Experiment ID: 20000070 Result: Up-regulated in Transcription
  misc_feature: MA Experiment 20000070 PARAMETER Experiment Name: At_100uM_ABA_Mutants_cDNA_P Parameter: Plant Line Value: CS24
  misc_feature: MA Experiment 20000070 PARAMETER Experiment Name: At_100uM_ABA_Mutants_cDNA_P Parameter: Timepoint (hr) Value: 6
  misc_feature: MA Experiment 20000070 PARAMETER Experiment Name: At_100uM_ABA_Mutants_cDNA_P Parameter: Tissue Value: Aerial
  misc_feature: MA Experiment 20000070 PARAMETER Experiment Name: At_100uM_ABA_Mutants_cDNA_P Parameter: Treatment Value: 100uM ABA vs. No Treatment
  misc_feature: MA Experiment ID: 20000314 Result: Up-regulated in Transcription
  misc_feature: MA Experiment 20000314 PARAMETER Experiment Name: At_14day_Shoots-Roots_Sub_P Parameter: Age (day) Value: 14
  misc_feature: MA Experiment 20000314 PARAMETER Experiment Name: At_14day_Shoots-Roots_Sub_P Parameter: Organism Value: A. thaliana
  misc_feature: MA Experiment 20000314 PARAMETER Experiment Name: At_14day_Shoots-Roots_Sub_P Parameter: Plant Line Value: WS
  misc_feature: MA Experiment 20000314 PARAMETER Experiment Name: At_14day_Shoots-Roots_Sub_P Parameter: Tissue Value: Roots vs. Whole Plant
  misc_feature: MA Experiment ID: 20000327 Result: Down-regulated in Transcription
  misc_feature: MA Experiment 20000327 PARAMETER Experiment Name: At_42deg_Heat_Sub_P Parameter: Age (day) Value: 14
  misc_feature: MA Experiment 20000327 PARAMETER Experiment Name: At_42deg_Heat_Sub_P Parameter: Organism Value: A. thaliana
  misc_feature: MA Experiment 20000327 PARAMETER Experiment Name: At_42deg_Heat_Sub_P Parameter: Plant Line Value: WS
  misc_feature: MA Experiment 20000327 PARAMETER Experiment Name: At_42deg_Heat_Sub_P Parameter: Temperature (deg C) Value: 42 vs. 22
  misc_feature: MA Experiment 20000327 PARAMETER Experiment Name: At_42deg_Heat_Sub_P Parameter: Timepoint (hr) Value: 1
  misc_feature: MA Experiment 20000327 PARAMETER Experiment Name: At_42deg_Heat_Sub_P Parameter: Tissue Value: Aerial
  misc_feature: MA Experiment ID: 20000328 Result: Down-regulated in Transcription
  misc_feature: MA Experiment 20000328 PARAMETER Experiment Name: At_42deg_Heat_Sub_P Parameter: Age (day) Value: 14
  misc_feature: MA Experiment 20000328 PARAMETER Experiment Name: At_42deg_Heat_Sub_P Parameter: Organism Value: A. thaliana
  misc_feature: MA Experiment 20000328 PARAMETER Experiment Name: At_42deg_Heat_Sub_P Parameter: Plant Line Value: WS
  misc_feature: MA Experiment 20000328 PARAMETER Experiment Name: At_42deg_Heat_Sub_P Parameter: Temperature (deg C) Value: 42 vs. 22
  misc_feature: MA Experiment 20000328 PARAMETER Experiment Name: At_42deg_Heat_Sub_P Parameter: Timepoint (hr) Value: 6
  misc_feature: MA Experiment 20000328 PARAMETER Experiment Name: At_42deg_Heat_Sub_P Parameter: Tissue Value: Aerial
  misc_feature: MA Experiment ID: 20000355 Result: Up-regulated in Transcription
  misc_feature: MA Experiment 20000355 PARAMETER Experiment Name: At_Siliques_Sub_P Parameter: Age (day) Value: 21
  misc_feature: MA Experiment 20000355 PARAMETER Experiment Name: At_Siliques_Sub_P Parameter: Organism Value: A. thaliana
  misc_feature: MA Experiment 20000355 PARAMETER Experiment Name: At_Siliques_Sub_P Parameter: Plant Line Value: WS
  misc_feature: MA Experiment 20000355 PARAMETER Experiment Name: At_Siliques_Sub_P Parameter: Tissue Value: Less Than 5mm Siliques vs. Whole Plant
atgaagaagctctgaatctaaaactcctctctccgaccccaaatccagaaattcaagcgaggaatagaatctcccactagagaaaagcaatcccagaaaccctaagttcttcacgtttcgttcttttgcttgttgatcaagcaggatatctccgagatttgtgagtctcttgctacttcttcctggagaacgattcagggtttgatgtgataagaatagtcatcgaggaagatagatttggggatttttttttatttgtagattcatgaaacaaattcgtcgatggcagaggattttgatcctcgctctgctatcgatatctgtattcgctccgcttattttcgtatcgaatcggcttaagagcatcactcccgttggtcgtagagaatttattgaagagttatccaaaattagattcacgacaaatgaccttagacttagcgctattgaacatgaggatggagaaggcttgaaggggccaaggctcattctcttcaaggatggggagtttaattcgtctgctgaaagtgatggtggtaatacttacaaaaacagggaagaacaagtgattgtttcacagaagatgacagttagctctgatgaaaagggtcaaattctaccaacagtcaaccaacttgctaataaaacggatttcaagccccctttatctaagggtgaaaagaacacaagggttcagcccgacagagcaacagatgtgaaaacgaaggagatcagagacaaaattattcaagctaaagcctacctgaatttcgctccacctggaagtaactctcaagttgtgaaggagttgagaggtcggctgaaagagctggaacggtctgttggtgatgcaacaaaggacaaggacttatcaaagggcgctctccgcagggtgaagcccatggaaaatgtgttatataaggctagtcgtgtctttaacaattgccctgccatcgctaccaaactccgtgccatgaattataacacagaagaacaagttcaggcgcagaaaaatcaagcagcgtatctaatgcagcttgcagcaaggaccaccccaaaagggcttcactgtctctcaatgcggctgacatcagaatacttttcactggatcctgaaaaaaggcagatgcctaaccagcaaaattattttgacgctaatttcaatcattatgttgtcttctctgacaatgttttggcttcttcagtcgttgttaactctacgatatcttcatcaaaggagccagaaagaatagtcttccatgtcgtgactgattcacttaattacccagcaatctcaatgtggtttctgctaaacattcaaagtaaagctactatccaaatcctaaacattgatgatatggatgtcctgcctagagattatgatcaattactgatgaagcaaaactctaatgacccaagattcatttctacactcaatcacgcacgcttctatctcccggatatattcccgggtttgaacaagatggtactcttggaccatgatgtagttgttcaaagagatttaagtagactgtggagcattgatatgaaaggaaaggtggttggagctgtagagacttgtcttgaaggtgaatcttcatttcgatcaatgagcacatttattaatttctcagacacatgggtcgctgggaaatttagtcctagagcttgcacatgggctttcgggatgaatctaattgatctcgaagaatggagaatacggaagttgacttctacatacataaaatacttcaacctgggaacaaagagaccattgtggaaagctgggagcttaccaataggttggttgactttctataggcaaacattagcattggacaagagatggcatgtgatggggttaggtcgcgaatcaggagtcaaagcggttgacatcgaacaagcggcagttatacactacgatggggtcatgaagccgtggttggacattggaaaagagaattacaaacgttactggaacatacacgtcccttaccatcacacctacttgcaacagtgcaatcttcaagcttgatac

SEQ ID NO: 83503 - protein, 589 aa, Arabidopsis thaliana
  peptide (1)..(589): Ceres Seq. ID no. 12670549
  misc_feature (83)..(587): Homolog of NCBI NO: 30684642 NR Description: glycosyltransferase family 8 [Arabidopsis >gi|19698933|gb|AAL91202.1| unknown protein [Arabidopsis >gi|27311915|gb|AAO00923.1| unknown protein [Arabidopsis
  misc_feature (9)..(381): Homolog of NCBI NO: 10177914 NR Description: emb|CAB71043.1~gene_id:MCA23.10~strong similarity
  misc_feature (9)..(381): Homolog of NCBI NO: 18422837 NR Description: putative protein; protein id: At5g47780.1, by cDNA: gi_15810326, supported by cDNA: gi_20259234 [Arabidopsis >gi|15810327|gb|AAL07051.1| unknown protein [Arabidopsis
  misc_feature (383)..(587): Homolog of NCBI NO: 10177914 NR Description: emb|CAB71043.1~gene_id:MCA23.10~strong similarity
  misc_feature (383)..(587): Homolog of NCBI NO: 18422837 NR Description: putative protein; protein id: At5g47780.1, by cDNA: gi_15810326, supported by cDNA: gi_20259234 [Arabidopsis >gi|15810327|gb|AAL07051.1| unknown protein [Arabidopsis
  misc_feature (108)..(381): Homolog of NCBI NO: 38423965 NR Description: putative glycosyltransferase [Oryza sativa
  misc_feature (383)..(587): Homolog of NCBI NO: 38423965 NR Description: putative glycosyltransferase [Oryza sativa
  misc_feature (149)..(381): Homolog of NCBI NO: 15233046 NR Description: putative protein; protein id: At3g61130.1, by cDNA: gi_14517361 [Arabidopsis thaliana]
  misc_feature (383)..(587): Homolog of NCBI NO: 15233046 NR Description: putative protein; protein id: At3g61130.1, by cDNA: gi_14517361 [Arabidopsis thaliana]
  misc_feature (150)..(381): Homolog of NCBI NO: 7271113 NR Description: 68 kDa protein [Cicer arietinum]
MKQIRRWQRILILALLSISVFAPLIFVSNRLKSITPVGRREFIEELSKIRFTTNDLRLSAIEHEDGEGLKGPRLILFKDGEFNSSAESDGGNTYKNREEQVIVSQKMTVSSDEKGQILPTVNQLANKTDFKPPLSKGEKNTRVQPDRATDVKTKEIRDKIIQAKAYLNFAPPGSNSQVVKELRGRLKELERSVGDATKDKDLSKGALRRVKPMENVLYKASRVFNNCPAIATKLRAMNYNTEEQVQAQKNQAAYLMQLAARTTPKGLHCLSMRLTSEYFSLDPEKRQMPNQQNYFDANFNHYVVFSDNVLASSVVVNSTISSSKEPERIVFHVVTDSLNYPAISMWFLLNIQSKATIQILNIDDMDVLPRDYDQLLMKQNSNDPRFISTLNHARFYLPDIFPGLNKMVLLDHDVVVQRDLSRLWSIDMKGKVVGAVETCLEGESSFRSMSTFINFSDTWVAGKFSPRACTWAFGMNLIDLEEWRIRKLTSTYIKYFNLGTKRPLWKAGSLPIGWLTFYRQTLALDKRWHVMGLGRESGVKAVDIEQAAVIHYDGVMKPWLDIGKENYKRYWNIHVPYHHTYLQQCNLQA

SEQ ID NO: 83504 - protein, 483 aa, Arabidopsis thaliana
  peptide (1)..(483): Ceres Seq. ID no. 12670550
  misc_feature (1)..(481): Homolog of NCBI NO: 30684642 NR Description: glycosyltransferase family 8 [Arabidopsis >gi|19698933|gb|AAL91202.1| unknown protein [Arabidopsis >gi|27311915|gb|AAO00923.1| unknown protein [Arabidopsis
  misc_feature (1)..(275): Homolog of NCBI NO: 10177914 NR Description: emb|CAB71043.1~gene_id:MCA23.10~strong similarity
  misc_feature (1)..(275): Homolog of NCBI NO: 18422837 NR Description: putative protein; protein id: At5g47780.1, by cDNA: gi_15810326, supported by cDNA: gi_20259234 [Arabidopsis >gi|15810327|gb|AAL07051.1| unknown protein [Arabidopsis
  misc_feature (277)..(481): Homolog of NCBI NO: 10177914 NR Description: emb|CAB71043.1~gene_id:MCA23.10~strong similarity
  misc_feature (277)..(481): Homolog of NCBI NO: 18422837 NR Description: putative protein; protein id: At5g47780.1, by cDNA: gi_15810326, supported by cDNA: gi_20259234 [Arabidopsis >gi|15810327|gb|AAL07051.1| unknown protein [Arabidopsis
  misc_feature (2)..(275): Homolog of NCBI NO: 38423965 NR Description: putative glycosyltransferase [Oryza sativa
  misc_feature (277)..(481): Homolog of NCBI NO: 38423965 NR Description: putative glycosyltransferase [Oryza sativa
  misc_feature (43)..(275): Homolog of NCBI NO: 15233046 NR Description: putative protein; protein id: At3g61130.1, by cDNA: gi_14517361 [Arabidopsis thaliana]
  misc_feature (277)..(481): Homolog of NCBI NO: 15233046 NR Description: putative protein; protein id: At3g61130.1, by cDNA: gi_14517361 [Arabidopsis thaliana]
  misc_feature (44)..(275): Homolog of NCBI NO: 7271113 NR Description: 68 kDa protein [Cicer arietinum]
MTVSSDEKGQILPTVNQLANKTDFKPPLSKGEKNTRVQPDRATDVKTKEIRDKIIQAKAYLNFAPPGSNSQVVKELRGRLKELERSVGDATKDKDLSKGALRRVKPMENVLYKASRVFNNCPAIATKLRAMNYNTEEQVQAQKNQAAYLMQLAARTTPKGLHCLSMRLTSEYFSLDPEKRQMPNQQNYFDANFNHYVVFSDNVLASSVVVNSTISSSKEPERIVFHVVTDSLNYPAISMWFLLNIQSKATIQILNIDDMDVLPRDYDQLLMKQNSNDPRFISTLNHARFYLPDIFPGLNKMVLLDHDVVVQRDLSRLWSIDMKGKVVGAVETCLEGESSFRSMSTFINFSDTWVAGKFSPRACTWAFGMNLIDLEEWRIRKLTSTYIKYFNLGTKRPLWKAGSLPIGWLTFYRQTLALDKRWHVMGLGRESGVKAVDIEQAAVIHYDGVMKPWLDIGKENYKRYWNIHVPYHHTYLQQCNLQA

SEQ ID NO: 83505 - protein, 377 aa, Arabidopsis thaliana
  peptide (1)..(377): Ceres Seq. ID no. 12670551
  misc_feature (1)..(375): Homolog of NCBI NO: 30684642 NR Description: glycosyltransferase family 8 [Arabidopsis >gi|19698933|gb|AAL91202.1| unknown protein [Arabidopsis >gi|27311915|gb|AAO00923.1| unknown protein [Arabidopsis
  misc_feature (1)..(169): Homolog of NCBI NO: 10177914 NR Description: emb|CAB71043.1~gene_id:MCA23.10~strong similarity
  misc_feature (1)..(169): Homolog of NCBI NO: 18422837 NR Description: putative protein; protein id: At5g47780.1, by cDNA: gi_15810326, supported by cDNA: gi_20259234 [Arabidopsis >gi|15810327|gb|AAL07051.1| unknown protein [Arabidopsis
  misc_feature (171)..(375): Homolog of NCBI NO: 10177914 NR Description: emb|CAB71043.1~gene_id:MCA23.10~strong similarity
  misc_feature (171)..(375): Homolog of NCBI NO: 18422837 NR Description: putative protein; protein id: At5g47780.1, by cDNA: gi_15810326, supported by cDNA: gi_20259234 [Arabidopsis >gi|15810327|gb|AAL07051.1| unknown protein [Arabidopsis
  misc_feature (1)..(169): Homolog of NCBI NO: 38423965 NR Description: putative glycosyltransferase [Oryza sativa
  misc_feature (171)..(375): Homolog of NCBI NO: 38423965 NR Description: putative glycosyltransferase [Oryza sativa
  misc_feature (1)..(169): Homolog of NCBI NO: 15233046 NR Description: putative protein; protein id: At3g61130.1, by cDNA: gi_14517361 [Arabidopsis thaliana]
  misc_feature (171)..(375): Homolog of NCBI NO: 15233046 NR Description: putative protein; protein id: At3g61130.1, by cDNA: gi_14517361 [Arabidopsis thaliana]
  misc_feature (1)..(169): Homolog of NCBI NO: 7271113 NR Description: 68 kDa protein [Cicer arietinum]
MENVLYKASRVFNNCPAIATKLRAMNYNTEEQVQAQKNQAAYLMQLAARTTPKGLHCLSMRLTSEYFSLDPEKRQMPNQQNYFDANFNHYVVFSDNVLASSVVVNSTISSSKEPERIVFHVVTDSLNYPAISMWFLLNIQSKATIQILNIDDMDVLPRDYDQLLMKQNSNDPRFISTLNHARFYLPDIFPGLNKMVLLDHDVVVQRDLSRLWSIDMKGKVVGAVETCLEGESSFRSMSTFINFSDTWVAGKFSPRACTWAFGMNLIDLEEWRIRKLTSTYIKYFNLGTKRPLWKAGSLPIGWLTFYRQTLALDKRWHVMGLGRESGVKAVDIEQAAVIHYDGVMKPWLDIGKENYKRYWNIHVPYHHTYLQQCNLQA

SEQ ID NO: 83506 - DNA, 1638 bp, Arabidopsis thaliana
  misc_feature (1)..(1638): Ceres Seq. ID no. 12670559
  misc_feature: MA Experiment ID: 20000173 Result: Up-regulated in Transcription
  misc_feature: MA Experiment 20000173 PARAMETER Experiment Name: At_42deg_Heat_P Parameter: Age (day) Value: 14
  misc_feature: MA Experiment 20000173 PARAMETER Experiment Name: At_42deg_Heat_P Parameter: Organism Value: A. thaliana
  misc_feature: MA Experiment 20000173 PARAMETER Experiment Name: At_42deg_Heat_P Parameter: Plant Line Value: WS
  misc_feature: MA Experiment 20000173 PARAMETER Experiment Name: At_42deg_Heat_P Parameter: Temperature (deg C) Value: 42 vs. 22
  misc_feature: MA Experiment 20000173 PARAMETER Experiment Name: At_42deg_Heat_P Parameter: Timepoint (hr) Value: 6
  misc_feature: MA Experiment 20000173 PARAMETER Experiment Name: At_42deg_Heat_P Parameter: Tissue Value: Aerial
  misc_feature: MA Experiment ID: 20000180 Result: Up-regulated in Transcription
  misc_feature: MA Experiment 20000180 PARAMETER Experiment Name: At_Germinating_Seeds_P Parameter: Age (hr) Value: 24 vs. 0
  misc_feature: MA Experiment 20000180 PARAMETER Experiment Name: At_Germinating_Seeds_P Parameter: Tissue Value: Germinating Seeds
  misc_feature: MA Experiment ID: 20000184 Result: Down-regulated in Transcription
  misc_feature: MA Experiment 20000184 PARAMETER Experiment Name: At_Shoots__P Parameter: Age (day) Value: 7
  misc_feature: MA Experiment 20000184 PARAMETER Experiment Name: At_Shoots__P Parameter: Tissue Value: Shoots vs. Whole Plant
  misc_feature: MA Experiment ID: 20001451 Result: Down-regulated in Transcription
  misc_feature: MA Experiment 20001451 PARAMETER Experiment Name: At_Far-red-induction_P Parameter: Age (day) Value: 7
  misc_feature: MA Experiment 20001451 PARAMETER Experiment Name: At_Far-red-induction_P Parameter: Light Value: Far-red vs. White
  misc_feature: MA Experiment 20001451 PARAMETER Experiment Name: At_Far-red-induction_P Parameter: Organism Value: A. thaliana
  misc_feature: MA Experiment 20001451 PARAMETER Experiment Name: At_Far-red-induction_P Parameter: Plant Line Value: Columbia
  misc_feature: MA Experiment 20001451 PARAMETER Experiment Name: At_Far-red-induction_P Parameter: Timepoint (hr) Value: 24
  misc_feature: MA Experiment 20001451 PARAMETER Experiment Name: At_Far-red-induction_P Parameter: Tissue Value: Whole Plant
  misc_feature: MA Experiment ID: 20001555 Result: Up-regulated in Transcription
  misc_feature: MA Experiment 20001555 PARAMETER Experiment Name: At_Drought_Soil_Dry_P Parameter: Age (day) Value: 24
  misc_feature: MA Experiment 20001555 PARAMETER Experiment Name: At_Drought_Soil_Dry_P Parameter: Organism Value: A. thaliana
  misc_feature: MA Experiment 20001555 PARAMETER Experiment Name: At_Drought_Soil_Dry_P Parameter: Plant Line Value: WS
  misc_feature: MA Experiment 20001555 PARAMETER Experiment Name: At_Drought_Soil_Dry_P Parameter: Post Timepoint (hr) Value: None
  misc_feature: MA Experiment 20001555 PARAMETER Experiment Name: At_Drought_Soil_Dry_P Parameter: Post-Treatment Value: None
  misc_feature: MA Experiment 20001555 PARAMETER Experiment Name: At_Drought_Soil_Dry_P Parameter: Timepoint (day) Value: 10
  misc_feature: MA Experiment 20001555 PARAMETER Experiment Name: At_Drought_Soil_Dry_P Parameter: Treatment Value: Drought vs. No Drought
  misc_feature: MA Experiment ID: 20001556 Result: Up-regulated in Transcription
  misc_feature: MA Experiment 20001556 PARAMETER Experiment Name: At_Drought_Soil_Dry_P Parameter: Age (day) Value: 26
  misc_feature: MA Experiment 20001556 PARAMETER Experiment Name: At_Drought_Soil_Dry_P Parameter: Organism Value: A. thaliana
  misc_feature: MA Experiment 20001556 PARAMETER Experiment Name: At_Drought_Soil_Dry_P Parameter: Plant Line Value: WS
  misc_feature: MA Experiment 20001556 PARAMETER Experiment Name: At_Drought_Soil_Dry_P Parameter: Post Timepoint (hr) Value: None
  misc_feature: MA Experiment 20001556 PARAMETER Experiment Name: At_Drought_Soil_Dry_P Parameter: Post-Treatment Value: None
  misc_feature: MA Experiment 20001556 PARAMETER Experiment Name: At_Drought_Soil_Dry_P Parameter: Timepoint (day) Value: 12
  misc_feature: MA Experiment 20001556 PARAMETER Experiment Name: At_Drought_Soil_Dry_P Parameter: Treatment Value: Drought vs. No Drought
ttctaggccaaaactatctccacgattctaacaaacaaaaattacagaaatgtcaatgtcatcgtcctcctttatctctctcactttcttcttccttcttctcgtttcttcatcgtcatcttccgatgacatctctgagctattcgacgactggtgccagaaacatggcaaaacgtacggttcagaagaagagaggcaacagaggattcaaatctttaaagataatcacgacttcgttacgcaacacaatctcatcactaacgctacttactctctctctctcaatgctttcgcggatctgactcaccacgagttcaaggcttctcgtcttggtctctctgtttccgctccgtcggtgataatggctagtaagggacagagtctcggtggtagcgtaaaggttccagattctgttgattggagaaagaagggagctgttactaatgtcaaagatcaaggaagctgcggggcatgttggtcgttctcggcgactggagctatggagggaattaaccagatagtaacaggagatctcatcagcctctctgagcaggaactgattgattgtgacaagtcctacaatgctggctgtaatggtggtctcatggactatgcttttgaatttgtcattaaaaaccatggaatagacacagagaaagactatccttatcaagaacgtgatggcacctgtaagaaggataagttgaaacaaaaggttgtgacaattgatagctatgctggtgtaaaatcaaatgatgagaaagcgttaatggaggctgtagcggctcagccagttagtgttggcatctgtggaagcgagagagcgtttcagctatattctagtggaatattctctggcccgtgttcgacatcattggatcatgctgtgctcatagtaggatatggttcacagaatggtgttgattattggattgtgaaaaactcatggggaaaaagttggggaatggatgggtttatgcacatgcagcgtaacactgaaaattcagacggcgtttgcggaatcaacatgcttgcttcatatcccatcaagacacatccaaacccgcctccaccgtcccctcctggccctacaaaatgcaaccttttcacgtattgttcatctggagagacttgttgctgtgcaagagaattgtttggtttatgcttctcatggaaatgctgcgagatagaatccgctgtgtgttgcaaggatggtcgtcattgttgtccacatgattaccctgtttgtgatacaaccagaagtctctgccttaagaaaactggtaatttcactgcgatcaagcccttctggaagaagaattcttcaaaacaacttggccgatttgaggaatgggttatgtgagagaagttttacgcacatgttacagaaaattcaaactcatccatacaaaaacctcgtagattcgattatctgcgaggggattatttgtagctgttattgagatagatatatacgatatcatcacggatgtatttttagtctctcatttggatgtatacaacttctgagtcaataaaggacacttgcaggacaagcacagtatttgtatctgcaagacacataaagtaataagagtatcatctatgtatattatagagagactaagcttcactgtt

SEQ ID NO: 83507 - protein, 437 aa, Arabidopsis thaliana
  peptide (1)..(437): Ceres Seq. ID no. 12670560
  misc_feature (118)..(333): Pfam Name: Papain family cysteine protease Pfam Description: Papain family cysteine protease
  misc_feature (1)..(437): Homolog of NCBI NO: 18391078 NR Description: cysteine protease XBCP3; protein id: At1g09850.1,
  misc_feature (1)..(437): Homolog of NCBI NO: 14600257 NR Description: papain-like cysteine peptidase XBCP3 [Arabidopsis
  misc_feature (3)..(409): Homolog of NCBI NO: 25289988 NR Description: cysteine proteinase (EC 3.4.22.-) [similarity] - thaliana >gi|2160175|gb|AAB60738.1| Strong similarity to Dianthus
  misc_feature (2)..(432): Homolog of NCBI NO: 7435801 NR Description: cysteine proteinase (EC 3.4.22.-) precursor -
  misc_feature (1)..(409): Homolog of NCBI NO: 30141019 NR Description: cysteine protease-1 [Helianthus annuus]
  misc_feature (1)..(424): Homolog of NCBI NO: 18422289 NR Description: cysteine proteinase RD21A; protein id:
  misc_feature (24)..(432): Homolog of NCBI NO: 7435791 NR Description: cysteine proteinase (EC 3.4.22.-) 3 precursor - bean >gi|2511693|emb|CAB17076.1| cysteine proteinase precursor
  misc_feature (2)..(432): Homolog of NCBI NO: 5777889 NR Description: cysteine protease [Solanum tuberosum]
  misc_feature (1)..(423): Homolog of NCBI NO: 14517542 NR Description: F2G19.31/F2G19.31 [Arabidopsis thaliana]
  misc_feature (24)..(423): Homolog of NCBI NO: 18401614 NR Description: cysteine proteinase RD21A; protein id: supported by cDNA: gi_14517541, supported by cDNA: gi_18175925, by cDNA: gi_19548038 [Arabidopsis thaliana]
MSMSSSSFISLTFFFLLLVSSSSSSDDISELFDDWCQKHGKTYGSEEERQQRIQIFKDNHDFVTQHNLITNATYSLSLNAFADLTHHEFKASRLGLSVSAPSVIMASKGQSLGGSVKVPDSVDWRKKGAVTNVKDQGSCGACWSFSATGAMEGINQIVTGDLISLSEQELIDCDKSYNAGCNGGLMDYAFEFVIKNHGIDTEKDYPYQERDGTCKKDKLKQKVVTIDSYAGVKSNDEKALMEAVAAQPVSVGICGSERAFQLYSSGIFSGPCSTSLDHAVLIVGYGSQNGVDYWIVKNSWGKSWGMDGFMHMQRNTENSDGVCGINMLASYPIKTHPNPPPPSPPGPTKCNLFTYCSSGETCCCARELFGLCFSWKCCEIESAVCCKDGRHCCPHDYPVCDTTRSLCLKKTGNFTAIKPFWKKNSSKQLGRFEEWVM

SEQ ID NO: 83508 - protein, 435 aa, Arabidopsis thaliana
  peptide (1)..(435): Ceres Seq. ID no. 12670561
  misc_feature (116)..(331): Pfam Name: Papain family cysteine protease Pfam Description: Papain family cysteine protease
  misc_feature (1)..(435): Homolog of NCBI NO: 18391078 NR Description: cysteine protease XBCP3; protein id: At1g09850.1,
  misc_feature (1)..(435): Homolog of NCBI NO: 14600257 NR Description: papain-like cysteine peptidase XBCP3 [Arabidopsis
  misc_feature (1)..(407): Homolog of NCBI NO: 25289988 NR Description: cysteine proteinase (EC 3.4.22.-) [similarity] - thaliana >gi|2160175|gb|AAB60738.1| Strong similarity to Dianthus
  misc_feature (1)..(430): Homolog of NCBI NO: 7435801 NR Description: cysteine proteinase (EC 3.4.22.-) precursor -
  misc_feature (1)..(407): Homolog of NCBI NO: 30141019 NR Description: cysteine protease-1 [Helianthus annuus]
  misc_feature (1)..(422): Homolog of NCBI NO: 18422289 NR Description: cysteine proteinase RD21A; protein id:
  misc_feature (22)..(430): Homolog of NCBI NO: 7435791 NR Description: cysteine proteinase (EC 3.4.22.-) 3 precursor - bean >gi|2511693|emb|CAB17076.1| cysteine proteinase precursor
  misc_feature (1)..(430): Homolog of NCBI NO: 5777889 NR Description: cysteine protease [Solanum tuberosum]
  misc_feature (1)..(421): Homolog of NCBI NO: 14517542 NR Description: F2G19.31/F2G19.31 [Arabidopsis thaliana]
  misc_feature (22)..(421): Homolog of NCBI NO: 18401614 NR Description: cysteine proteinase RD21A; protein id: supported by cDNA: gi_14517541, supported by cDNA: gi_18175925, by cDNA: gi_19548038 [Arabidopsis thaliana]
MSSSSFISLTFFFLLLVSSSSSSDDISELFDDWCQKHGKTYGSEEERQQRIQIFKDNHDFVTQHNLITNATYSLSLNAFADLTHHEFKASRLGLSVSAPSVIMASKGQSLGGSVKVPDSVDWRKKGAVTNVKDQGSCGACWSFSATGAMEGINQIVTGDLISLSEQELIDCDKSYNAGCNGGLMDYAFEFVIKNHGIDTEKDYPYQERDGTCKKDKLKQKVVTIDSYAGVKSNDEKALMEAVAAQPVSVGICGSERAFQLYSSGIFSGPCSTSLDHAVLIVGYGSQNGVDYWIVKNSWGKSWGMDGFMHMQRNTENSDGVCGINMLASYPIKTHPNPPPPSPPGPTKCNLFTYCSSGETCCCARELFGLCFSWKCCEIESAVCCKDGRHCCPHDYPVCDTTRSLCLKKTGNFTAIKPFWKKNSSKQLGRFEEWVM

SEQ ID NO: 83509 - protein, 333 aa, Arabidopsis thaliana
  peptide (1)..(333): Ceres Seq. ID no. 12670562
  misc_feature (14)..(229): Pfam Name: Papain family cysteine protease Pfam Description: Papain family cysteine protease
  misc_feature (1)..(333): Homolog of NCBI NO: 18391078 NR Description: cysteine protease XBCP3; protein id: At1g09850.1,
  misc_feature (1)..(333): Homolog of NCBI NO: 14600257 NR Description: papain-like cysteine peptidase XBCP3 [Arabidopsis
  misc_feature (1)..(305): Homolog of NCBI NO: 25289988 NR Description: cysteine proteinase (EC 3.4.22.-) [similarity] - thaliana >gi|2160175|gb|AAB60738.1| Strong similarity to Dianthus
  misc_feature (1)..(328): Homolog of NCBI NO: 7435801 NR Description: cysteine proteinase (EC 3.4.22.-) precursor -
  misc_feature (1)..(305): Homolog of NCBI NO: 30141019 NR Description: cysteine protease-1 [Helianthus annuus]
  misc_feature (1)..(320): Homolog of NCBI NO: 18422289 NR Description: cysteine proteinase RD21A; protein id:
  misc_feature (1)..(328): Homolog of NCBI NO: 7435791 NR Description: cysteine proteinase (EC 3.4.22.-) 3 precursor - bean >gi|2511693|emb|CAB17076.1| cysteine proteinase precursor
  misc_feature (1)..(328): Homolog of NCBI NO: 5777889 NR Description: cysteine protease [Solanum tuberosum]
  misc_feature (1)..(319): Homolog of NCBI NO: 14517542 NR Description: F2G19.31/F2G19.31 [Arabidopsis thaliana]
  misc_feature (1)..(319): Homolog of NCBI NO: 18401614 NR Description: cysteine proteinase RD21A; protein id: supported by cDNA: gi_14517541, supported by cDNA: gi_18175925, by cDNA: gi_19548038 [Arabidopsis thaliana]
MASKGQSLGGSVKVPDSVDWRKKGAVTNVKDQGSCGACWSFSATGAMEGINQIVTGDLISLSEQELIDCDKSYNAGCNGGLMDYAFEFVIKNHGIDTEKDYPYQERDGTCKKDKLKQKVVTIDSYAGVKSNDEKALMEAVAAQPVSVGICGSERAFQLYSSGIFSGPCSTSLDHAVLIVGYGSQNGVDYWIVKNSWGKSWGMDGFMHMQRNTENSDGVCGINMLASYPIKTHPNPPPPSPPGPTKCNLFTYCSSGETCCCARELFGLCFSWKCCEIESAVCCKDGRHCCPHDYPVCDTTRSLCLKKTGNFTAIKPFWKKNSSKQLGRFEEWVM

SEQ ID NO: 83510 - DNA, 1797 bp, Arabidopsis thaliana
  misc_feature (1)..(1797): Ceres Seq. ID no. 12670563
  misc_feature: MA Experiment ID: 20000171 Result: Down-regulated in Transcription
  misc_feature: MA Experiment 20000171 PARAMETER Experiment Name: At_42deg_Heat_P Parameter: Age (day) Value: 14
  misc_feature: MA Experiment 20000171 PARAMETER Experiment Name: At_42deg_Heat_P Parameter: Organism Value: A. thaliana
  misc_feature: MA Experiment 20000171 PARAMETER Experiment Name: At_42deg_Heat_P Parameter: Plant Line Value: WS
  misc_feature: MA Experiment 20000171 PARAMETER Experiment Name: At_42deg_Heat_P Parameter: Temperature (deg C) Value: 42 vs. 22
  misc_feature: MA Experiment 20000171 PARAMETER Experiment Name: At_42deg_Heat_P Parameter: Timepoint (hr) Value: 1
  misc_feature: MA Experiment 20000171 PARAMETER Experiment Name: At_42deg_Heat_P Parameter: Tissue Value: Aerial
  misc_feature: MA Experiment ID: 20000185 Result: Down-regulated in Transcription
  misc_feature: MA Experiment 20000185 PARAMETER Experiment Name: At_Roots__P Parameter: Age (day) Value: 7 vs. 21
  misc_feature: MA Experiment 20000185 PARAMETER Experiment Name: At_Roots__P Parameter: Organism Value: A. thaliana
  misc_feature: MA Experiment 20000185 PARAMETER Experiment Name: At_Roots__P Parameter: Tissue Value: Roots vs. Whole Plant
  misc_feature: MA Experiment ID: 20000437 Result: Down-regulated in Transcription
  misc_feature: MA Experiment 20000437 PARAMETER Experiment Name: At_Drought_P Parameter: Age (day) Value: 8
  misc_feature: MA Experiment 20000437 PARAMETER Experiment Name: At_Drought_P Parameter: Organism Value: A. thaliana
  misc_feature: MA Experiment 20000437 PARAMETER Experiment Name: At_Drought_P Parameter: Plant Line Value: WS
  misc_feature: MA Experiment 20000437 PARAMETER Experiment Name: At_Drought_P Parameter: Timepoint (hr) Value: 24
  misc_feature: MA Experiment 20000437 PARAMETER Experiment Name: At_Drought_P Parameter: Tissue Value: Whole Plant
  misc_feature: MA Experiment 20000437 PARAMETER Experiment Name: At_Drought_P Parameter: Treatment Value: Drought vs. No Drought
  misc_feature: MA Experiment ID: 20000439 Result: Down-regulated in Transcription
  misc_feature: MA Experiment 20000439 PARAMETER Experiment Name: At_Roots__P Parameter: Age (day) Value: 14 vs. 21
  misc_feature: MA Experiment 20000439 PARAMETER Experiment Name: At_Roots__P Parameter: Organism Value: A. thaliana
  misc_feature: MA Experiment 20000439 PARAMETER Experiment Name: At_Roots__P Parameter: Tissue Value: Roots vs. Whole Plant
  misc_feature: MA Experiment ID: 20001451 Result: Down-regulated in Transcription
  misc_feature: MA Experiment 20001451 PARAMETER Experiment Name: At_Far-red-induction_P Parameter: Age (day) Value: 7
  misc_feature: MA Experiment 20001451 PARAMETER Experiment Name: At_Far-red-induction_P Parameter: Light Value: Far-red vs. White
  misc_feature: MA Experiment 20001451 PARAMETER Experiment Name: At_Far-red-induction_P Parameter: Organism Value: A. thaliana
  misc_feature: MA Experiment 20001451 PARAMETER Experiment Name: At_Far-red-induction_P Parameter: Plant Line Value: Columbia
  misc_feature: MA Experiment 20001451 PARAMETER Experiment Name: At_Far-red-induction_P Parameter: Timepoint (hr) Value: 24
  misc_feature: MA Experiment 20001451 PARAMETER Experiment Name: At_Far-red-induction_P Parameter: Tissue Value: Whole Plant
  misc_feature: MA Experiment ID: 20001557 Result: Up-regulated in Transcription
  misc_feature: MA Experiment 20001557 PARAMETER Experiment Name: At_Drought_Soil_Dry_P Parameter: Age (day) Value: 27
  misc_feature: MA Experiment 20001557 PARAMETER Experiment Name: At_Drought_Soil_Dry_P Parameter: Organism Value: A. thaliana
  misc_feature: MA Experiment 20001557 PARAMETER Experiment Name: At_Drought_Soil_Dry_P Parameter: Plant Line Value: WS
  misc_feature: MA Experiment 20001557 PARAMETER Experiment Name: At_Drought_Soil_Dry_P Parameter: Post Timepoint (hr) Value: 3
  misc_feature: MA Experiment 20001557 PARAMETER Experiment Name: At_Drought_Soil_Dry_P Parameter: Post-Treatment Value: Re-Water vs. No Drought
  misc_feature: MA Experiment 20001557 PARAMETER Experiment Name: At_Drought_Soil_Dry_P Parameter: Timepoint (day) Value: 13
  misc_feature: MA Experiment 20001557 PARAMETER Experiment Name: At_Drought_Soil_Dry_P Parameter: Treatment Value: Drought vs. No Drought
  misc_feature: MA Experiment ID: 20001558 Result: Up-regulated in Transcription
  misc_feature: MA Experiment 20001558 PARAMETER Experiment Name: At_Drought_Soil_Dry_P Parameter: Age (day) Value: 27
  misc_feature: MA Experiment 20001558 PARAMETER Experiment Name: At_Drought_Soil_Dry_P Parameter: Organism Value: A. thaliana
  misc_feature: MA Experiment 20001558 PARAMETER Experiment Name: At_Drought_Soil_Dry_P Parameter: Plant Line Value: WS
  misc_feature: MA Experiment 20001558 PARAMETER Experiment Name: At_Drought_Soil_Dry_P Parameter: Post Timepoint (hr) Value: 6
  misc_feature: MA Experiment 20001558 PARAMETER Experiment Name: At_Drought_Soil_Dry_P Parameter: Post-Treatment Value: Re-Water vs. No Drought
  misc_feature: MA Experiment 20001558 PARAMETER Experiment Name: At_Drought_Soil_Dry_P Parameter: Timepoint (day) Value: 13
  misc_feature: MA Experiment 20001558 PARAMETER Experiment Name: At_Drought_Soil_Dry_P Parameter: Treatment Value: Drought vs. No Drought
atggatttgatggtgtccacaagcagtgctcaagaagggttttgcttgattcaacaatttcatcgcgaatataaacgaggtaataagcttgacgtctcatgtcgtacttctggtagtattagttctaaaatccctcttgggtcacgaaaaaggaatcgacttgttctggtttctgcggcttctaaggttgagagttcaggtcttaatggtagagctcaaaagttcgaaactttgtcctctgggtatagcaatagtaacggaaatggtcattatagctctgtgaattcgtcttttgcgttggaagatgtcgagagtaataaccatttgcgtcagatggttagaaccggtgaattggaggaagggtttaagtttctagagaacatggtttatcacggtaatgttcctgatatcattccgtgcacgacattgattcgcggattctgtaggttgggtaagacgaggaaagctgcaaagatcttggagattcttgaaggctctggtgctgttcctgatgttataacttacaatgttatgattagtgggtattgcaaagctggggagatcaataacgcgttatctgttcttgatagaatgagtgtttcgccggatgttgtcacttataataccatcttgcgttctctttgcgatagtgggaaacttaagcaagccatggaggttcttgataggatgcttcagagagactgttatccagatgtgattacttacactatattgattgaagctacttgcagagatagtggtgtgggacatgcgatgaagcttctcgatgaaatgagggatagaggatgtactcctgatgttgtgacttacaacgttcttgtgaatggtatttgtaaagaggggagattggatgaggccattaagtttttgaatgacatgccgtcttctggatgtcaaccaaatgttattacacataacataattctgcggagtatgtgtagtactgggagatggatggatgcagagaagcttcttgctgatatgcttcgtaaaggcttttcgccaagcgttgtcactttcaatatcttgattaatttcttgtgtagaaaaggtttgcttggccgagcgattgacatattggagaagatgcctcaacatggatgtcagccgaattctttgagttacaacccgctgcttcacgggttttgcaaggagaaaaagatggatagggctatcgagtatttggagagaatggtttctcgtggttgttatccagacattgtcacctacaacactatgctaacagctttgtgcaaagatgggaaagttgaagatgcggttgagatacttaatcaacttagtagcaagggatgttctcctgttctaatcacttataatactgtcattgatgggcttgcaaaagctggtaaaactggcaaagcgataaaactgctagatgagatgcgtgcgaaagatttaaagcctgacactatcacctattcctctcttgttggaggtttaagcagggaaggaaaagtagacgaagccattaagtttttccatgagtttgagcggatgggcattaggccaaatgcagtcacctttaattctatcatgcttggactctgtaagagtcggcaaacagatcgtgccatcgatttcttggtttttatgatcaacagagggtgtaaaccgaatgaaacatcatacacgattctgatagaaggcttagcttatgaaggtatggcaaaggaagctttggagctgcttaatgagctttgtaacaagggactcatgaagaaaagctctgctgagcaagttgcagggaagatgtag

SEQ ID NO: 83511 - protein, 598 aa, Arabidopsis thaliana
  peptide (1)..(598): Ceres Seq. ID no. 12670564
  misc_feature (345)..(378): Pfam Name: PPR repeat Pfam Description: PPR repeat
  misc_feature (95)..(580): Homolog of NCBI NO: 18397002 NR Description: expressed protein; protein id: At3g04760.1, by cDNA: gi_15810358 [Arabidopsis thaliana] hypothetical protein [Arabidopsis thaliana]
  misc_feature (105)..(584): Homolog of NCBI NO: 34910106 NR Description: B1100D10.28 [Oryza sativa (japonica
  misc_feature (109)..(588): Homolog of NCBI NO: 34896658 NR Description: putative membrane-associated salt-inducible
  misc_feature (120)..(593): Homolog of NCBI NO: 34910106 NR Description: B1100D10.28 [Oryza sativa (japonica
  misc_feature (118)..(594): Homolog of NCBI NO: 30699392 NR Description: pentatricopeptide (PPR) repeat-containing protein
  misc_feature (118)..(594): Homolog of NCBI NO: 7487907 NR Description: hypothetical protein YUP8H12R.30 - Arabidopsis >gi|3152594|gb|AAC17075.1| Contains repeats similar to RECA gb|L26100 from Acinetobacter calcoaceticus. [Arabidopsis
  misc_feature (141)..(597): Homolog of NCBI NO: 34896658 NR Description: putative membrane-associated salt-inducible
  misc_feature (113)..(596): Homolog of NCBI NO: 15231863 NR Description: putative protein; protein id: At3g53700.1, by cDNA: gi_15982930 [Arabidopsis thaliana]
  misc_feature (109)..(590): Homolog of NCBI NO: 34896658 NR Description: putative membrane-associated salt-inducible
  misc_feature (77)..(584): Homolog of NCBI NO: 22329519 NR Description: hypothetical protein; protein id: At1g12700.1
MDLMVSTSSAQEGFCLIQQFHREYKRGNKLDVSCRTSGSISSKIPLGSRKRNRLVLVSAASKVESSGLNGRAQKFETLSSGYSNSNGNGHYSSVNSSFALEDVESNNHLRQMVRTGELEEGFKFLENMVYHGNVPDIIPCTTLIRGFCRLGKTRKAAKILEILEGSGAVPDVITYNVMISGYCKAGEINNALSVLDRMSVSPDVVTYNTILRSLCDSGKLKQAMEVLDRMLQRDCYPDVITYTILIEATCRDSGVGHAMKLLDEMRDRGCTPDVVTYNVLVNGICKEGRLDEAIKFLNDMPSSGCQPNVITHNIILRSMCSTGRWMDAEKLLADMLRKGFSPSVVTFNILINFLCRKGLLGRAIDILEKMPQHGCQPNSLSYNPLLHGFCKEKKMDRAIEYLERMVSRGCYPDIVTYNTMLTALCKDGKVEDAVEILNQLSSKGCSPVLITYNTVIDGLAKAGKTGKAIKLLDEMRAKDLKPDTITYSSLVGGLSREGKVDEAIKFFHEFERMGIRPNAVTFNSIMLGLCKSRQTDRAIDFLVFMINRGCKPNETSYTILIEGLAYEGMAKEALELLNELCNKGLMKKSSAEQVAGKM

SEQ ID NO: 83512 - protein, 595 aa, Arabidopsis thaliana
  peptide (1)..(595): Ceres Seq. ID no. 12670565
  misc_feature (342)..(375): Pfam Name: PPR repeat Pfam Description: PPR repeat
  misc_feature (92)..(577): Homolog of NCBI NO: 18397002 NR Description: expressed protein; protein id: At3g04760.1, by cDNA: gi_15810358 [Arabidopsis thaliana] hypothetical protein [Arabidopsis thaliana]
  misc_feature (102)..(581): Homolog of NCBI NO: 34910106 NR Description: B1100D10.28 [Oryza sativa (japonica
  misc_feature (106)..(585): Homolog of NCBI NO: 34896658 NR Description: putative membrane-associated salt-inducible
  misc_feature (117)..(590): Homolog of NCBI NO: 34910106 NR Description: B1100D10.28 [Oryza sativa (japonica
  misc_feature (115)..(591): Homolog of NCBI NO: 30699392 NR Description: pentatricopeptide (PPR) repeat-containing protein
  misc_feature (115)..(591): Homolog of NCBI NO: 7487907 NR Description: hypothetical protein YUP8H12R.30 - Arabidopsis >gi|3152594|gb|AAC17075.1| Contains repeats similar to RECA gb|L26100 from Acinetobacter calcoaceticus. [Arabidopsis
  misc_feature (138)..(594): Homolog of NCBI NO: 34896658 NR Description: putative membrane-associated salt-inducible
  misc_feature (110)..(593): Homolog of NCBI NO: 15231863 NR Description: putative protein; protein id: At3g53700.1, by cDNA: gi_15982930 [Arabidopsis thaliana]
  misc_feature (106)..(587): Homolog of NCBI NO: 34896658 NR Description: putative membrane-associated salt-inducible
  misc_feature (74)..(581): Homolog of NCBI NO: 22329519 NR Description: hypothetical protein; protein id: At1g12700.1
MVSTSSAQEGFCLIQQFHREYKRGNKLDVSCRTSGSISSKIPLGSRKRNRLVLVSAASKVESSGLNGRAQKFETLSSGYSNSNGNGHYSSVNSSFALEDVESNNHLRQMVRTGELEEGFKFLENMVYHGNVPDIIPCTTLIRGFCRLGKTRKAAKILEILEGSGAVPDVITYNVMISGYCKAGEINNALSVLDRMSVSPDVVTYNTILRSLCDSGKLKQAMEVLDRMLQRDCYPDVITYTILIEATCRDSGVGHAMKLLDEMRDRGCTPDVVTYNVLVNGICKEGRLDEAIKFLNDMPSSGCQPNVITHNIILRSMCSTGRWMDAEKLLADMLRKGFSPSVVTFNILINFLCRKGLLGRAIDILEKMPQHGCQPNSLSYNPLLHGFCKEKKMDRAIEYLERMVSRGCYPDIVTYNTMLTALCKDGKVEDAVEILNQLSSKGCSPVLITYNTVIDGLAKAGKTGKAIKLLDEMRAKDLKPDTITYSSLVGGLSREGKVDEAIKFFHEFERMGIRPNAVTFNSIMLGLCKSRQTDRAIDFLVFMINRGCKPNETSYTILIEGLAYEGMAKEALELLNELCNKGLMKKSSAEQVAGKM

SEQ ID NO: 83513 - protein, 487 aa, Arabidopsis thaliana
  peptide (1)..(487): Ceres Seq. ID no. 12670566
  misc_feature (234)..(267): Pfam Name: PPR repeat Pfam Description: PPR repeat
  misc_feature (1)..(469): Homolog of NCBI NO: 18397002 NR Description: expressed protein; protein id: At3g04760.1, by cDNA: gi_15810358 [Arabidopsis thaliana] hypothetical protein [Arabidopsis thaliana]
  misc_feature (1)..(473): Homolog of NCBI NO: 34910106 NR Description: B1100D10.28 [Oryza sativa (japonica
  misc_feature (1)..(477): Homolog of NCBI NO: 34896658 NR Description: putative membrane-associated salt-inducible
  misc_feature (9)..(482): Homolog of NCBI NO: 34910106 NR Description: B1100D10.28 [Oryza sativa (japonica
  misc_feature (7)..(483): Homolog of NCBI NO: 30699392 NR Description: pentatricopeptide (PPR) repeat-containing protein
  misc_feature (7)..(483): Homolog of NCBI NO: 7487907 NR Description: hypothetical protein YUP8H12R.30 - Arabidopsis >gi|3152594|gb|AAC17075.1| Contains repeats similar to RECA gb|L26100 from Acinetobacter calcoaceticus. [Arabidopsis
  misc_feature (30)..(486): Homolog of NCBI NO: 34896658 NR Description: putative membrane-associated salt-inducible
  misc_feature (2)..(485): Homolog of NCBI NO: 15231863 NR Description: putative protein; protein id: At3g53700.1, by cDNA: gi_15982930 [Arabidopsis thaliana]
  misc_feature (1)..(479): Homolog of NCBI NO: 34896658 NR Description: putative membrane-associated salt-inducible
  misc_feature (1)..(473): Homolog of NCBI NO: 22329519 NR Description: hypothetical protein; protein id: At1g12700.1
MVRTGELEEGFKFLENMVYHGNVPDIIPCTTLIRGFCRLGKTRKAAKILEILEGSGAVPDVITYNVMISGYCKAGEINNALSVLDRMSVSPDVVTYNTILRSLCDSGKLKQAMEVLDRMLQRDCYPDVITYTILIEATCRDSGVGHAMKLLDEMRDRGCTPDVVTYNVLVNGICKEGRLDEAIKFLNDMPSSGCQPNVITHNIILRSMCSTGRWMDAEKLLADMLRKGFSPSVVTFNILINFLCRKGLLGRAIDILEKMPQHGCQPNSLSYNPLLHGFCKEKKMDRAIEYLERMVSRGCYPDIVTYNTMLTALCKDGKVEDAVEILNQLSSKGCSPVLITYNTVIDGLAKAGKTGKAIKLLDEMRAKDLKPDTITYSSLVGGLSREGKVDEAIKFFHEFERMGIRPNAVTFNSIMLGLCKSRQTDRAIDFLVFMINRGCKPNETSYTILIEGLAYEGMAKEALELLNELCNKGLMKKSSAEQVAGKM

SEQ ID NO: 83514 - DNA, 750 bp, Arabidopsis thaliana
  misc_feature (1)..(750): Ceres Seq. ID no. 12670597
  misc_feature: MA Experiment ID: 20000173 Result: Down-regulated in Transcription
  misc_feature: MA Experiment 20000173 PARAMETER Experiment Name: At_42deg_Heat_P Parameter: Age (day) Value: 14
  misc_feature: MA Experiment 20000173 PARAMETER Experiment Name: At_42deg_Heat_P Parameter: Organism Value: A. thaliana
  misc_feature: MA Experiment 20000173 PARAMETER Experiment Name: At_42deg_Heat_P Parameter: Plant Line Value: WS
  misc_feature: MA Experiment 20000173 PARAMETER Experiment Name: At_42deg_Heat_P Parameter: Temperature (deg C) Value: 42 vs. 22
  misc_feature: MA Experiment 20000173 PARAMETER Experiment Name: At_42deg_Heat_P Parameter: Timepoint (hr) Value: 6
  misc_feature: MA Experiment 20000173 PARAMETER Experiment Name: At_42deg_Heat_P Parameter: Tissue Value: Aerial
  misc_feature: MA Experiment ID: 20000184 Result: Down-regulated in Transcription
  misc_feature: MA Experiment 20000184 PARAMETER Experiment Name: At_Shoots__P Parameter: Age (day) Value: 7
  misc_feature: MA Experiment 20000184 PARAMETER Experiment Name: At_Shoots__P Parameter: Tissue Value: Shoots vs. Whole Plant
  misc_feature: MA Experiment ID: 20000437 Result: Up-regulated in Transcription
  misc_feature: MA Experiment 20000437 PARAMETER Experiment Name: At_Drought_P Parameter: Age (day) Value: 8
  misc_feature: MA Experiment 20000437 PARAMETER Experiment Name: At_Drought_P Parameter: Organism Value: A. thaliana
  misc_feature: MA Experiment 20000437 PARAMETER Experiment Name: At_Drought_P Parameter: Plant Line Value: WS
  misc_feature: MA Experiment 20000437 PARAMETER Experiment Name: At_Drought_P Parameter: Timepoint (hr) Value: 24
  misc_feature: MA Experiment 20000437 PARAMETER Experiment Name: At_Drought_P Parameter: Tissue Value: Whole Plant
  misc_feature: MA Experiment 20000437 PARAMETER Experiment Name: At_Drought_P Parameter: Treatment Value: Drought vs. No Drought
  misc_feature: MA Experiment ID: 20001911 Result: Up-regulated in Transcription
  misc_feature: MA Experiment 20001911 PARAMETER Experiment Name: At_Drought_Reproduction_P Parameter: Age (day) Value: 40
  misc_feature: MA Experiment 20001911 PARAMETER Experiment Name: At_Drought_Reproduction_P Parameter: Organism Value: A. thaliana
  misc_feature: MA Experiment 20001911 PARAMETER Experiment Name: At_Drought_Reproduction_P Parameter: Plant Line Value: WS
  misc_feature: MA Experiment 20001911 PARAMETER Experiment Name: At_Drought_Reproduction_P Parameter: Timepoint (day) Value: 10
  misc_feature: MA Experiment 20001911 PARAMETER Experiment Name: At_Drought_Reproduction_P Parameter: Tissue Value: Flowers
  misc_feature: MA Experiment 20001911 PARAMETER Experiment Name: At_Drought_Reproduction_P Parameter: Treatment Value: Drought vs. No Drought
atgggaaatcagaagctcaaatggacggcggaggaagaggaggcgttactcgccggagttaggaagcatggccctggaaagtggaagaatattctccgcgatcctgaattagctgagcagctctctagtcgctctaacatcgacctcaaggataaatggcgtaatttaagtgttgctcctggtattcaaggctctaaggataagatacggacaccaaaaatcaaagctgctgcttttcatctggctgccgctgctgctgccgctattgtaactcctactcatagtggtcactcttctccagttgctactcttccccgaagtggatcttctgatttgagcattgatgatagttttaacattgtagttgatccaaagaatgctcccaggtatgatggaatgatatttgaagctctttcaaacttgacggatgctaatggatctgatgtcagcgcaattttcaacttcattgagcagcaacgacaagaagtgccaccaaatttcaggaggatgcttagttcaagattgaggaggcttgcagctcagggaaagcttgaaaagcagattgttgaagcttcaataacagcagcttataagctcgtagaagtagagaacaaattagatgtgtcgaaaggagctgcagaagagatagagagactgatgaaactggcagaagaggctgatgagatgctagtgatagcgagagagatgcacgaagaatgtagtcagggaaagattatgtacttgaattga

SEQ ID NO: 83515 - protein, 249 aa, Arabidopsis thaliana
  peptide (1)..(249): Ceres Seq. ID no. 12670598
  misc_feature (126)..(201): Pfam Name: linker histone H1 and H5 family Pfam Description: linker histone H1 and H5 family
  misc_feature (1)..(240): Homolog of NCBI NO: 8778473 NR Description: F1L3.23 [Arabidopsis thaliana]
  misc_feature (1)..(199): Homolog of NCBI NO: 30685367 NR Description: myb-related DNA-binding protein -related
  misc_feature (1)..(199): Homolog of NCBI NO: 26452093 NR Description: putative myb-related DNA-binding protein thaliana] >gi|28950861|gb|AAO63354.1| At1g17520 [Arabidopsis
  misc_feature (1)..(241): Homolog of NCBI NO: 15218592 NR Description: putative DNA-binding protein; protein id:
  misc_feature (1)..(186): Homolog of NCBI NO: 18463961 NR Description: histone H1-like protein [Zea mays]
  misc_feature (189)..(248): Homolog of NCBI NO: 18463961 NR Description: histone H1-like protein [Zea mays]
  misc_feature (1)..(186): Homolog of NCBI NO: 34105721 NR Description: Single myb histone 4 [Zea mays subsp. mays]
  misc_feature (189)..(248): Homolog of NCBI NO: 34105721 NR Description: Single myb histone 4 [Zea mays subsp. mays]
  misc_feature (1)..(186): Homolog of NCBI NO: 34105717 NR Description: Single myb histone 3 [Zea mays subsp. mays]
  misc_feature (189)..(248): Homolog of NCBI NO: 34105717 NR Description: Single myb histone 3 [Zea mays subsp. mays]
MGNQKLKWTAEEEEALLAGVRKHGPGKWKNILRDPELAEQLSSRSNIDLKDKWRNLSVAPGIQGSKDKIRTPKIKAAAFHLAAAAAAAIVTPTHSGHSSPVATLPRSGSSDLSIDDSFNIVVDPKNAPRYDGMIFEALSNLTDANGSDVSAIFNFIEQQRQEVPPNFRRMLSSRLRRLAAQGKLEKQIVEASITAAYKLVEVENKLDVSKGAAEEIERLMKLAEEADEMLVIAREMHEECSQGKIMYLN

SEQ ID NO: 83516 - DNA, 2862 bp, Arabidopsis thaliana
  misc_feature (1)..(2862): Ceres Seq. ID no. 12670650
  misc_feature: MA Experiment ID: 20000314 Result: Up-regulated in Transcription
  misc_feature: MA Experiment 20000314 PARAMETER Experiment Name: At_14day_Shoots-Roots_Sub_P Parameter: Age (day) Value: 14
  misc_feature: MA Experiment 20000314 PARAMETER Experiment Name: At_14day_Shoots-Roots_Sub_P Parameter: Organism Value: A. thaliana
  misc_feature: MA Experiment 20000314 PARAMETER Experiment Name: At_14day_Shoots-Roots_Sub_P Parameter: Plant Line Value: WS
  misc_feature: MA Experiment 20000314 PARAMETER Experiment Name: At_14day_Shoots-Roots_Sub_P Parameter: Tissue Value: Roots vs. Whole Plant
  misc_feature: MA Experiment ID: 20000315 Result: Down-regulated in Transcription
  misc_feature: MA Experiment 20000315 PARAMETER Experiment Name: At_14day_Shoots-Roots_Sub_P Parameter: Age (day) Value: 14
  misc_feature: MA Experiment 20000315 PARAMETER Experiment Name: At_14day_Shoots-Roots_Sub_P Parameter: Organism Value: A. thaliana
  misc_feature: MA Experiment 20000315 PARAMETER Experiment Name: At_14day_Shoots-Roots_Sub_P Parameter: Plant Line Value: WS
  misc_feature: MA Experiment 20000315 PARAMETER Experiment Name: At_14day_Shoots-Roots_Sub_P Parameter: Tissue Value: Shoots vs. Whole Plant
  misc_feature: MA Experiment ID: 20000327 Result: Up-regulated in Transcription
  misc_feature: MA Experiment 20000327 PARAMETER Experiment Name: At_42deg_Heat_Sub_P Parameter: Age (day) Value: 14
  misc_feature: MA Experiment 20000327 PARAMETER Experiment Name: At_42deg_Heat_Sub_P Parameter: Organism Value: A. thaliana
  misc_feature: MA Experiment 20000327 PARAMETER Experiment Name: At_42deg_Heat_Sub_P Parameter: Plant Line Value: WS
  misc_feature: MA Experiment 20000327 PARAMETER Experiment Name: At_42deg_Heat_Sub_P Parameter: Temperature (deg C) Value: 42 vs. 22
  misc_feature: MA Experiment 20000327 PARAMETER Experiment Name: At_42deg_Heat_Sub_P Parameter: Timepoint (hr) Value: 1
  misc_feature: MA Experiment 20000327 PARAMETER Experiment Name: At_42deg_Heat_Sub_P Parameter: Tissue Value: Aerial
  misc_feature: MA Experiment ID: 20000328 Result: Up-regulated in Transcription
  misc_feature: MA Experiment 20000328 PARAMETER Experiment Name: At_42deg_Heat_Sub_P Parameter: Age (day) Value: 14
  misc_feature: MA Experiment 20000328 PARAMETER Experiment Name: At_42deg_Heat_Sub_P Parameter: Organism Value: A. thaliana
  misc_feature: MA Experiment 20000328 PARAMETER Experiment Name: At_42deg_Heat_Sub_P Parameter: Plant Line Value: WS
  misc_feature: MA Experiment 20000328 PARAMETER Experiment Name: At_42deg_Heat_Sub_P Parameter: Temperature (deg C) Value: 42 vs. 22
  misc_feature: MA Experiment 20000328 PARAMETER Experiment Name: At_42deg_Heat_Sub_P Parameter: Timepoint (hr) Value: 6
  misc_feature: MA Experiment 20000328 PARAMETER Experiment Name: At_42deg_Heat_Sub_P Parameter: Tissue Value: Aerial
  misc_feature: MA Experiment ID: 20000355 Result: Up-regulated in Transcription
  misc_feature: MA Experiment 20000355 PARAMETER Experiment Name: At_Siliques_Sub_P Parameter: Age (day) Value: 21
  misc_feature: MA Experiment 20000355 PARAMETER Experiment Name: At_Siliques_Sub_P Parameter: Organism Value: A. thaliana
  misc_feature: MA Experiment 20000355 PARAMETER Experiment Name: At_Siliques_Sub_P Parameter: Plant Line Value: WS
  misc_feature: MA Experiment 20000355 PARAMETER Experiment Name: At_Siliques_Sub_P Parameter: Tissue Value: Less Than 5mm Siliques vs. Whole Plant
  misc_feature: MA Experiment ID: 20000440 Result: Up-regulated in Transcription
  misc_feature: MA Experiment 20000440 PARAMETER Experiment Name: At_Closed-Flower__Sub_P Parameter: Tissue Value: Closed Flower vs. Whole Plant
atgggttgcggaggatccaaagtagatgatcaaccacttgtgattctctgtagagagaggaaacaactcatcaaagctgcttctcatcatcgttgtgctttagccgctgctcatctctcttactttcaatctctctgtgacgttggtgattccattaaacgtttcgtcgacgaagaactcgtcctcgttgggacttcttcttcttcttcccctgattctcctgttcttactcttccttccgacgaagggaagccacataaacacaagatctcctcttcttcaacctctgtttcgcattcggttattgaagacgacgacgaaggagaaggagaagatcagcatttgcatttatcatctggatccgagttagattctggatcggaatctggatctgatgattcattaggtcatatccatattgaaactagccctaaagtgaaagagaaagaaacacgcttaccggaaaattaccagcccggttatcaatccggttatcaatccggttatcagcccggttttacgccgggatatcaatatcaaccgggttactcggctgggtatcagtatccggttgaaggatggggattcatgggagagaatccgaatttaaacccgtacccgaatccgaaccagaatccgggaatgtactttatgaagaagtctgtgcaaccgtcacgaccggtagtgtttcagccggagaatcatagagtggagaatgggcaatggttgccggagaatggagttgggtattctaattattacccaggaaacgctaatactgggtattttggttacccggagcaacgtagagagccaccgtctccggtgaggccgactccagcacctccgtctccgcctaggatttcaagttgggattttttgaatgtgtttgatacttatgattataatagagctggtggtggtgaaagttccggtgccggagctgggttttttccagccatgggtggaggtaagtcgaattcaagtagtcctgattcgagggaagtgagagagagggaagggattcctgagttggaagaagaaacagagcaagaagttatctttgggcagacgtttaaacatatgaagagaaaaggcattgagaaggtgaaagaacaacacagacaggagaatgagattcacgagagaaagatcaagaaacgaggagattcaggtgaaggaacttcaagggcagtgcctgtggtagaaagggctacggagagctcttttggttcaaagactgtgtcgtcgttttcgagcagtgaagaagagtcggagtttcatcatgttaatgatggagaagggaagagtagcagtaatgatttaggtgggcatgagacggttgctactaagagtgttggagaagtagaagaagaatatgtgaggaagaaaggagttagctttgagttggatgaaaatgtaactacttcttttgatgttgaatcttccaagattagtagtctatctgcattgtcggttcatgccactagagatcttagagaagttgtgaaggagatcaagagtgagtttgaggttgcttcttcacatgggaaggaagtggctgtgttgcttgaggttagcaagttgccttatcagcagaaaagttcggggctcaaagtcatcttctcccggatcatgtatctggttgcaccatccacagtttcatcgcgctctcagcctcaaccgtcaatacgtttaacatctaggatattgaaaattgcaaaatcatacaatggtcaggatgttagagaaggcttaactgggaacctctcagcaaccttggagcaactctatgcttgggaaaagaaactgtacaaagaagtcaaggatgaagagaagcttcgtgttgtctatgaagaaaagtgcagaacactgaaaaaactggatagtcttggtgcggaatctagcaagattgatactactcgagcagccattagaaagctgctaaccaaactcgacgtctgtataagatctgttgattccatttccagcaggatacataaactgagagacgaagaattacagcctcaactaacacaattgattcacgggttgataagaatgtggagatcaatgctcaagtgccaccagaagcagttccaggcaatcatggagagcaaggttcgatctctcagggcaaacaccggcttacaaagagactccggtttgaaagctattcttgatttggagatggagctacgagaatggtgcattagcttcaacgactgggtcaatactcagaaatcatacgtggagtctctaaatggatggctctcaagatgtcttcactatgaacctgaatcaacggaggacggaattgcccctttctctcctagccgtgttggagctccacaggttttcgttatatgcaaagattggcaagaagcaatggcgagaatctctggagagaacgtttcaaacgcaatgcaaggctttgcctcgagtctgcatgaactatgggagagacaagatgaggagcaaaggcagagagtgaaagcagagtatgtgtcacacgatttcgagaaacggttgaatgatcttcggatggagagggcgagagtgagaatgagaaacgatcagctacaagacggtgcatcagagaaaagcgtggtcttgtccgagagcgggatctcggcgttggatgatttgaaagtggacttggattcaatgaggaagaagctagaagaagaaagagcaagacacaaggaaacaattaaacttgtgaacaatgcagcttcaagcagcttacaagctggtttagtaccaatctttgaggctttggggaatttcacttcacaagttgtgaaagctcatgaagatgttaggtttcaacaacaacaacagcctgagtctgaagattga

SEQ ID NO: 83517 - protein, 953 aa, Arabidopsis thaliana
  peptide (1)..(953): Ceres Seq. ID no. 12670651
  misc_feature (479)..(820): Pfam Name: Protein of unknown function (DUF632) Pfam Description: Protein of unknown function (DUF632)
  misc_feature (278)..(914): Homolog of NCBI NO: 15223973 NR Description: unknown protein; protein id: At1g77500.1
  misc_feature (1)..(247): Homolog of NCBI NO: 15223973 NR Description: unknown protein; protein id: At1g77500.1
  misc_feature (278)..(914): Homolog of NCBI NO: 19424001 NR Description: unknown protein [Arabidopsis thaliana]
  misc_feature (359)..(942): Homolog of NCBI NO: 34905788 NR Description: bzip-like transcription factor-like [Oryza sativa
  misc_feature (16)..(181): Homolog of NCBI NO: 34905788 NR Description: bzip-like transcription factor-like [Oryza sativa
  misc_feature (1)..(300): Homolog of NCBI NO: 15236929 NR Description: putative protein; protein id: At4g35240.1
  misc_feature (581)..(876): Homolog of NCBI NO: 15236929 NR Description: putative protein; protein id: At4g35240.1
  misc_feature (825)..(947): Homolog of NCBI NO: 15223973 NR Description: unknown protein; protein id: At1g77500.1
  misc_feature (396)..(918): Homolog of NCBI NO: 38345928 NR Description: OSJNBb0078D11.3 [Oryza sativa (japonica
  misc_feature (189)..(355): Homolog of NCBI NO: 38345928 NR Description: OSJNBb0078D11.3 [Oryza sativa (japonica
MGCGGSKVDDQPLVILCRERKQLIKAASHHRCALAAAHLSYFQSLCDVGDSIKRFVDEELVLVGTSSSSSPDSPVLTLPSDEGKPHKHKISSSSTSVSHSVIEDDDEGEGEDQHLHLSSGSELDSGSESGSDDSLGHIHIETSPKVKEKETRLPENYQPGYQSGYQSGYQPGFTPGYQYQPGYSAGYQYPVEGWGFMGENPNLNPYPNPNQNPGMYFMKKSVQPSRPVVFQPENHRVENGQWLPENGVGYSNYYPGNANTGYFGYPEQRREPPSPVRPTPAPPSPPRISSWDFLNVFDTYDYNRAGGGESSGAGAGFFPAMGGGKSNSSSPDSREVREREGIPELEEETEQEVIFGQTFKHMKRKGIEKVKEQHRQENEIHERKIKKRGDSGEGTSRAVPVVERATESSFGSKTVSSFSSSEEESEFHHVNDGEGKSSSNDLGGHETVATKSVGEVEEEYVRKKGVSFELDENVTTSFDVESSKISSLSALSVHATRDLREVVKEIKSEFEVASSHGKEVAVLLEVSKLPYQQKSSGLKVIFSRIMYLVAPSTVSSRSQPQPSIRLTSRILKIAKSYNGQDVREGLTGNLSATLEQLYAWEKKLYKEVKDEEKLRVVYEEKCRTLKKLDSLGAESSKIDTTRAAIRKLLTKLDVCIRSVDSISSRIHKLRDEELQPQLTQLIHGLIRMWRSMLKCHQKQFQAIMESKVRSLRANTGLQRDSGLKAILDLEMELREWCISFNDWVNTQKSYVESLNGWLSRCLHYEPESTEDGIAPFSPSRVGAPQVFVICKDWQEAMARISGENVSNAMQGFASSLHELWERQDEEQRQRVKAEYVSHDFEKRLNDLRMERARVRMRNDQLQDGASEKSVVLSESGISALDDLKVDLDSMRKKLEEERARHKETIKLVNNAASSSLQAGLVPIFEALGNFTSQVVKAHEDVRFQQQQQPESED

SEQ ID NO: 83518 - protein, 757 aa, Arabidopsis thaliana
  peptide (1)..(757): Ceres Seq. ID no. 12670652
  misc_feature (283)..(624): Pfam Name: Protein of unknown function (DUF632) Pfam Description: Protein of unknown function (DUF632)
  misc_feature (82)..(718): Homolog of NCBI NO: 15223973 NR Description: unknown protein; protein id: At1g77500.1
  misc_feature (1)..(51): Homolog of NCBI NO: 15223973 NR Description: unknown protein; protein id: At1g77500.1
  misc_feature (82)..(718): Homolog of NCBI NO: 19424001 NR Description: unknown protein [Arabidopsis thaliana]
  misc_feature (163)..(746): Homolog of NCBI NO: 34905788 NR Description: bzip-like transcription factor-like [Oryza sativa
  misc_feature (1)..(104): Homolog of NCBI NO: 15236929 NR Description: putative protein; protein id: At4g35240.1
  misc_feature (385)..(680): Homolog of NCBI NO: 15236929 NR Description: putative protein; protein id: At4g35240.1
  misc_feature (629)..(751): Homolog of NCBI NO: 15223973 NR Description: unknown protein; protein id: At1g77500.1
  misc_feature (200)..(722): Homolog of NCBI NO: 38345928 NR Description: OSJNBb0078D11.3 [Oryza sativa (japonica
  misc_feature (1)..(159): Homolog of NCBI NO: 38345928 NR Description: OSJNBb0078D11.3 [Oryza sativa (japonica
  misc_feature (474)..(708): Homolog of NCBI NO: 25411780 NR Description: hypothetical protein At2g17100 [imported] -
MGENPNLNPYPNPNQNPGMYFMKKSVQPSRPVVFQPENHRVENGQWLPENGVGYSNYYPGNANTGYFGYPEQRREPPSPVRPTPAPPSPPRISSWDFLNVFDTYDYNRAGGGESSGAGAGFFPAMGGGKSNSSSPDSREVREREGIPELEEETEQEVIFGQTFKHMKRKGIEKVKEQHRQENEIHERKIKKRGDSGEGTSRAVPVVERATESSFGSKTVSSFSSSEEESEFHHVNDGEGKSSSNDLGGHETVATKSVGEVEEEYVRKKGVSFELDENVTTSFDVESSKISSLSALSVHATRDLREVVKEIKSEFEVASSHGKEVAVLLEVSKLPYQQKSSGLKVIFSRIMYLVAPSTVSSRSQPQPSIRLTSRILKIAKSYNGQDVREGLTGNLSATLEQLYAWEKKLYKEVKDEEKLRVVYEEKCRTLKKLDSLGAESSKIDTTRAAIRKLLTKLDVCIRSVDSISSRIHKLRDEELQPQLTQLIHGLIRMWRSMLKCHQKQFQAIMESKVRSLRANTGLQRDSGLKAILDLEMELREWCISFNDWVNTQKSYVESLNGWLSRCLHYEPESTEDGIAPFSPSRVGAPQVFVICKDWQEAMARISGENVSNAMQGFASSLHELWERQDEEQRQRVKAEYVSHDFEKRLNDLRMERARVRMRNDQLQDGASEKSVVLSESGISALDDLKVDLDSMRKKLEEERARHKETIKLVNNAASSSLQAGLVPIFEALGNFTSQVVKAHEDVRFQQQQQPESED

SEQ ID NO: 83519 - protein, 739 aa, Arabidopsis thaliana
  peptide (1)..(739): Ceres Seq. ID no. 12670653
  misc_feature (265)..(606): Pfam Name: Protein of unknown function (DUF632) Pfam Description: Protein of unknown function (DUF632)
  misc_feature (64)..(700): Homolog of NCBI NO: 15223973 NR Description: unknown protein; protein id: At1g77500.1
  misc_feature (1)..(33): Homolog of NCBI NO: 15223973 NR Description: unknown protein; protein id: At1g77500.1
  misc_feature (64)..(700): Homolog of NCBI NO: 19424001 NR Description: unknown protein [Arabidopsis thaliana]
  misc_feature (145)..(728): Homolog of NCBI NO: 34905788 NR Description: bzip-like transcription factor-like [Oryza sativa
  misc_feature (1)..(86): Homolog of NCBI NO: 15236929 NR Description: putative protein; protein id: At4g35240.1
  misc_feature (367)..(662): Homolog of NCBI NO: 15236929 NR Description: putative protein; protein id: At4g35240.1
  misc_feature (611)..(733): Homolog of NCBI NO: 15223973 NR Description: unknown protein; protein id: At1g77500.1
  misc_feature (182)..(704): Homolog of NCBI NO: 38345928 NR Description: OSJNBb0078D11.3 [Oryza sativa (japonica
  misc_feature (1)..(141): Homolog of NCBI NO: 38345928 NR Description: OSJNBb0078D11.3 [Oryza sativa (japonica
  misc_feature (456)..(690): Homolog of NCBI NO: 25411780 NR Description: hypothetical protein At2g17100 [imported] -
MYFMKKSVQPSRPVVFQPENHRVENGQWLPENGVGYSNYYPGNANTGYFGYPEQRREPPSPVRPTPAPPSPPRISSWDFLNVFDTYDYNRAGGGESSGAGAGFFPAMGGGKSNSSSPDSREVREREGIPELEEETEQEVIFGQTFKHMKRKGIEKVKEQHRQENEIHERKIKKRGDSGEGTSRAVPVVERATESSFGSKTVSSFSSSEEESEFHHVNDGEGKSSSNDLGGHETVATKSVGEVEEEYVRKKGVSFELDENVTTSFDVESSKISSLSALSVHATRDLREVVKEIKSEFEVASSHGKEVAVLLEVSKLPYQQKSSGLKVIFSRIMYLVAPSTVSSRSQPQPSIRLTSRILKIAKSYNGQDVREGLTGNLSATLEQLYAWEKKLYKEVKDEEKLRVVYEEKCRTLKKLDSLGAESSKIDTTRAAIRKLLTKLDVCIRSVDSISSRIHKLRDEELQPQLTQLIHGLIRMWRSMLKCHQKQFQAIMESKVRSLRANTGLQRDSGLKAILDLEMELREWCISFNDWVNTQKSYVESLNGWLSRCLHYEPESTEDGIAPFSPSRVGAPQVFVICKDWQEAMARISGENVSNAMQGFASSLHELWERQDEEQRQRVKAEYVSHDFEKRLNDLRMERARVRMRNDQLQDGASEKSVVLSESGISALDDLKVDLDSMRKKLEEERARHKETIKLVNNAASSSLQAGLVPIFEALGNFTSQVVKAHEDVRFQQQQQPESED

SEQ ID NO: 83520 - DNA, 1680 bp, Arabidopsis thaliana
  misc_feature (1)..(1680): Ceres Seq. ID no. 12670681
  misc_feature: MA Experiment ID: 20000169 Result: Up-regulated in Transcription
  misc_feature: MA Experiment 20000169 PARAMETER Experiment Name: At_100uM_ABA_P Parameter: Age (day) Value: 14
  misc_feature: MA Experiment 20000169 PARAMETER Experiment Name: At_100uM_ABA_P Parameter: Organism Value: A. thaliana
  misc_feature: MA Experiment 20000169 PARAMETER Experiment Name: At_100uM_ABA_P Parameter: Plant Line Value: WS
  misc_feature: MA Experiment 20000169 PARAMETER Experiment Name: At_100uM_ABA_P Parameter: Timepoint (hr) Value: 6
  misc_feature: MA Experiment 20000169 PARAMETER Experiment Name: At_100uM_ABA_P Parameter: Tissue Value: Aerial
  misc_feature: MA Experiment 20000169 PARAMETER Experiment Name: At_100uM_ABA_P Parameter: Treatment Value: 100uM ABA vs. No Treatment
  misc_feature: MA Experiment ID: 20000184 Result: Down-regulated in Transcription
  misc_feature: MA Experiment 20000184 PARAMETER Experiment Name: At_Shoots__P Parameter: Age (day) Value: 7
  misc_feature: MA Experiment 20000184 PARAMETER Experiment Name: At_Shoots__P Parameter: Tissue Value: Shoots vs. Whole Plant
  misc_feature: MA Experiment ID: 20000185 Result: Down-regulated in Transcription
  misc_feature: MA Experiment 20000185 PARAMETER Experiment Name: At_Roots__P Parameter: Age (day) Value: 7 vs. 21
  misc_feature: MA Experiment 20000185 PARAMETER Experiment Name: At_Roots__P Parameter: Organism Value: A. thaliana
  misc_feature: MA Experiment 20000185 PARAMETER Experiment Name: At_Roots__P Parameter: Tissue Value: Roots vs. Whole Plant
  misc_feature: MA Experiment ID: 20000234 Result: Down-regulated in Transcription
  misc_feature: MA Experiment 20000234 PARAMETER Experiment Name: At_Siliques_P Parameter: Age (day) Value: 21
  misc_feature: MA Experiment 20000234 PARAMETER Experiment Name: At_Siliques_P Parameter: Organism Value: A. thaliana
  misc_feature: MA Experiment 20000234 PARAMETER Experiment Name: At_Siliques_P Parameter: Plant Line Value: WS
  misc_feature: MA Experiment 20000234 PARAMETER Experiment Name: At_Siliques_P Parameter: Tissue Value: Less Than 5mm Siliques vs. Whole Plant
  misc_feature: MA Experiment ID: 20000235 Result: Down-regulated in Transcription
  misc_feature: MA Experiment 20000235 PARAMETER Experiment Name: At_Siliques_P Parameter: Age (day) Value: 21
  misc_feature: MA Experiment 20000235 PARAMETER Experiment Name: At_Siliques_P Parameter: Organism Value: A. thaliana
  misc_feature: MA Experiment 20000235 PARAMETER Experiment Name: At_Siliques_P Parameter: Plant Line Value: WS
  misc_feature: MA Experiment 20000235 PARAMETER Experiment Name: At_Siliques_P Parameter: Tissue Value: 5-10mm Siliques vs. Whole Plant
  misc_feature: MA Experiment ID: 20000264 Result: Down-regulated in Transcription
  misc_feature: MA Experiment 20000264 PARAMETER Experiment Name: At_Open_Flower_P Parameter: Age (day) Value: 21
  misc_feature: MA Experiment 20000264 PARAMETER Experiment Name: At_Open_Flower_P Parameter: Plant Line Value: WS
  misc_feature: MA Experiment 20000264 PARAMETER Experiment Name: At_Open_Flower_P Parameter: Tissue Value: Open Flower vs. Whole Plant
  misc_feature: MA Experiment ID: 20000265 Result: Down-regulated in Transcription
  misc_feature: MA Experiment 20000265 PARAMETER Experiment Name: At_Open_Flower_P Parameter: Age (day) Value: 21
  misc_feature: MA Experiment 20000265 PARAMETER Experiment Name: At_Open_Flower_P Parameter: Plant Line Value: WS
  misc_feature: MA Experiment 20000265 PARAMETER Experiment Name: At_Open_Flower_P Parameter: Tissue Value: Closed Flower vs. Whole Plant
  misc_feature: MA Experiment ID: 20000267 Result: Up-regulated in Transcription
  misc_feature: MA Experiment 20000267 PARAMETER Experiment Name: At_Drought_P Parameter: Age (day) Value: 7
  misc_feature: MA Experiment 20000267 PARAMETER Experiment Name: At_Drought_P Parameter: Organism Value: A. thaliana
  misc_feature: MA Experiment 20000267 PARAMETER Experiment Name: At_Drought_P Parameter: Plant Line Value: WS
  misc_feature: MA Experiment 20000267 PARAMETER Experiment Name: At_Drought_P Parameter: Timepoint (hr) Value: 6
  misc_feature: MA Experiment 20000267 PARAMETER Experiment Name: At_Drought_P Parameter: Tissue Value: Whole Plant
  misc_feature: MA Experiment 20000267 PARAMETER Experiment Name: At_Drought_P Parameter: Treatment Value: Drought vs. No Drought
  misc_feature: MA Experiment ID: 20000268 Result: Down-regulated in Transcription
  misc_feature: MA Experiment 20000268 PARAMETER Experiment Name: At_100mM_NaCl__P Parameter: Age (day) Value: 14
  misc_feature: MA Experiment 20000268 PARAMETER Experiment Name: At_100mM_NaCl__P Parameter: Organism Value: A. thaliana
  misc_feature: MA Experiment 20000268 PARAMETER Experiment Name: At_100mM_NaCl__P Parameter: Plant Line Value: WS
  misc_feature: MA Experiment 20000268 PARAMETER Experiment Name: At_100mM_NaCl__P Parameter: Timepoint (hr) Value: 6
  misc_feature: MA Experiment 20000268 PARAMETER Experiment Name: At_100mM_NaCl__P Parameter: Tissue Value: Whole Plant
  misc_feature: MA Experiment 20000268 PARAMETER Experiment Name: At_100mM_NaCl__P Parameter: Treatment Value: 100mM NaCl vs. No Treatment
  misc_feature: MA Experiment ID: 20000286 Result: Down-regulated in Transcription
  misc_feature: MA Experiment 20000286 PARAMETER Experiment Name: At_Open_Flower_P Parameter: Age (day) Value: 21
  misc_feature: MA Experiment 20000286 PARAMETER Experiment Name: At_Open_Flower_P Parameter: Plant Line Value: WS
  misc_feature: MA Experiment 20000286 PARAMETER Experiment Name: At_Open_Flower_P Parameter: Tissue Value: Half Open vs. Whole Plant
  misc_feature: MA Experiment ID: 20000437 Result: Up-regulated in Transcription
  misc_feature: MA Experiment 20000437 PARAMETER Experiment Name: At_Drought_P Parameter: Age (day) Value: 8
  misc_feature: MA Experiment 20000437 PARAMETER Experiment Name: At_Drought_P Parameter: Organism Value: A. thaliana
  misc_feature: MA Experiment 20000437 PARAMETER Experiment Name: At_Drought_P Parameter: Plant Line Value: WS
  misc_feature: MA Experiment 20000437 PARAMETER Experiment Name: At_Drought_P Parameter: Timepoint (hr) Value: 24
  misc_feature: MA Experiment 20000437 PARAMETER Experiment Name: At_Drought_P Parameter: Tissue Value: Whole Plant
  misc_feature: MA Experiment 20000437 PARAMETER Experiment Name: At_Drought_P Parameter: Treatment Value: Drought vs. No Drought
  misc_feature: MA Experiment ID: 20000438 Result: Down-regulated in Transcription
  misc_feature: MA Experiment 20000438 PARAMETER Experiment Name: At_Shoots__P Parameter: Age (day) Value: 14
  misc_feature: MA Experiment 20000438 PARAMETER Experiment Name: At_Shoots__P Parameter: Tissue Value: Shoots vs. Whole Plant
  misc_feature: MA Experiment ID: 20000439 Result: Down-regulated in Transcription
  misc_feature: MA Experiment 20000439 PARAMETER Experiment Name: At_Roots__P Parameter: Age (day) Value: 14 vs. 21
  misc_feature: MA Experiment 20000439 PARAMETER Experiment Name: At_Roots__P Parameter: Organism Value: A. thaliana
  misc_feature: MA Experiment 20000439 PARAMETER Experiment Name: At_Roots__P Parameter: Tissue Value: Roots vs. Whole Plant
  misc_feature: MA Experiment ID: 20000441 Result: Up-regulated in Transcription
  misc_feature: MA Experiment 20000441 PARAMETER Experiment Name: At_1uM_BR-BRZ__P Parameter: Tissue Value: Shoot Apices
  misc_feature: MA Experiment 20000441 PARAMETER Experiment Name: At_1uM_BR-BRZ__P Parameter: Treatment Value: 1uM BR vs. No Treatment
  misc_feature: MA Experiment ID: 20000451 Result: Up-regulated in Transcription
  misc_feature: MA Experiment 20000451 PARAMETER Experiment Name: At_CS6879_Shoots-Roots_P Parameter: Age (day) Value: 14
  misc_feature: MA Experiment 20000451 PARAMETER Experiment Name: At_CS6879_Shoots-Roots_P Parameter: Organism Value: A. thaliana
  misc_feature: MA Experiment 20000451 PARAMETER Experiment Name: At_CS6879_Shoots-Roots_P Parameter: Plant Line Value: CS6879 vs. WS
  misc_feature: MA Experiment 20000451 PARAMETER Experiment Name: At_CS6879_Shoots-Roots_P Parameter: Tissue Value: Roots
  misc_feature: MA Experiment ID: 20000460 Result: Up-regulated in Transcription
  misc_feature: MA Experiment 20000460 PARAMETER Experiment Name: At_10percent_PEG_P Parameter: Age (day) Value: 12
  misc_feature: MA Experiment 20000460 PARAMETER Experiment Name: At_10percent_PEG_P Parameter: Organism Value: A. thaliana
  misc_feature: MA Experiment 20000460 PARAMETER Experiment Name: At_10percent_PEG_P Parameter: Plant Line Value: WS
  misc_feature: MA Experiment 20000460 PARAMETER Experiment Name: At_10percent_PEG_P Parameter: Timepoint (day) Value: 12
  misc_feature: MA Experiment 20000460 PARAMETER Experiment Name: At_10percent_PEG_P Parameter: Tissue Value: Whole Plant
  misc_feature: MA Experiment 20000460 PARAMETER Experiment Name: At_10percent_PEG_P Parameter: Treatment Value: 10percent PEG vs. No Treatment
  misc_feature: MA Experiment ID: 20000495 Result: Down-regulated in Transcription
  misc_feature: MA Experiment 20000495 PARAMETER Experiment Name: At_Guard_Cells_P Parameter: Harvest Date Value: 8/2/2002
  misc_feature: MA Experiment 20000495 PARAMETER Experiment Name: At_Guard_Cells_P Parameter: Organism Value: A. thaliana
  misc_feature: MA Experiment 20000495 PARAMETER Experiment Name: At_Guard_Cells_P Parameter: Tissue Value: Guard Cells vs. Leaves
  misc_feature: MA Experiment ID: 20000527 Result: Up-regulated in Transcription
  misc_feature: MA Experiment 20000527 PARAMETER Experiment Name: At_10percent_PEG_P Parameter: Age (day) Value: 20
  misc_feature: MA Experiment 20000527 PARAMETER Experiment Name: At_10percent_PEG_P Parameter: Organism Value: A. thaliana
  misc_feature: MA Experiment 20000527 PARAMETER Experiment Name: At_10percent_PEG_P Parameter: Plant Line Value: WS
  misc_feature: MA Experiment 20000527 PARAMETER Experiment Name: At_10percent_PEG_P Parameter: Timepoint (day) Value: 20
  misc_feature: MA Experiment 20000527 PARAMETER Experiment Name: At_10percent_PEG_P Parameter: Tissue Value: Whole Plant
  misc_feature: MA Experiment 20000527 PARAMETER Experiment Name: At_10percent_PEG_P Parameter: Treatment Value: 10percent PEG vs. No Treatment
  misc_feature: MA Experiment ID: 20000573 Result: Down-regulated in Transcription
  misc_feature: MA Experiment 20000573 PARAMETER Experiment Name: At_100uM_ABA_Mutants__P Parameter: Organism Value: A. thaliana
  misc_feature: MA Experiment 20000573 PARAMETER Experiment Name: At_100uM_ABA_Mutants__P Parameter: Plant Line Value: CS22 vs. Ler wt
  misc_feature: MA Experiment 20000573 PARAMETER Experiment Name: At_100uM_ABA_Mutants__P Parameter: Timepoint (hr) Value: N/A
  misc_feature: MA Experiment 20000573 PARAMETER Experiment Name: At_100uM_ABA_Mutants__P Parameter: Tissue Value: Whole Plant
  misc_feature: MA Experiment 20000573 PARAMETER Experiment Name: At_100uM_ABA_Mutants__P Parameter: Treatment Value: None
  misc_feature: MA Experiment ID: 20000574 Result: Down-regulated in Transcription
  misc_feature: MA Experiment 20000574 PARAMETER Experiment Name: At_100uM_ABA_Mutants__P Parameter: Organism Value: A. thaliana
  misc_feature: MA Experiment 20000574 PARAMETER Experiment Name: At_100uM_ABA_Mutants__P Parameter: Plant Line Value: CS23 vs. Ler wt
  misc_feature: MA Experiment 20000574 PARAMETER Experiment Name: At_100uM_ABA_Mutants__P Parameter: Timepoint (hr) Value: N/A
  misc_feature: MA Experiment 20000574 PARAMETER Experiment Name: At_100uM_ABA_Mutants__P Parameter: Tissue Value: Whole Plant
  misc_feature: MA Experiment 20000574 PARAMETER Experiment Name: At_100uM_ABA_Mutants__P Parameter: Treatment Value: None
  misc_feature: MA Experiment ID: 20001247 Result: Up-regulated in Transcription
  misc_feature: MA Experiment 20001247 PARAMETER Experiment Name: At_Far-red-induction_P Parameter: Age (day) Value: 7
  misc_feature: MA Experiment 20001247 PARAMETER Experiment Name: At_Far-red-induction_P Parameter: Light Value: Far-red vs. White
  misc_feature: MA Experiment 20001247 PARAMETER Experiment Name: At_Far-red-induction_P Parameter: Organism Value: A. thaliana
  misc_feature: MA Experiment 20001247 PARAMETER Experiment Name: At_Far-red-induction_P Parameter: Plant Line Value: Columbia
  misc_feature: MA Experiment 20001247 PARAMETER Experiment Name: At_Far-red-induction_P Parameter: Timepoint (hr) Value: 1
  misc_feature: MA Experiment 20001247 PARAMETER Experiment Name: At_Far-red-induction_P Parameter: Tissue Value: Whole Plant
  misc_feature: MA Experiment ID: 20001557 Result: Up-regulated in Transcription
  misc_feature: MA Experiment 20001557 PARAMETER Experiment Name: At_Drought_Soil_Dry_P Parameter: Age (day) Value: 27
  misc_feature: MA Experiment 20001557 PARAMETER Experiment Name: At_Drought_Soil_Dry_P Parameter: Organism Value: A. thaliana
  misc_feature: MA Experiment 20001557 PARAMETER Experiment Name: At_Drought_Soil_Dry_P Parameter: Plant Line Value: WS
  misc_feature: MA Experiment 20001557 PARAMETER Experiment Name: At_Drought_Soil_Dry_P Parameter: Post Timepoint (hr) Value: 3
  misc_feature: MA Experiment 20001557 PARAMETER Experiment Name: At_Drought_Soil_Dry_P Parameter: Post-Treatment Value: Re-Water vs. No Drought
  misc_feature: MA Experiment 20001557 PARAMETER Experiment Name: At_Drought_Soil_Dry_P Parameter: Timepoint (day) Value: 13
  misc_feature: MA Experiment 20001557 PARAMETER Experiment Name: At_Drought_Soil_Dry_P Parameter: Treatment Value: Drought vs. No Drought
  misc_feature: MA Experiment ID: 20001558 Result: Up-regulated in Transcription
  misc_feature: MA Experiment 20001558 PARAMETER Experiment Name: At_Drought_Soil_Dry_P Parameter: Age (day) Value: 27
  misc_feature: MA Experiment 20001558 PARAMETER Experiment Name: At_Drought_Soil_Dry_P Parameter: Organism Value: A. thaliana
  misc_feature: MA Experiment 20001558 PARAMETER Experiment Name: At_Drought_Soil_Dry_P Parameter: Plant Line Value: WS
  misc_feature: MA Experiment 20001558 PARAMETER Experiment Name: At_Drought_Soil_Dry_P Parameter: Post Timepoint (hr) Value: 6
  misc_feature: MA Experiment 20001558 PARAMETER Experiment Name: At_Drought_Soil_Dry_P Parameter: Post-Treatment Value: Re-Water vs. No Drought
  misc_feature: MA Experiment 20001558 PARAMETER Experiment Name: At_Drought_Soil_Dry_P Parameter: Timepoint (day) Value: 13
  misc_feature: MA Experiment 20001558 PARAMETER Experiment Name: At_Drought_Soil_Dry_P Parameter: Treatment Value: Drought vs. No Drought
  misc_feature: MA Experiment ID: 20001756 Result: Up-regulated in Transcription
  misc_feature: MA Experiment 20001756 PARAMETER Experiment Name: At_50mM_NH4NO3_L-to-H_P Parameter: Timepoint (hr) Value: 4
  misc_feature: MA Experiment 20001756 PARAMETER Experiment Name: At_50mM_NH4NO3_L-to-H_P Parameter: Tissue Value: Leaf
  misc_feature: MA Experiment 20001756 PARAMETER Experiment Name: At_50mM_NH4NO3_L-to-H_P Parameter: Treatment Value: 50mM NH4NO3 vs 100mM Mannitol
  misc_feature: MA Experiment ID: 20001774 Result: Down-regulated in Transcription
  misc_feature: MA Experiment 20001774 PARAMETER Experiment Name: At_Far-red-enriched-adult_P Parameter: Age (day) Value: 31
  misc_feature: MA Experiment 20001774 PARAMETER Experiment Name: At_Far-red-enriched-adult_P Parameter: Light Value: Far-red enriched vs. White
  misc_feature: MA Experiment 20001774 PARAMETER Experiment Name: At_Far-red-enriched-adult_P Parameter: Organism Value: A. thaliana
  misc_feature: MA Experiment 20001774 PARAMETER Experiment Name: At_Far-red-enriched-adult_P Parameter: Plant Line Value: Columbia
  misc_feature: MA Experiment 20001774 PARAMETER Experiment Name: At_Far-red-enriched-adult_P Parameter: Timepoint (hr) Value: 72
  misc_feature: MA Experiment 20001774 PARAMETER Experiment Name: At_Far-red-enriched-adult_P Parameter: Tissue Value: Aerial
  misc_feature: MA Experiment ID: 20001910 Result: Down-regulated in Transcription
  misc_feature: MA Experiment 20001910 PARAMETER Experiment Name: At_Drought_Reproduction_P Parameter: Age (day) Value: 37
  misc_feature: MA Experiment 20001910 PARAMETER Experiment Name: At_Drought_Reproduction_P Parameter: Organism Value: A. thaliana
  misc_feature: MA Experiment 20001910 PARAMETER Experiment Name: At_Drought_Reproduction_P Parameter: Plant Line Value: WS
  misc_feature: MA Experiment 20001910 PARAMETER Experiment Name: At_Drought_Reproduction_P Parameter: Timepoint (day) Value: 7
  misc_feature: MA Experiment 20001910 PARAMETER Experiment Name: At_Drought_Reproduction_P Parameter: Tissue Value: Flowers
  misc_feature: MA Experiment 20001910 PARAMETER Experiment Name: At_Drought_Reproduction_P Parameter: Treatment Value: Drought vs. No Drought
atctccaacacaaaaaccaatccattagagagagaactcacaaaacatacttcgaattcccattgtttaaaagacgaagataatggatttctccggtttgtttctcactctctccgcggcggctctgtttctctgtttactccgatttatcgccggagtccgccgtagctcctccacgaaactccctcttcctccgggaacaatgggttatccttacgtcggcgaaacattccaactttactcacaagaccctaatgtgttctttgcagcaaaacagagaagatacggatcggtgttcaagactcatgtattgggatgtccatgtgtgatgatctcgagccctgaagcagcgaaattcgtattggttacaaagtctcatttgtttaaaccgacttttccggccagtaaagagaggatgcttggaaaacaagccatcttcttccatcaaggagattatcattccaaacttagaaagcttgttttaagagctttcatgcctgatgcaatcagaaacatggtccctcacattgaatcaattgctcaagaatcactcaattcttgggatggaactcaactcaacacttaccaggaaatgaaaacatacactttcaatgttgcgttaatctcaatactcggcaaagacgaagtttattaccgagaagatctaaaacgatgctactacattctagagaaaggttacaattcgatgccgattaatcttccaggaacattattccacaaagccatgaaagctcgcaaggagctagctcaaatcctcgctaacatcttatccaaaagaagacaaaacccatcatcacacacagatctcctcggatcattcatggaagacaaagcaggattaaccgacgaacaaatcgccgataacatcatcggagtaatcttcgccgcaagagacacgacggcgagtgttctgacgtggatcctcaagtacttagctgataatccaactgttctagaagctgtcactgaagagcaaatggcaataaggaaagataaaaaagaaggagagagtctcacttgggaagatacaaagaagatgccattaacttatagagtaatccaagagacattaagagctgctacaatcttatctttcacatttagagaagctgtcgaagatgtcgaatacgaaggatatttgataccaaagggatggaaagtactgccactattcagaaatattcatcacaatgctgatatattttcggatccggggaaattcgatccgtcgagattcgaagttgcgccgaaaccgaatacattcatgccttttggtagtgggattcattcttgtccaggcaatgagttagctaaacttgaaatctctgttctaatccatcatctcaccactaagtacagatggtcaatcgtagggcctagcgatggaattcagtatgggccgttcgctcttcctcagaatggattgcctattgccttggaacgaaaaccatagatgaattacgagaataccatttacctttcttaaattagaaagtgaggaattttttttcttatttaagaggaaaatctaattcttttttataatagaaatgaaaagaaagtagaagaaaaaaatcccaagtgggaccccccaagtgtatataagttttagtttataaaatgtagagaattaaattttcggagaaaaaagagaattag

SEQ ID NO: 83521 - protein, 463 aa, Arabidopsis thaliana
  peptide (1)..(463): Ceres Seq. ID no. 12670682
  misc_feature (37)..(459): Pfam Name: Cytochrome P450 Pfam Description: Cytochrome P450
  misc_feature (1)..(463): Homolog of NCBI NO: 30694740 NR Description: cytochrome P450 family [Arabidopsis thaliana] cytochrome P450 [Arabidopsis thaliana] AT5g45340/K9E15_12 [Arabidopsis thaliana]
  misc_feature (1)..(433): Homolog of NCBI NO: 30694744 NR Description: cytochrome P450 family [Arabidopsis thaliana]
  misc_feature (1)..(463): Homolog of NCBI NO: 18415271 NR Description: cytochrome p450 family; protein id: At4g19230.1, by cDNA: gi_15293092, supported by cDNA: gi_20259298 [Arabidopsis >gi|15293093|gb|AAK93657.1| putative cytochrome P450 cytochrome
  misc_feature (1)..(433): Homolog of NCBI NO: 7430728 NR Description: cytochrome P450 - Arabidopsis thaliana cytochrome P450 [Arabidopsis thaliana]
  misc_feature (33)..(457): Homolog of NCBI NO: 15227033 NR Description: taxane 13-alpha-hydroxylase(cytochrome p450 putative; protein id: At2g29090.1 [Arabidopsis thaliana]
  misc_feature (7)..(461): Homolog of NCBI NO: 18402179 NR Description: cytochrome P450, putative; protein id: supported by cDNA: 126144. [Arabidopsis thaliana]
  misc_feature (7)..(434): Homolog of NCBI NO: 9294629 NR Description: cytochrome P450 [Arabidopsis thaliana]
  misc_feature (1)..(462): Homolog of NCBI NO: 15239203 NR Description: cytochrome p450, putative; protein id: supported by cDNA: 36334., supported by cDNA: gi_14596098, by cDNA: gi_15450716, supported by cDNA: gi_17380617, supported
  misc_feature (6)..(459): Homolog of NCBI NO: 30350220 NR Description: taxane 14b-hydroxylase [Taxus cuspidata]
  misc_feature (31)..(460): Homolog of NCBI NO: 27127269 NR Description: cytochrome P450 [Oryza sativa (japonica
MDFSGLFLTLSAAALFLCLLRFIAGVRRSSSTKLPLPPGTMGYPYVGETFQLYSQDPNVFFAAKQRRYGSVFKTHVLGCPCVMISSPEAAKFVLVTKSHLFKPTFPASKERMLGKQAIFFHQGDYHSKLRKLVLRAFMPDAIRNMVPHIESIAQESLNSWDGTQLNTYQEMKTYTFNVALISILGKDEVYYREDLKRCYYILEKGYNSMPINLPGTLFHKAMKARKELAQILANILSKRRQNPSSHTDLLGSFMEDKAGLTDEQIADNIIGVIFAARDTTASVLTWILKYLADNPTVLEAVTEEQMAIRKDKKEGESLTWEDTKKMPLTYRVIQETLRAATILSFTFREAVEDVEYEGYLIPKGWKVLPLFRNIHHNADIFSDPGKFDPSRFEVAPKPNTFMPFGSGIHSCPGNELAKLEISVLIHHLTTKYRWSIVGPSDGIQYGPFALPQNGLPIALERKP

SEQ ID NO: 83522 - protein, 423 aa, Arabidopsis thaliana
  peptide (1)..(423): Ceres Seq. ID no. 12670683
  misc_feature (1)..(419): Pfam Name: Cytochrome P450 Pfam Description: Cytochrome P450
  misc_feature (1)..(423): Homolog of NCBI NO: 30694740 NR Description: cytochrome P450 family [Arabidopsis thaliana] cytochrome P450 [Arabidopsis thaliana] AT5g45340/K9E15_12 [Arabidopsis thaliana]
  misc_feature (1)..(393): Homolog of NCBI NO: 30694744 NR Description: cytochrome P450 family [Arabidopsis thaliana]
  misc_feature (1)..(423): Homolog of NCBI NO: 18415271 NR Description: cytochrome p450 family; protein id: At4g19230.1, by cDNA: gi_15293092, supported by cDNA: gi_20259298 [Arabidopsis >gi|15293093|gb|AAK93657.1| putative cytochrome P450 cytochrome
  misc_feature (1)..(393): Homolog of NCBI NO: 7430728 NR Description: cytochrome P450 - Arabidopsis thaliana cytochrome P450 [Arabidopsis thaliana]
  misc_feature (1)..(417): Homolog of NCBI NO: 15227033 NR Description: taxane 13-alpha-hydroxylase(cytochrome p450 putative; protein id: At2g29090.1 [Arabidopsis thaliana]
  misc_feature (1)..(421): Homolog of NCBI NO: 18402179 NR Description: cytochrome P450, putative; protein id: supported by cDNA: 126144. [Arabidopsis thaliana]
  misc_feature (1)..(394): Homolog of NCBI NO: 9294629 NR Description: cytochrome P450 [Arabidopsis thaliana]
  misc_feature (1)..(422): Homolog of NCBI NO: 15239203 NR Description: cytochrome p450, putative; protein id: supported by cDNA: 36334., supported by cDNA: gi_14596098, by cDNA: gi_15450716, supported by cDNA: gi_17380617, supported
  misc_feature (1)..(419): Homolog of NCBI NO: 30350220 NR Description: taxane 14b-hydroxylase [Taxus cuspidata]
  misc_feature (1)..(420): Homolog of NCBI NO: 27127269 NR Description: cytochrome P450 [Oryza sativa (japonica
MGYPYVGETFQLYSQDPNVFFAAKQRRYGSVFKTHVLGCPCVMISSPEAAKFVLVTKSHLFKPTFPASKERMLGKQAIFFHQGDYHSKLRKLVLRAFMPDAIRNMVPHIESIAQESLNSWDGTQLNTYQEMKTYTFNVALISILGKDEVYYREDLKRCYYILEKGYNSMPINLPGTLFHKAMKARKELAQILANILSKRRQNPSSHTDLLGSFMEDKAGLTDEQIADNIIGVIFAARDTTASVLTWILKYLADNPTVLEAVTEEQMAIRKDKKEGESLTWEDTKKMPLTYRVIQETLRAATILSFTFREAVEDVEYEGYLIPKGWKVLPLFRNIHHNADIFSDPGKFDPSRFEVAPKPNTFMPFGSGIHSCPGNELAKLEISVLIHHLTTKYRWSIVGPSDGIQYGPFALPQNGLPIALERKP

SEQ ID NO: 83523 - protein, 381 aa, Arabidopsis thaliana
  peptide (1)..(381): Ceres Seq. ID no. 12670684
  misc_feature (1)..(377): Pfam Name: Cytochrome P450 Pfam Description: Cytochrome P450
  misc_feature (1)..(381): Homolog of NCBI NO: 30694740 NR Description: cytochrome P450 family [Arabidopsis thaliana] cytochrome P450 [Arabidopsis thaliana] AT5g45340/K9E15_12 [Arabidopsis thaliana]
  misc_feature (1)..(351): Homolog of NCBI NO: 30694744 NR Description: cytochrome P450 family [Arabidopsis thaliana]
  misc_feature (1)..(381): Homolog of NCBI NO: 18415271 NR Description: cytochrome p450 family; protein id: At4g19230.1, by cDNA: gi_15293092, supported by cDNA: gi_20259298 [Arabidopsis >gi|15293093|gb|AAK93657.1| putative cytochrome P450 cytochrome
  misc_feature (1)..(351): Homolog of NCBI NO: 7430728 NR Description: cytochrome P450 - Arabidopsis thaliana cytochrome P450 [Arabidopsis thaliana]
  misc_feature (1)..(375): Homolog of NCBI NO: 15227033 NR Description: taxane 13-alpha-hydroxylase(cytochrome p450 putative; protein id: At2g29090.1 [Arabidopsis thaliana]
  misc_feature (1)..(379): Homolog of NCBI NO: 18402179 NR Description: cytochrome P450, putative; protein id: supported by cDNA: 126144. [Arabidopsis thaliana]
  misc_feature (1)..(352): Homolog of NCBI NO: 9294629 NR Description: cytochrome P450 [Arabidopsis thaliana]
  misc_feature (1)..(380): Homolog of NCBI NO: 15239203 NR Description: cytochrome p450, putative; protein id: supported by cDNA: 36334., supported by cDNA: gi_14596098, by cDNA: gi_15450716, supported by cDNA: gi_17380617, supported
  misc_feature (1)..(377): Homolog of NCBI NO: 30350220 NR Description: taxane 14b-hydroxylase [Taxus cuspidata]
  misc_feature (1)..(378): Homolog of NCBI NO: 27127269 NR Description: cytochrome P450 [Oryza sativa (japonica
MISSPEAAKFVLVTKSHLFKPTFPASKERMLGKQAIFFHQGDYHSKLRKLVLRAFMPDAIRNMVPHIESIAQESLNSWDGTQLNTYQEMKTYTFNVALISILGKDEVYYREDLKRCYYILEKGYNSMPINLPGTLFHKAMKARKELAQILANILSKRRQNPSSHTDLLGSFMEDKAGLTDEQIADNIIGVIFAARDTTASVLTWILKYLADNPTVLEAVTEEQMAIRKDKKEGESLTWEDTKKMPLTYRVIQETLRAATILSFTFREAVEDVEYEGYLIPKGWKVLPLFRNIHHNADIFSDPGKFDPSRFEVAPKPNTFMPFGSGIHSCPGNELAKLEISVLIHHLTTKYRWSIVGPSDGIQYGPFALPQNGLPIALERKP

SEQ ID NO: 83524 - DNA, 2562 bp, Arabidopsis thaliana
  misc_feature (1)..(2562): Ceres Seq. ID no. 12670685
  misc_feature: MA Experiment ID: 20000180 Result: Down-regulated in Transcription
  misc_feature: MA Experiment 20000180 PARAMETER Experiment Name: At_Germinating_Seeds_P Parameter: Age (hr) Value: 24 vs. 0
  misc_feature: MA Experiment 20000180 PARAMETER Experiment Name: At_Germinating_Seeds_P Parameter: Tissue Value: Germinating Seeds
atggcggtgagtttgacggagggagtggtaatgaagatgttgaacggagaagtgacgagcgagacagatatgatgccagtgctacaagtaacggaattgaagctgattcagagcaagcttcatcaaaatcaggaatctagcaatcgatataagtttttattatcagatgggactgacttggcagcaggaatgcttaatacttcattgaacagtttagtgaatcaaggaactattcaattgggttcggttataagactcactcactacatctgcaatctcatccagactcgaaggattgttgttattatgcaattggaggttattgtggagaaatgtaatataattggaaatcctaaagaacctgggcatagctcgattaatccacaacgtggtggagttaacacacaaagcaatggtggttctgagcagcaacaagctagaaggagtgatgtgaatggtgggagatacggtgtatcggctaattcgcctcaacctcaagttgttcataacagttccgacgctggaagatactgtgtatcggctaattcacctcagcctcaagttgttcatagcagttccgacgctggaagatatggtgtatcggctaattcacctcagcgtcaagttgttcataacagtcccgacgctgggagatatggacagcctcaagttagtcaaagatatggtactggttctggttatccggaaacatcaccttccactagaccgtatgtgagctcaaatgcaggttatggaggctctaggcaggaccaacctcgggctcctactgcaacaactgcttattcccgtccggttcagtcagcttatcagccacaacaaccaccgatgtatgttaacaggggacctgtggctaggaacgaagctcctccgaggataaatccgattgctgctcttaatccttaccagggtcggtggaccatcaaggttagggtcacgagtaaggcagacctgaggcggtttaataatccgcgtggggaagggaagttgttcagttttgatcttcttgatgctgatggtggagaaatacgggtgacttgttttaatgatgcggttgatcaattctttgacaagattgtagttggtaatgtttatctgatttcaaggggaaatttgaagcctgctcagaagaactttaatcatcttccgaatgattatgaaatacatttggactctgcatcaacgatacagccttgtgaagatgatggtaccattccacgctatcatttccattttcgtaacataggtgatattgaaaacatggagaacaacagcaccactgatgtaattggtattgtttcgtccatcagtccgacagtagcaattatgcggaaaaacttaactgaggtacagaaaaggtctcttcagttgaaggatatgtcaggccgaagtgttgaggtaaccatgtggggtaatttctgcaacgcagaaggacagaaattgcaaaatctttgtgattctggggtattcccggttcttgctttgaaagcgggcaggatcggtgaattcaacgggaagcaagtgagcacaattggagcaagtcaattctttatagagccagatttccctgaagccagagaattaaggcaatggtatgagagagaaggaaggaatgctcattttacctccatatctagagagttttccggtgttggcagacaagaagttcgcaaggtaattgcacagatcaaggacgagaagctagggacctcagagaagccggactggatcacagtctgtgccaccatttcattcatgaaggttgaaaatttctgctatacggcttgtcctatcatgaatggagatcgtccatgcagcaaaaaggtcacaaataacggagatgggacatggcgttgtgagaagtgtgacaaatgcgtggatgaatgtgactacaggtatatattacagatccagttacaggaccatacagacctaacctgggcaactgcattccaagaagctggtgaagagataatgggaatgtctgcaaaagatttgtattatgtgaagtatgaaaatcaggatgaggagaaatttgaagatatcatccgcagtgtcgcttttactaagtacattttcaagctgaagattaaagaagaaacttacagcgatgagcagcgggttaaagcaacagttgtgaaagctgaaaagctgaattattcttcaaataccaggttcatgctagaggcaatagataaactcaagataggagatgcaaattctctccctataaaggcagagagttccaattacaggtctgatgcatttaattccggtgttggaacctcaggaactagagacaccgcatcagtcgatgcacgcagagaatttggattacctgcagcaaaccaagtgggtcaatatggaaatcagtacagtagtgatgcaaggtctcttggcggttttactagctgcaacgtgtgtcgcagcaacagccatgtttctgcaaactgcccaacccttatgagtgagccacaaggacaatacatgggtggcacaaatgcaggaggaggtatgccaaggcaacatgtaggcagctactga

SEQ ID NO: 83525 - protein, 853 aa, Arabidopsis thaliana
  peptide (1)..(853): Ceres Seq. ID no. 12670686
  misc_feature (4)..(110): Pfam Name: Replication factor-A protein 1, N-terminal domain Pfam Description: Replication factor-A protein 1, N-terminal
  misc_feature (295)..(853): Homolog of NCBI NO: 7488291 NR Description: replication protein A1 homolog T18B16.100 -
  misc_feature (1)..(167): Homolog of NCBI NO: 7488291 NR Description: replication protein A1 homolog T18B16.100 -
  misc_feature (396)..(853): Homolog of NCBI NO: 18415246 NR Description: replication A protein-like; protein id:
  misc_feature (229)..(737): Homolog of NCBI NO: 15225129 NR Description: putative replication protein A1; protein id: [Arabidopsis thaliana] >gi|25294331|pir||B84478 probable
  misc_feature (1)..(130): Homolog of NCBI NO: 15225129 NR Description: putative replication protein A1; protein id: [Arabidopsis thaliana] >gi|25294331|pir||B84478 probable
  misc_feature (220)..(739): Homolog of NCBI NO: 13536993 NR Description: replication protein A 70kDa [Oryza sativa
  misc_feature (18)..(198): Homolog of NCBI NO: 13536993 NR Description: replication protein A 70kDa [Oryza sativa
  misc_feature (263)..(738): Homolog of NCBI NO: 19111884 NR Description: replication factor-a protein 1
  misc_feature (1)..(167): Homolog of NCBI NO: 19111884 NR Description: replication factor-a protein 1
  misc_feature (254)..(742): Homolog of NCBI NO: 40742813 NR Description: hypothetical protein AN7423.2 [Aspergillus
MAVSLTEGVVMKMLNGEVTSETDMMPVLQVTELKLIQSKLHQNQESSNRYKFLLSDGTDLAAGMLNTSLNSLVNQGTIQLGSVIRLTHYICNLIQTRRIVVIMQLEVIVEKCNIIGNPKEPGHSSINPQRGGVNTQSNGGSEQQQARRSDVNGGRYGVSANSPQPQVVHNSSDAGRYCVSANSPQPQVVHSSSDAGRYGVSANSPQRQVVHNSPDAGRYGQPQVSQRYGTGSGYPETSPSTRPYVSSNAGYGGSRQDQPRAPTATTAYSRPVQSAYQPQQPPMYVNRGPVARNEAPPRINPIAALNPYQGRWTIKVRVTSKADLRRFNNPRGEGKLFSFDLLDADGGEIRVTCFNDAVDQFFDKIVVGNVYLISRGNLKPAQKNFNHLPNDYEIHLDSASTIQPCEDDGTIPRYHFHFRNIGDIENMENNSTTDVIGIVSSISPTVAIMRKNLTEVQKRSLQLKDMSGRSVEVTMWGNFCNAEGQKLQNLCDSGVFPVLALKAGRIGEFNGKQVSTIGASQFFIEPDFPEARELRQWYEREGRNAHFTSISREFSGVGRQEVRKVIAQIKDEKLGTSEKPDWITVCATISFMKVENFCYTACPIMNGDRPCSKKVTNNGDGTWRCEKCDKCVDECDYRYILQIQLQDHTDLTWATAFQEAGEEIMGMSAKDLYYVKYENQDEEKFEDIIRSVAFTKYIFKLKIKEETYSDEQRVKATVVKAEKLNYSSNTRFMLEAIDKLKIGDANSLPIKAESSNYRSDAFNSGVGTSGTRDTASVDARREFGLPAANQVGQYGNQYSSDARSLGGFTSCNVCRSNSHVSANCPTLMSEPQGQYMGGTNAGGGMPRQHVGSY

SEQ ID NO: 83526 - protein, 843 aa, Arabidopsis thaliana
  peptide (1)..(843): Ceres Seq. ID no. 12670687
  misc_feature (1)..(100): Pfam Name: Replication factor-A protein 1, N-terminal domain Pfam Description: Replication factor-A protein 1, N-terminal
  misc_feature (285)..(843): Homolog of NCBI NO: 7488291 NR Description: replication protein A1 homolog T18B16.100 -
  misc_feature (1)..(157): Homolog of NCBI NO: 7488291 NR Description: replication protein A1 homolog T18B16.100 -
  misc_feature (386)..(843): Homolog of NCBI NO: 18415246 NR Description: replication A protein-like; protein id:
  misc_feature (219)..(727): Homolog of NCBI NO: 15225129 NR Description: putative replication protein A1; protein id: [Arabidopsis thaliana] >gi|25294331|pir||B84478 probable
  misc_feature (1)..(120): Homolog of NCBI NO: 15225129 NR Description: putative replication protein A1; protein id: [Arabidopsis thaliana] >gi|25294331|pir||B84478 probable
  misc_feature (210)..(729): Homolog of NCBI NO: 13536993 NR Description: replication protein A 70kDa [Oryza sativa
  misc_feature (8)..(188): Homolog of NCBI NO: 13536993 NR Description: replication protein A 70kDa [Oryza sativa
  misc_feature (253)..(728): Homolog of NCBI NO: 19111884 NR Description: replication factor-a protein 1
  misc_feature (1)..(157): Homolog of NCBI NO: 19111884 NR Description: replication factor-a protein 1
  misc_feature (244)..(732): Homolog of NCBI NO: 40742813 NR Description: hypothetical protein AN7423.2 [Aspergillus
MKMLNGEVTSETDMMPVLQVTELKLIQSKLHQNQESSNRYKFLLSDGTDLAAGMLNTSLNSLVNQGTIQLGSVIRLTHYICNLIQTRRIVVIMQLEVIVEKCNIIGNPKEPGHSSINPQRGGVNTQSNGGSEQQQARRSDVNGGRYGVSANSPQPQVVHNSSDAGRYCVSANSPQPQVVHSSSDAGRYGVSANSPQRQVVHNSPDAGRYGQPQVSQRYGTGSGYPETSPSTRPYVSSNAGYGGSRQDQPRAPTATTAYSRPVQSAYQPQQPPMYVNRGPVARNEAPPRINPIAALNPYQGRWTIKVRVTSKADLRRFNNPRGEGKLFSFDLLDADGGEIRVTCFNDAVDQFFDKIVVGNVYLISRGNLKPAQKNFNHLPNDYEIHLDSASTIQPCEDDGTIPRYHFHFRNIGDIENMENNSTTDVIGIVSSISPTVAIMRKNLTEVQKRSLQLKDMSGRSVEVTMWGNFCNAEGQKLQNLCDSGVFPVLALKAGRIGEFNGKQVSTIGASQFFIEPDFPEARELRQWYEREGRNAHFTSISREFSGVGRQEVRKVIAQIKDEKLGTSEKPDWITVCATISFMKVENFCYTACPIMNGDRPCSKKVTNNGDGTWRCEKCDKCVDECDYRYILQIQLQDHTDLTWATAFQEAGEEIMGMSAKDLYYVKYENQDEEKFEDIIRSVAFTKYIFKLKIKEETYSDEQRVKATVVKAEKLNYSSNTRFMLEAIDKLKIGDANSLPIKAESSNYRSDAFNSGVGTSGTRDTASVDARREFGLPAANQVGQYGNQYSSDARSLGGFTSCNVCRSNSHVSANCPTLMSEPQGQYMGGTNAGGGMPRQHVGSY

SEQ ID NO: 83527 - protein, 841 aa, Arabidopsis thaliana
  peptide (1)..(841): Ceres Seq. ID no. 12670688
  misc_feature (1)..(98): Pfam Name: Replication factor-A protein 1, N-terminal domain Pfam Description: Replication factor-A protein 1, N-terminal
  misc_feature (283)..(841): Homolog of NCBI NO: 7488291 NR Description: replication protein A1 homolog T18B16.100 -
  misc_feature (1)..(155): Homolog of NCBI NO: 7488291 NR Description: replication protein A1 homolog T18B16.100 -
  misc_feature (384)..(841): Homolog of NCBI NO: 18415246 NR Description: replication A protein-like; protein id:
  misc_feature (217)..(725): Homolog of NCBI NO: 15225129 NR Description: putative replication protein A1; protein id: [Arabidopsis thaliana] >gi|25294331|pir||B84478 probable
  misc_feature (1)..(118): Homolog of NCBI NO: 15225129 NR Description: putative replication protein A1; protein id: [Arabidopsis thaliana] >gi|25294331|pir||B84478 probable
  misc_feature (208)..(727): Homolog of NCBI NO: 13536993 NR Description: replication protein A 70kDa [Oryza sativa
  misc_feature (6)..(186): Homolog of NCBI NO: 13536993 NR Description: replication protein A 70kDa [Oryza sativa
  misc_feature (251)..(726): Homolog of NCBI NO: 19111884 NR Description: replication factor-a protein 1
  misc_feature (1)..(155): Homolog of NCBI NO: 19111884 NR Description: replication factor-a protein 1
  misc_feature (242)..(730): Homolog of NCBI NO: 40742813 NR Description: hypothetical protein AN7423.2 [Aspergillus
MLNGEVTSETDMMPVLQVTELKLIQSKLHQNQESSNRYKFLLSDGTDLAAGMLNTSLNSLVNQGTIQLGSVIRLTHYICNLIQTRRIVVIMQLEVIVEKCNIIGNPKEPGHSSINPQRGGVNTQSNGGSEQQQARRSDVNGGRYGVSANSPQPQVVHNSSDAGRYCVSANSPQPQVVHSSSDAGRYGVSANSPQRQVVHNSPDAGRYGQPQVSQRYGTGSGYPETSPSTRPYVSSNAGYGGSRQDQPRAPTATTAYSRPVQSAYQPQQPPMYVNRGPVARNEAPPRINPIAALNPYQGRWTIKVRVTSKADLRRFNNPRGEGKLFSFDLLDADGGEIRVTCFNDAVDQFFDKIVVGNVYLISRGNLKPAQKNFNHLPNDYEIHLDSASTIQPCEDDGTIPRYHFHFRNIGDIENMENNSTTDVIGIVSSISPTVAIMRKNLTEVQKRSLQLKDMSGRSVEVTMWGNFCNAEGQKLQNLCDSGVFPVLALKAGRIGEFNGKQVSTIGASQFFIEPDFPEARELRQWYEREGRNAHFTSISREFSGVGRQEVRKVIAQIKDEKLGTSEKPDWITVCATISFMKVENFCYTACPIMNGDRPCSKKVTNNGDGTWRCEKCDKCVDECDYRYILQIQLQDHTDLTWATAFQEAGEEIMGMSAKDLYYVKYENQDEEKFEDIIRSVAFTKYIFKLKIKEETYSDEQRVKATVVKAEKLNYSSNTRFMLEAIDKLKIGDANSLPIKAESSNYRSDAFNSGVGTSGTRDTASVDARREFGLPAANQVGQYGNQYSSDARSLGGFTSCNVCRSNSHVSANCPTLMSEPQGQYMGGTNAGGGMPRQHVGSY

SEQ ID NO: 83528 - DNA, 1320 bp, Arabidopsis thaliana
  misc_feature (1)..(1320): Ceres Seq. ID no. 12670701
  misc_feature: MA Experiment ID: 20000315 Result: Up-regulated in Transcription
  misc_feature: MA Experiment 20000315 PARAMETER Experiment Name: At_14day_Shoots-Roots_Sub_P Parameter: Age (day) Value: 14
  misc_feature: MA Experiment 20000315 PARAMETER Experiment Name: At_14day_Shoots-Roots_Sub_P Parameter: Organism Value: A. thaliana
  misc_feature: MA Experiment 20000315 PARAMETER Experiment Name: At_14day_Shoots-Roots_Sub_P Parameter: Plant Line Value: WS
  misc_feature: MA Experiment 20000315 PARAMETER Experiment Name: At_14day_Shoots-Roots_Sub_P Parameter: Tissue Value: Shoots vs. Whole Plant
  misc_feature: MA Experiment ID: 20000327 Result: Down-regulated in Transcription
  misc_feature: MA Experiment 20000327 PARAMETER Experiment Name: At_42deg_Heat_Sub_P Parameter: Age (day) Value: 14
  misc_feature: MA Experiment 20000327 PARAMETER Experiment Name: At_42deg_Heat_Sub_P Parameter: Organism Value: A. thaliana
  misc_feature: MA Experiment 20000327 PARAMETER Experiment Name: At_42deg_Heat_Sub_P Parameter: Plant Line Value: WS
  misc_feature: MA Experiment 20000327 PARAMETER Experiment Name: At_42deg_Heat_Sub_P Parameter: Temperature (deg C) Value: 42 vs. 22
  misc_feature: MA Experiment 20000327 PARAMETER Experiment Name: At_42deg_Heat_Sub_P Parameter: Timepoint (hr) Value: 1
  misc_feature: MA Experiment 20000327 PARAMETER Experiment Name: At_42deg_Heat_Sub_P Parameter: Tissue Value: Aerial
  misc_feature: MA Experiment ID: 20000328 Result: Down-regulated in Transcription
  misc_feature: MA Experiment 20000328 PARAMETER Experiment Name: At_42deg_Heat_Sub_P Parameter: Age (day) Value: 14
  misc_feature: MA Experiment 20000328 PARAMETER Experiment Name: At_42deg_Heat_Sub_P Parameter: Organism Value: A. thaliana
  misc_feature: MA Experiment 20000328 PARAMETER Experiment Name: At_42deg_Heat_Sub_P Parameter: Plant Line Value: WS
  misc_feature: MA Experiment 20000328 PARAMETER Experiment Name: At_42deg_Heat_Sub_P Parameter: Temperature (deg C) Value: 42 vs. 22
  misc_feature: MA Experiment 20000328 PARAMETER Experiment Name: At_42deg_Heat_Sub_P Parameter: Timepoint (hr) Value: 6
  misc_feature: MA Experiment 20000328 PARAMETER Experiment Name: At_42deg_Heat_Sub_P Parameter: Tissue Value: Aerial
  misc_feature: MA Experiment ID: 20000329 Result: Up-regulated in Transcription
  misc_feature: MA Experiment 20000329 PARAMETER Experiment Name: At_4deg_Cold_Sub_P Parameter: Age (day) Value: 14
  misc_feature: MA Experiment 20000329 PARAMETER Experiment Name: At_4deg_Cold_Sub_P Parameter: Organism Value: A. thaliana
  misc_feature: MA Experiment 20000329 PARAMETER Experiment Name: At_4deg_Cold_Sub_P Parameter: Plant Line Value: WS
  misc_feature: MA Experiment 20000329 PARAMETER Experiment Name: At_4deg_Cold_Sub_P Parameter: Temperature (deg C) Value: 4 vs. 22
  misc_feature: MA Experiment 20000329 PARAMETER Experiment Name: At_4deg_Cold_Sub_P Parameter: Timepoint (hr) Value: 6
  misc_feature: MA Experiment 20000329 PARAMETER Experiment Name: At_4deg_Cold_Sub_P Parameter: Tissue Value: Aerial
  misc_feature: MA Experiment ID: 20000346 Result: Down-regulated in Transcription
  misc_feature: MA Experiment 20000346 PARAMETER Experiment Name: At_2mM_SA_Sub_P Parameter: Age (day) Value: 14
  misc_feature: MA Experiment 20000346 PARAMETER Experiment Name: At_2mM_SA_Sub_P Parameter: Organism Value: A. thaliana
  misc_feature: MA Experiment 20000346 PARAMETER Experiment Name: At_2mM_SA_Sub_P Parameter: Plant Line Value: WS
  misc_feature: MA Experiment 20000346 PARAMETER Experiment Name: At_2mM_SA_Sub_P Parameter: Timepoint (hr) Value: 1
  misc_feature: MA Experiment 20000346 PARAMETER Experiment Name: At_2mM_SA_Sub_P Parameter: Tissue Value: Aerial
  misc_feature: MA Experiment 20000346 PARAMETER Experiment Name: At_2mM_SA_Sub_P Parameter: Treatment Value: 2mM SA vs. No Treatment
  misc_feature: MA Experiment ID: 20000352 Result: Down-regulated in Transcription
  misc_feature: MA Experiment 20000352 PARAMETER Experiment Name: At_Drought_Sub_P Parameter: Age (day) Value: 7
  misc_feature: MA Experiment 20000352 PARAMETER Experiment Name: At_Drought_Sub_P Parameter: Organism Value: A. thaliana
  misc_feature: MA Experiment 20000352 PARAMETER Experiment Name: At_Drought_Sub_P Parameter: Plant Line Value: WS
  misc_feature: MA Experiment 20000352 PARAMETER Experiment Name: At_Drought_Sub_P Parameter: Timepoint (hr) Value: 6
  misc_feature: MA Experiment 20000352 PARAMETER Experiment Name: At_Drought_Sub_P Parameter: Tissue Value: Whole Plant
  misc_feature: MA Experiment 20000352 PARAMETER Experiment Name: At_Drought_Sub_P Parameter: Treatment Value: Drought vs. No Drought
atggataaaaacggcatagttttgatgcgaaaatatgaattaggtcgtcttctaggtcaaggcacattcgcaaaagtgtaccacgcacgcaacataaaaacaggagaaagcgtagcgatcaaggtgatcgacaaacagaaagttgcgaaagtcggattaatcgatcaaatcaaacgagaaatatcagtgatgcgtctcgttcgtcacccccacgtcgtcttcctccatgaagtaatggcgagcaagacaaagatctatttcgctatggaatacgttaaaggcggtgagctttttgataaagtctctaaaggaaagcttaaagaaaacattgctcgaaaatatttccagcaattgatcggagcaatcgattattgccatagccgcggagtttaccaccgcgatctcaaaccggagaatcttcttctagacgaaaacggcgatttgaaaatatcggattttggccttagcgcgttgagggagtcgaagcagcaagatggcttgcttcacacgacatgtggaacacctgcttacgtggcacctgaagtgataggcaagaaaggttatgatggagctaaagccgatgtttggtcttgcggggttgtgttgtacgtgctattggctggatttcttccgtttcacgagcaaaatcttgtggaaatgtatcggaaaatcacgaaaggcgaattcaaatgtccgaattggtttcctcccgaggtcaagaagttgttgtctcggattcttgaccctaaccctaattcaagaatcaagattgaaaaaatcatggagaattcctggtttcaaaagggtttcaagaagatcgaaacgcctaaatctcccgaaagtcatcagatcgactcactgatcagcgatgtccacgcagctttttccgtaaaaccgatgtcttacaacgcgtttgacttgatctcttcgctgtctcaaggattcgatctctcgggtttgtttgagaaagaagagagatcagaatcgaagtttacaacgaagaaagatgcaaaagagatagtgtcgaaattcgaggagatagcaacaagtagtgagagattcaatttgacgaagagcgatgtaggagtgaagatggaagataagagagaaggaagaaaaggacatcttgcgattgatgttgagatatttgaagtgacaaatagttttcatatggttgagtttaagaaaagtggaggtgatacaatggagtataagcaattttgtgatcgtgagcttaggccttctttgaaagatattgtttggaaatggcaaggaaacaacaacaatagcaacaatgagaagattgaagtgatacattaa

SEQ ID NO: 83529 - protein, 439 aa, Arabidopsis thaliana
  peptide (1)..(439): Ceres Seq. ID no. 12670702
  misc_feature (12)..(266): Pfam Name: Protein kinase domain Pfam Description: Protein kinase domain
  misc_feature (1)..(439): Homolog of NCBI NO: 15242509 NR Description: serine threonine protein kinase; protein id: supported by cDNA: gi_14486383 [Arabidopsis thaliana]
  misc_feature (1)..(435): Homolog of NCBI NO: 23428550 NR Description: Serine/threonine Kinase [Persea americana]
  misc_feature (1)..(287): Homolog of NCBI NO: 18424099 NR Description: serine/threonine protein kinase; protein id: supported by cDNA: gi_13249118, supported by cDNA: gi_13448028, by cDNA: gi_20453091 [Arabidopsis thaliana]
  misc_feature (298)..(434): Homolog of NCBI NO: 18424099 NR Description: serine/threonine protein kinase; protein id: supported by cDNA: gi_13249118, supported by cDNA: gi_13448028, by cDNA: gi_20453091 [Arabidopsis thaliana]
  misc_feature (1)..(434): Homolog of NCBI NO: 8777339 NR Description: serine/threonine protein kinase [Arabidopsis
  misc_feature (7)..(421): Homolog of NCBI NO: 17224924 NR Description: CBL-interacting protein kinase [Brassica napus]
  misc_feature (7)..(421): Homolog of NCBI NO: 15235768 NR Description: (NM_119244) putative protein kinase; protein id: supported by cDNA: gi_13448032, supported by cDNA: gi_14334745, by cDNA: gi_15293234, supported by cDNA: gi_16930694, supported
MDKNGIVLMRKYELGRLLGQGTFAKVYHARNIKTGESVAIKVIDKQKVAKVGLIDQIKREISVMRLVRHPHVVFLHEVMASKTKIYFAMEYVKGGELFDKVSKGKLKENIARKYFQQLIGAIDYCHSRGVYHRDLKPENLLLDENGDLKISDFGLSALRESKQQDGLLHTTCGTPAYVAPEVIGKKGYDGAKADVWSCGVVLYVLLAGFLPFHEQNLVEMYRKITKGEFKCPNWFPPEVKKLLSRILDPNPNSRIKIEKIMENSWFQKGFKKIETPKSPESHQIDSLISDVHAAFSVKPMSYNAFDLISSLSQGFDLSGLFEKEERSESKFTTKKDAKEIVSKFEEIATSSERFNLTKSDVGVKMEDKREGRKGHLAIDVEIFEVTNSFHMVEFKKSGGDTMEYKQFCDRELRPSLKDIVWKWQGNNNNSNNEKIEVIH

SEQ ID NO: 83530 - protein, 431 aa, Arabidopsis thaliana
  peptide (1)..(431): Ceres Seq. ID no. 12670703
  misc_feature (4)..(258): Pfam Name: Protein kinase domain Pfam Description: Protein kinase domain
  misc_feature (1)..(431): Homolog of NCBI NO: 15242509 NR Description: serine threonine protein kinase; protein id: supported by cDNA: gi_14486383 [Arabidopsis thaliana]
  misc_feature (1)..(427): Homolog of NCBI NO: 23428550 NR Description: Serine/threonine Kinase [Persea americana]
  misc_feature (1)..(279): Homolog of NCBI NO: 18424099 NR Description: serine/threonine protein kinase; protein id: supported by cDNA: gi_13249118, supported by cDNA: gi_13448028, by cDNA: gi_20453091 [Arabidopsis thaliana]
  misc_feature (290)..(426): Homolog of NCBI NO: 18424099 NR Description: serine/threonine protein kinase; protein id: supported by cDNA: gi_13249118, supported by cDNA: gi_13448028, by cDNA: gi_20453091 [Arabidopsis thaliana]
  misc_feature (1)..(426): Homolog of NCBI NO: 8777339 NR Description: serine/threonine protein kinase [Arabidopsis
  misc_feature (1)..(413): Homolog of NCBI NO: 17224924 NR Description: CBL-interacting protein kinase [Brassica napus]
  misc_feature (1)..(413): Homolog of NCBI NO: 15235768 NR Description: (NM_119244) putative protein kinase; protein id: supported by cDNA: gi_13448032, supported by cDNA: gi_14334745, by cDNA: gi_15293234, supported by cDNA: gi_16930694, supported
MRKYELGRLLGQGTFAKVYHARNIKTGESVAIKVIDKQKVAKVGLIDQIKREISVMRLVRHPHVVFLHEVMASKTKIYFAMEYVKGGELFDKVSKGKLKENIARKYFQQLIGAIDYCHSRGVYHRDLKPENLLLDENGDLKISDFGLSALRESKQQDGLLHTTCGTPAYVAPEVIGKKGYDGAKADVWSCGVVLYVLLAGFLPFHEQNLVEMYRKITKGEFKCPNWFPPEVKKLLSRILDPNPNSRIKIEKIMENSWFQKGFKKIETPKSPESHQIDSLISDVHAAFSVKPMSYNAFDLISSLSQGFDLSGLFEKEERSESKFTTKKDAKEIVSKFEEIATSSERFNLTKSDVGVKMEDKREGRKGHLAIDVEIFEVTNSFHMVEFKKSGGDTMEYKQFCDRELRPSLKDIVWKWQGNNNNSNNEKIEVIH

SEQ ID NO: 83531 - protein, 376 aa, Arabidopsis thaliana
  peptide (1)..(376): Ceres Seq. ID no. 12670704
  misc_feature (1)..(203): Pfam Name: Protein kinase domain Pfam Description: Protein kinase domain
  misc_feature (1)..(376): Homolog of NCBI NO: 15242509 NR Description: serine threonine protein kinase; protein id: supported by cDNA: gi_14486383 [Arabidopsis thaliana]
  misc_feature (1)..(372): Homolog of NCBI NO: 23428550 NR Description: Serine/threonine Kinase [Persea americana]
  misc_feature (1)..(224): Homolog of NCBI NO: 18424099 NR Description: serine/threonine protein kinase; protein id: supported by cDNA: gi_13249118, supported by cDNA: gi_13448028, by cDNA: gi_20453091 [Arabidopsis thaliana]
  misc_feature (235)..(371): Homolog of NCBI NO: 18424099 NR Description: serine/threonine protein kinase; protein id: supported by cDNA: gi_13249118, supported by cDNA: gi_13448028, by cDNA: gi_20453091 [Arabidopsis thaliana]
  misc_feature (1)..(371): Homolog of NCBI NO: 8777339 NR Description: serine/threonine protein kinase [Arabidopsis
  misc_feature (1)..(358): Homolog of NCBI NO: 17224924 NR Description: CBL-interacting protein kinase [Brassica napus]
  misc_feature (1)..(358): Homolog of NCBI NO: 15235768 NR Description: (NM_119244) putative protein kinase; protein id: supported by cDNA: gi_13448032, supported by cDNA: gi_14334745, by cDNA: gi_15293234, supported by cDNA: gi_16930694, supported
MRLVRHPHVVFLHEVMASKTKIYFAMEYVKGGELFDKVSKGKLKENIARKYFQQLIGAIDYCHSRGVYHRDLKPENLLLDENGDLKISDFGLSALRESKQQDGLLHTTCGTPAYVAPEVIGKKGYDGAKADVWSCGVVLYVLLAGFLPFHEQNLVEMYRKITKGEFKCPNWFPPEVKKLLSRILDPNPNSRIKIEKIMENSWFQKGFKKIETPKSPESHQIDSLISDVHAAFSVKPMSYNAFDLISSLSQGFDLSGLFEKEERSESKFTTKKDAKEIVSKFEEIATSSERFNLTKSDVGVKMEDKREGRKGHLAIDVEIFEVTNSFHMVEFKKSGGDTMEYKQFCDRELRPSLKDIVWKWQGNNNNSNNEKIEVIH

SEQ ID NO: 83532 - DNA, 486 bp, Arabidopsis thaliana
  misc_feature (1)..(486): Ceres Seq. ID no. 12670705
  misc_feature: MA Experiment ID: 20000307 Result: Up-regulated in Transcription
  misc_feature: MA Experiment 20000307 PARAMETER Experiment Name: At_Germinating_Seeds_Sub_P Parameter: Age (hr) Value: 24 vs. 0
  misc_feature: MA Experiment 20000307 PARAMETER Experiment Name: At_Germinating_Seeds_Sub_P Parameter: Organism Value: A. thaliana
  misc_feature: MA Experiment 20000307 PARAMETER Experiment Name: At_Germinating_Seeds_Sub_P Parameter: Plant Line Value: WS
  misc_feature: MA Experiment 20000307 PARAMETER Experiment Name: At_Germinating_Seeds_Sub_P Parameter: Tissue Value: Germinating Seeds
  misc_feature: MA Experiment ID: 20000355 Result: Up-regulated in Transcription
  misc_feature: MA Experiment 20000355 PARAMETER Experiment Name: At_Siliques_Sub_P Parameter: Age (day) Value: 21
  misc_feature: MA Experiment 20000355 PARAMETER Experiment Name: At_Siliques_Sub_P Parameter: Organism Value: A. thaliana
  misc_feature: MA Experiment 20000355 PARAMETER Experiment Name: At_Siliques_Sub_P Parameter: Plant Line Value: WS
  misc_feature: MA Experiment 20000355 PARAMETER Experiment Name: At_Siliques_Sub_P Parameter: Tissue Value: Less Than 5mm Siliques vs. Whole Plant
  misc_feature: MA Experiment ID: 20000440 Result: Up-regulated in Transcription
  misc_feature: MA Experiment 20000440 PARAMETER Experiment Name: At_Closed-Flower__Sub_P Parameter: Tissue Value: Closed Flower vs. Whole Plant
atggaaacttctcaaaaatatcatacgtgcggttccacactagtacaaactatagatgctccactatctctagtttggtcaattctacgtcggtttgataaccctcaagcctacaaacaattcgtgaaaacgtgcaatctaagctccggcgatggaggagaaggctccgtccgtgaagtgacggtggtttccggtcttccagcggagttcagccgagagagattagatgaacttgacgatgagtctcatgtgatgatgattagcattataggtggtgatcatcgtttggttaattaccggtcgaaaacgatggcgtttgtggcggcggatacggaggagaagacggtggtggtggagagttatgtggtggatgtgccggaaggaaatagtgaggaggaaacgacgtcttttgctgatacaatcgttgggtttaatcttaagtcattggctaagctctcggagagggtggctcatctaaagttgtaa

SEQ ID NO: 83533 - protein, 161 aa, Arabidopsis thaliana
  peptide (1)..(161): Ceres Seq. ID no. 12670706
  misc_feature (8)..(151): Pfam Name: Pathogenesis-related protein Bet v I family Pfam Description: Pathogenesis-related protein Bet v I family
  misc_feature (1)..(161): Homolog of NCBI NO: 15242529 NR Description: putative protein; protein id: At5g45860.1 thaliana] >gi|9758933|dbj|BAB09314.1|
  misc_feature (1)..(159): Homolog of NCBI NO: 15242531 NR Description: putative protein; protein id: At5g45870.1 thaliana] >gi|9758934|dbj|BAB09315.1|
  misc_feature (1)..(156): Homolog of NCBI NO: 15233962 NR Description: putative protein; protein id: At4g18620.1
  misc_feature (10)..(157): Homolog of NCBI NO: 18405351 NR Description: expressed protein; protein id: At2g40330.1, by cDNA: 6787. [Arabidopsis thaliana] >gi|20198019|gb|AAD25668.2| protein [Arabidopsis thaliana] >gi|21594278|gb|AAM65989.1|
  misc_feature (10)..(157): Homolog of NCBI NO: 25348262 NR Description: hypothetical protein At2g40330 [imported] - thaliana >gi|4588009|gb|AAD25950.1|AF085279_23 hypothetical
  misc_feature (10)..(157): Homolog of NCBI NO: 34907924 NR Description: B1088C09.9 [Oryza sativa (japonica
  misc_feature (3)..(157): Homolog of NCBI NO: 18404709 NR Description: expressed protein; protein id: At2g38310.1, by cDNA: 32244., supported by cDNA: gi_14517501, supported by gi_15809747 [Arabidopsis thaliana] >gi|7487162|pir||T02514
  misc_feature (10)..(155): Homolog of NCBI NO: 15239114 NR Description: putative protein; protein id: At5g05440.1, by cDNA: 117347., supported by cDNA: gi_15529253, supported by gi_16974394 [Arabidopsis thaliana] >gi|10176756|dbj|BAB09987.1|
  misc_feature (9)..(149): Homolog of NCBI NO: 15225245 NR Description: hypothetical protein; protein id: At2g26040.1
  misc_feature (10)..(154): Homolog of NCBI NO: 9758515 NR Description: gene_id:MZA15.21~pir||T05073~similar to unknown
METSQKYHTCGSTLVQTIDAPLSLVWSILRRFDNPQAYKQFVKTCNLSSGDGGEGSVREVTVVSGLPAEFSRERLDELDDESHVMMISIIGGDHRLVNYRSKTMAFVAADTEEKTVVVESYVVDVPEGNSEEETTSFADTIVGFNLKSLAKLSERVAHLKL

SEQ ID NO: 83534 - DNA, 2380 bp, Arabidopsis thaliana
  misc_feature (1)..(2380): Ceres Seq. ID no. 12670719
  misc_feature: MA Experiment ID: 20000234 Result: Down-regulated in Transcription
  misc_feature: MA Experiment 20000234 PARAMETER Experiment Name: At_Siliques_P Parameter: Age (day) Value: 21
  misc_feature: MA Experiment 20000234 PARAMETER Experiment Name: At_Siliques_P Parameter: Organism Value: A. thaliana
  misc_feature: MA Experiment 20000234 PARAMETER Experiment Name: At_Siliques_P Parameter: Plant Line Value: WS
  misc_feature: MA Experiment 20000234 PARAMETER Experiment Name: At_Siliques_P Parameter: Tissue Value: Less Than 5mm Siliques vs. Whole Plant
  misc_feature: MA Experiment ID: 20000235 Result: Down-regulated in Transcription
  misc_feature: MA Experiment 20000235 PARAMETER Experiment Name: At_Siliques_P Parameter: Age (day) Value: 21
  misc_feature: MA Experiment 20000235 PARAMETER Experiment Name: At_Siliques_P Parameter: Organism Value: A. thaliana
  misc_feature: MA Experiment 20000235 PARAMETER Experiment Name: At_Siliques_P Parameter: Plant Line Value: WS
  misc_feature: MA Experiment 20000235 PARAMETER Experiment Name: At_Siliques_P Parameter: Tissue Value: 5-10mm Siliques vs. Whole Plant
  misc_feature: MA Experiment ID: 20000264 Result: Down-regulated in Transcription
  misc_feature: MA Experiment 20000264 PARAMETER Experiment Name: At_Open_Flower_P Parameter: Age (day) Value: 21
  misc_feature: MA Experiment 20000264 PARAMETER Experiment Name: At_Open_Flower_P Parameter: Plant Line Value: WS
  misc_feature: MA Experiment 20000264 PARAMETER Experiment Name: At_Open_Flower_P Parameter: Tissue Value: Open Flower vs. Whole Plant
  misc_feature: MA Experiment ID: 20000265 Result: Down-regulated in Transcription
  misc_feature: MA Experiment 20000265 PARAMETER Experiment Name: At_Open_Flower_P Parameter: Age (day) Value: 21
  misc_feature: MA Experiment 20000265 PARAMETER Experiment Name: At_Open_Flower_P Parameter: Plant Line Value: WS
  misc_feature: MA Experiment 20000265 PARAMETER Experiment Name: At_Open_Flower_P Parameter: Tissue Value: Closed Flower vs. Whole Plant
  misc_feature: MA Experiment ID: 20000794 Result: Down-regulated in Transcription
  misc_feature: MA Experiment 20000794 PARAMETER Experiment Name: At_Petals_P Parameter: Age (day) Value: 23-25 days
  misc_feature: MA Experiment 20000794 PARAMETER Experiment Name: At_Petals_P Parameter: Plant Line Value: WS
  misc_feature: MA Experiment 20000794 PARAMETER Experiment Name: At_Petals_P Parameter: Tissue Value: Petals vs. Whole plant
acacgccatgagaactcttcttcaatggcacttaccatctcaatctcttgtttctcctcttactttgtgtctctccttcttcttgttctatcttccttctcctttgtttgcttctccctctccaccgtctccatctcccacatctctaatcagactcttgtatgtgctctcaacaaccactcttatcttcaatgttccagtttccctttaaattcgattccattttctttaaccggtaaccttcgaaatcgaaggttttcgggggttgtttcagggaatgggtttgtgtgcggattgatatcgcggctggattccaacacttccacacttctttgttggagattctctgttgatggaactaatatgttgcacaaaagaatctaccacggtcctgagctcgaagagctagaagccgggaatttccgcatttgtggagttgaaagagtctcaaggcgcctccgttgctggcaaccgtactatctgccacggccggataattaccgttccattgccttgggagataattttttctgtgggctatctcagccacctggtatgatcagttgtgaaggtatagccaaagtgccgagtggagaccactacatcgcgatagcggctggatcacgacaagcgtgtgcgatcactgttgacaatgatgtcgagtgttggggacaaacacagtcgctgccacgtgaaaagttcttagcactagcggttggggaagaccgtggttgcggtgttagatggtctaatggaactgtggtgtgttggggcaacaacaacaactttagtttgcctcaaacgcttaaggacattcattttacatcaatatatgctaaagggccaatgttttgcggtgttgccacaagaaattacactctaatttgttgggggaatgagaattttaaatccggtgttttcactccattccaaggcctaatttctcaagtggtaatgccaggaccgtgtagaagagaatgcccttaccgtccattgtcaggatcacagtccttatgcggcaatgagttgatgatttgcgatttgaaaagaaatgatggagagtttcctgatactagggctcaaaactctaagaacaaaacttggagcagaagaaacattgcgtttctagtggtcggatgcgttggaacgttttccttgctccttgtcatcagtttcttgatctttaaaagccactgtcgatgccgtgtccatgactctggacgtcttgatgatactaggacaatagacatacccaagctcgagaagaggctgtgcactctagcaagtttaggtaatcctgggcagctaatggagttctcaattgacgagctagctctagccacggatggtttctctgtccggtttcatcttggtataggcagcttcggctctgtttatcaaggtgttttgtcggatggacgtcatgtcgcaatcaaacgagctgagctaacaaatcctacattgtctgggacaacgatgagacaccgacgagcagataaggattcagcgttcgtgaacgagctagagtctatgtcgcggcttaaccacaaaaatcttgttcgacttctgggtttctatgaggacacagaagagaggattttggtgtacgagtacatgaaaaatggatctctagccgatcaccttcacaatcctcaatttgaccctctttcgtggcaaacacgcttgatgatcgcgcttgacgctgctcgtgggatccaataccttcatgagtttatcgtgcctccggtgatccaccgtgacataaagtcatcaaacatacttttggacgccacatggacagccaaagtttcagatttcggcctatctcaaatgggtccaacggaagaagatgacgtctcacatctctctttacacgctgccggtacattgggatatatcgacccggagtactacaagtttcaacagctcacaaccaagagcgatgtttacagctttggcgtggtgttgctggagttgctgtctggtcacaaagcgatacacaataacgaagacgaaaaccctagaaacttagtggaatatgttgtaccatacattttgctggatgaggctcatagaatacttgaccagaggattccaccgccgaccccttacgaaatcgaggcggtggctcatgtcggatacttggcagcggagtgtttgatgccgtgtagtcggaaaaggccgtcaatggtggaggtagtcagtaaactagagagtgctttggccgcttgtttgacggctccaaagacggagaccgtatctcgatcaaacacttattagccacgtttagcttaattaaatcttgtggtcaactgtaattgtatttatttttctagggattaggaatttaattaattggtacagaattttaatattttct

SEQ ID NO: 83535 - protein, 759 aa, Arabidopsis thaliana
  peptide (1)..(759): Ceres Seq. ID no. 12670720
  misc_feature (378)..(758): Homolog of NCBI NO: 10998537 NR Description: cytokinin-regulated kinase 1 [Nicotiana tabacum]
  misc_feature (22)..(346): Homolog of NCBI NO: 10998537 NR Description: cytokinin-regulated kinase 1 [Nicotiana tabacum]
  misc_feature (358)..(411): Homolog of NCBI NO: 10998537 NR Description: cytokinin-regulated kinase 1 [Nicotiana tabacum]
  misc_feature (360)..(744): Homolog of NCBI NO: 39545656 NR Description: OJ000114_01.11 [Oryza sativa (japonica
  misc_feature (26)..(339): Homolog of NCBI NO: 39545656 NR Description: OJ000114_01.11 [Oryza sativa (japonica
  misc_feature (428)..(744): Homolog of NCBI NO: 15228781 NR Description: receptor kinase - like protein; protein id:
  misc_feature (190)..(751): Homolog of NCBI NO: 15231681 NR Description: putative protein; protein id: At3g59420.1, by cDNA: gi_20302589 [Arabidopsis thaliana]
  misc_feature (363)..(751): Homolog of NCBI NO: 3913366 NR Description: Putative receptor protein kinase CRINKLY4
  misc_feature (363)..(751): Homolog of NCBI NO: 15721862 NR Description: CR4 [Oryza sativa]
  misc_feature (5)..(608): Homolog of NCBI NO: 15232759 NR Description: putative protein kinase; protein id: At3g09780.1 thaliana] >gi|6681340|gb|AAF23257.1|AC015985_15 putative protein
TRHENSSSMALTISISCFSSYFVSLLLLVLSSFSFVCFSLSTVSISHISNQTLVCALNNHSYLQCSSFPLNSIPFSLTGNLRNRRFSGVVSGNGFVCGLISRLDSNTSTLLCWRFSVDGTNMLHKRIYHGPELEELEAGNFRICGVERVSRRLRCWQPYYLPRPDNYRSIALGDNFFCGLSQPPGMISCEGIAKVPSGDHYIAIAAGSRQACAITVDNDVECWGQTQSLPREKFLALAVGEDRGCGVRWSNGTVVCWGNNNNFSLPQTLKDIHFTSIYAKGPMFCGVATRNYTLICWGNENFKSGVFTPFQGLISQVVMPGPCRRECPYRPLSGSQSLCGNELMICDLKRNDGEFPDTRAQNSKNKTWSRRNIAFLVVGCVGTFSLLLVISFLIFKSHCRCRVHDSGRLDDTRTIDIPKLEKRLCTLASLGNPGQLMEFSIDELALATDGFSVRFHLGIGSFGSVYQGVLSDGRHVAIKRAELTNPTLSGTTMRHRRADKDSAFVNELESMSRLNHKNLVRLLGFYEDTEERILVYEYMKNGSLADHLHNPQFDPLSWQTRLMIALDAARGIQYLHEFIVPPVIHRDIKSSNILLDATWTAKVSDFGLSQMGPTEEDDVSHLSLHAAGTLGYIDPEYYKFQQLTTKSDVYSFGVVLLELLSGHKAIHNNEDENPRNLVEYVVPYILLDEAHRILDQRIPPPTPYEIEAVAHVGYLAAECLMPCSRKRPSMVEVVSKLESALAACLTAPKTETVSRSNTY

SEQ ID NO: 83536 - protein, 751 aa, Arabidopsis thaliana
  peptide (1)..(751): Ceres Seq. ID no. 12670721
  misc_feature (370)..(750): Homolog of NCBI NO: 10998537 NR Description: cytokinin-regulated kinase 1 [Nicotiana tabacum]
  misc_feature (14)..(338): Homolog of NCBI NO: 10998537 NR Description: cytokinin-regulated kinase 1 [Nicotiana tabacum]
  misc_feature (350)..(403): Homolog of NCBI NO: 10998537 NR Description: cytokinin-regulated kinase 1 [Nicotiana tabacum]
  misc_feature (352)..(736): Homolog of NCBI NO: 39545656 NR Description: OJ000114_01.11 [Oryza sativa (japonica
  misc_feature (18)..(331): Homolog of NCBI NO: 39545656 NR Description: OJ000114_01.11 [Oryza sativa (japonica
  misc_feature (420)..(736): Homolog of NCBI NO: 15228781 NR Description: receptor kinase - like protein; protein id:
  misc_feature (182)..(743): Homolog of NCBI NO: 15231681 NR Description: putative protein; protein id: At3g59420.1, by cDNA: gi_20302589 [Arabidopsis thaliana]
  misc_feature (355)..(743): Homolog of NCBI NO: 3913366 NR Description: Putative receptor protein kinase CRINKLY4
  misc_feature (355)..(743): Homolog of NCBI NO: 15721862 NR Description: CR4 [Oryza sativa]
  misc_feature (1)..(600): Homolog of NCBI NO: 15232759 NR Description: putative protein kinase; protein id: At3g09780.1 thaliana] >gi|6681340|gb|AAF23257.1|AC015985_15 putative protein
MALTISISCFSSYFVSLLLLVLSSFSFVCFSLSTVSISHISNQTLVCALNNHSYLQCSSFPLNSIPFSLTGNLRNRRFSGVVSGNGFVCGLISRLDSNTSTLLCWRFSVDGTNMLHKRIYHGPELEELEAGNFRICGVERVSRRLRCWQPYYLPRPDNYRSIALGDNFFCGLSQPPGMISCEGIAKVPSGDHYIAIAAGSRQACAITVDNDVECWGQTQSLPREKFLALAVGEDRGCGVRWSNGTVVCWGNNNNFSLPQTLKDIHFTSIYAKGPMFCGVATRNYTLICWGNENFKSGVFTPFQGLISQVVMPGPCRRECPYRPLSGSQSLCGNELMICDLKRNDGEFPDTRAQNSKNKTWSRRNIAFLVVGCVGTFSLLLVISFLIFKSHCRCRVHDSGRLDDTRTIDIPKLEKRLCTLASLGNPGQLMEFSIDELALATDGFSVRFHLGIGSFGSVYQGVLSDGRHVAIKRAELTNPTLSGTTMRHRRADKDSAFVNELESMSRLNHKNLVRLLGFYEDTEERILVYEYMKNGSLADHLHNPQFDPLSWQTRLMIALDAARGIQYLHEFIVPPVIHRDIKSSNILLDATWTAKVSDFGLSQMGPTEEDDVSHLSLHAAGTLGYIDPEYYKFQQLTTKSDVYSFGVVLLELLSGHKAIHNNEDENPRNLVEYVVPYILLDEAHRILDQRIPPPTPYEIEAVAHVGYLAAECLMPCSRKRPSMVEVVSKLESALAACLTAPKTETVSRSNTY

SEQ ID NO: 83537 - protein, 638 aa, Arabidopsis thaliana
  peptide (1)..(638): Ceres Seq. ID no. 12670722
  misc_feature (257)..(637): Homolog of NCBI NO: 10998537 NR Description: cytokinin-regulated kinase 1 [Nicotiana tabacum]
  misc_feature (1)..(225): Homolog of NCBI NO: 10998537 NR Description: cytokinin-regulated kinase 1 [Nicotiana tabacum]
  misc_feature (237)..(290): Homolog of NCBI NO: 10998537 NR Description: cytokinin-regulated kinase 1 [Nicotiana tabacum]
  misc_feature (239)..(623): Homolog of NCBI NO: 39545656 NR Description: OJ000114_01.11 [Oryza sativa (japonica
  misc_feature (1)..(218): Homolog of NCBI NO: 39545656 NR Description: OJ000114_01.11 [Oryza sativa (japonica
  misc_feature (307)..(623): Homolog of NCBI NO: 15228781 NR Description: receptor kinase - like protein; protein id:
  misc_feature (69)..(630): Homolog of NCBI NO: 15231681 NR Description: putative protein; protein id: At3g59420.1, by cDNA: gi_20302589 [Arabidopsis thaliana]
  misc_feature (242)..(630): Homolog of NCBI NO: 3913366 NR Description: Putative receptor protein kinase CRINKLY4
  misc_feature (242)..(630): Homolog of NCBI NO: 15721862 NR Description: CR4 [Oryza sativa]
  misc_feature (1)..(487): Homolog of NCBI NO: 15232759 NR Description: putative protein kinase; protein id: At3g09780.1 thaliana] >gi|6681340|gb|AAF23257.1|AC015985_15 putative protein
MLHKRIYHGPELEELEAGNFRICGVERVSRRLRCWQPYYLPRPDNYRSIALGDNFFCGLSQPPGMISCEGIAKVPSGDHYIAIAAGSRQACAITVDNDVECWGQTQSLPREKFLALAVGEDRGCGVRWSNGTVVCWGNNNNFSLPQTLKDIHFTSIYAKGPMFCGVATRNYTLICWGNENFKSGVFTPFQGLISQVVMPGPCRRECPYRPLSGSQSLCGNELMICDLKRNDGEFPDTRAQNSKNKTWSRRNIAFLVVGCVGTFSLLLVISFLIFKSHCRCRVHDSGRLDDTRTIDIPKLEKRLCTLASLGNPGQLMEFSIDELALATDGFSVRFHLGIGSFGSVYQGVLSDGRHVAIKRAELTNPTLSGTTMRHRRADKDSAFVNELESMSRLNHKNLVRLLGFYEDTEERILVYEYMKNGSLADHLHNPQFDPLSWQTRLMIALDAARGIQYLHEFIVPPVIHRDIKSSNILLDATWTAKVSDFGLSQMGPTEEDDVSHLSLHAAGTLGYIDPEYYKFQQLTTKSDVYSFGVVLLELLSGHKAIHNNEDENPRNLVEYVVPYILLDEAHRILDQRIPPPTPYEIEAVAHVGYLAAECLMPCSRKRPSMVEVVSKLESALAACLTAPKTETVSRSNTY

SEQ ID NO: 83538 - DNA, 849 bp, Arabidopsis thaliana
  misc_feature (1)..(849): Ceres Seq. ID no. 12670726
  misc_feature: MA Experiment ID: 20000314 Result: Up-regulated in Transcription
  misc_feature: MA Experiment 20000314 PARAMETER Experiment Name: At_14day_Shoots-Roots_Sub_P Parameter: Age (day) Value: 14
  misc_feature: MA Experiment 20000314 PARAMETER Experiment Name: At_14day_Shoots-Roots_Sub_P Parameter: Organism Value: A. thaliana
  misc_feature: MA Experiment 20000314 PARAMETER Experiment Name: At_14day_Shoots-Roots_Sub_P Parameter: Plant Line Value: WS
  misc_feature: MA Experiment 20000314 PARAMETER Experiment Name: At_14day_Shoots-Roots_Sub_P Parameter: Tissue Value: Roots vs. Whole Plant
  misc_feature: MA Experiment ID: 20000328 Result: Down-regulated in Transcription
  misc_feature: MA Experiment 20000328 PARAMETER Experiment Name: At_42deg_Heat_Sub_P Parameter: Age (day) Value: 14
  misc_feature: MA Experiment 20000328 PARAMETER Experiment Name: At_42deg_Heat_Sub_P Parameter: Organism Value: A. thaliana
  misc_feature: MA Experiment 20000328 PARAMETER Experiment Name: At_42deg_Heat_Sub_P Parameter: Plant Line Value: WS
  misc_feature: MA Experiment 20000328 PARAMETER Experiment Name: At_42deg_Heat_Sub_P Parameter: Temperature (deg C) Value: 42 vs. 22
  misc_feature: MA Experiment 20000328 PARAMETER Experiment Name: At_42deg_Heat_Sub_P Parameter: Timepoint (hr) Value: 6
  misc_feature: MA Experiment 20000328 PARAMETER Experiment Name: At_42deg_Heat_Sub_P Parameter: Tissue Value: Aerial
  misc_feature: MA Experiment ID: 20000332 Result: Up-regulated in Transcription
  misc_feature: MA Experiment 20000332 PARAMETER Experiment Name: At_4deg_Cold_Sub_P Parameter: Age (day) Value: 14
  misc_feature: MA Experiment 20000332 PARAMETER Experiment Name: At_4deg_Cold_Sub_P Parameter: Organism Value: A. thaliana
  misc_feature: MA Experiment 20000332 PARAMETER Experiment Name: At_4deg_Cold_Sub_P Parameter: Plant Line Value: WS
  misc_feature: MA Experiment 20000332 PARAMETER Experiment Name: At_4deg_Cold_Sub_P Parameter: Temperature (deg C) Value: 4 vs. 22
  misc_feature: MA Experiment 20000332 PARAMETER Experiment Name: At_4deg_Cold_Sub_P Parameter: Timepoint (hr) Value: 2
  misc_feature: MA Experiment 20000332 PARAMETER Experiment Name: At_4deg_Cold_Sub_P Parameter: Tissue Value: Aerial
  misc_feature: MA Experiment ID: 20000346 Result: Up-regulated in Transcription
  misc_feature: MA Experiment 20000346 PARAMETER Experiment Name: At_2mM_SA_Sub_P Parameter: Age (day) Value: 14
  misc_feature: MA Experiment 20000346 PARAMETER Experiment Name: At_2mM_SA_Sub_P Parameter: Organism Value: A. thaliana
  misc_feature: MA Experiment 20000346 PARAMETER Experiment Name: At_2mM_SA_Sub_P Parameter: Plant Line Value: WS
  misc_feature: MA Experiment 20000346 PARAMETER Experiment Name: At_2mM_SA_Sub_P Parameter: Timepoint (hr) Value: 1
  misc_feature: MA Experiment 20000346 PARAMETER Experiment Name: At_2mM_SA_Sub_P Parameter: Tissue Value: Aerial
  misc_feature: MA Experiment 20000346 PARAMETER Experiment Name: At_2mM_SA_Sub_P Parameter: Treatment Value: 2mM SA vs. No Treatment
  misc_feature: MA Experiment ID: 20000347 Result: Up-regulated in Transcription
  misc_feature: MA Experiment 20000347 PARAMETER Experiment Name: At_2mM_SA_Sub_P Parameter: Age (day) Value: 14
  misc_feature: MA Experiment 20000347 PARAMETER Experiment Name: At_2mM_SA_Sub_P Parameter: Organism Value: A. thaliana
  misc_feature: MA Experiment 20000347 PARAMETER Experiment Name: At_2mM_SA_Sub_P Parameter: Plant Line Value: WS
  misc_feature: MA Experiment 20000347 PARAMETER Experiment Name: At_2mM_SA_Sub_P Parameter: Timepoint (hr) Value: 6
  misc_feature: MA Experiment 20000347 PARAMETER Experiment Name: At_2mM_SA_Sub_P Parameter: Tissue Value: Aerial
  misc_feature: MA Experiment 20000347 PARAMETER Experiment Name: At_2mM_SA_Sub_P Parameter: Treatment Value: 2mM SA vs. No Treatment
  misc_feature: MA Experiment ID: 20000355 Result: Down-regulated in Transcription
  misc_feature: MA Experiment 20000355 PARAMETER Experiment Name: At_Siliques_Sub_P Parameter: Age (day) Value: 21
  misc_feature: MA Experiment 20000355 PARAMETER Experiment Name: At_Siliques_Sub_P Parameter: Organism Value: A. thaliana
  misc_feature: MA Experiment 20000355 PARAMETER Experiment Name: At_Siliques_Sub_P Parameter: Plant Line Value: WS
  misc_feature: MA Experiment 20000355 PARAMETER Experiment Name: At_Siliques_Sub_P Parameter: Tissue Value: Less Than 5mm Siliques vs. Whole Plant
  misc_feature: MA Experiment ID: 20000440 Result: Down-regulated in Transcription
  misc_feature: MA Experiment 20000440 PARAMETER Experiment Name: At_Closed-Flower__Sub_P Parameter: Tissue Value: Closed Flower vs. Whole Plant
atggtgtcattttgcggtagaaggttcgccttcttgattatctttctctttgcagcacaatatgagcgtgtctacgctggtagctttcacaaggacgttcagatacattggggtgatggccgtggaaaaattctcgacaatgtcggaaatcttctttctctctcgctcgacaaattctctggttccggttttcagtcccatcaagagtttctttatggcaaagtagaggttcaaatgaaacttgtacctggtaactctgctggaacagtgacaacattctatctaaaatctcctggaactacatgggatgaaatagattttgagttcttgggaaacataagtggtcatccatatactcttcatactaatgtttacacaaaaggcacaggagacaaagaacaacagtttcatctatggtttgacccaactgttgactttcacacttattgtatcatatggaatccccaaagggtcatttttacaatagatggaattccgataagagaattcaagaactccgaagcccttggagttcccttcccaaagcatcaaccaatgaggctctatgctagcctttgggaagccgagcattgggctacaagaggaggattagagaaaacagactggtccaaagctcctttcaccgctttctacagaaactacaatgtggatgcatgtgtgtggtccaatggaaaatcatcatgctctgcgaattcctcatggtttactcaagtacttgatttcaaaggcaagaatagagtgaaatgggcacagagaaagtacatggtctacaactattgcactgataagaaaagatttcctcaaggtgctcctccagagtgcagttaa

SEQ ID NO: 83539 - protein, 282 aa, Arabidopsis thaliana
  peptide (1)..(282): Ceres Seq. ID no. 12670727
  misc_feature (29)..(211): Pfam Name: Glycosyl hydrolases family 16 Pfam Description: Glycosyl hydrolases family 16
  misc_feature (1)..(282): Homolog of NCBI NO: 15238891 NR Description: xyloglucan endotransglycosylase, putative;
  misc_feature (5)..(282): Homolog of NCBI NO: 15218642 NR Description: xyloglucan endotransglycosylase, putative; id: At1g65310.1, supported by cDNA: gi_13877724 [Arabidopsis
  misc_feature (5)..(282): Homolog of NCBI NO: 15234681 NR Description: xyloglucan endotransglycosylase, putative; id: At4g30280.1, supported by cDNA: 142204., supported by cDNA:
  misc_feature (7)..(282): Homolog of NCBI NO: 15234701 NR Description: xyloglucan endotransglycosylase, putative; id: At4g30290.1, supported by cDNA: gi_15215689 [Arabidopsis >gi|25313544|pir||B85354 hypothetical protein AT4g30290
  misc_feature (7)..(282): Homolog of NCBI NO: 15215690 NR Description: AT4g30290/F17I23_370 [Arabidopsis thaliana]
  misc_feature (26)..(281): Homolog of NCBI NO: 15242781 NR Description: xyloglucan endotransglycosylase (TCH4); protein At5g57560.1, supported by cDNA: gi_14194112, supported by cDNA:
  misc_feature (8)..(282): Homolog of NCBI NO: 3901012 NR Description: xyloglucan endotransglycosylase 1 [Fagus
  misc_feature (11)..(282): Homolog of NCBI NO: 29500891 NR Description: putative xyloglucan endotransglycosylase [Cucumis >gi|29500899|emb|CAD87533.1| putative xyloglucan
  misc_feature (11)..(282): Homolog of NCBI NO: 29500893 NR Description: putative xyloglucan endotransglycosylase [Cucumis >gi|29500901|emb|CAD87534.1| putative xyloglucan
  misc_feature (21)..(281): Homolog of NCBI NO: 2129773 NR Description: xyloglucan endo-1,4-beta-D-glucanase (EC 3.2.1.-) - Arabidopsis thaliana (fragment) >gi|1244752|gb|AAB18364.1|
MVSFCGRRFAFLIIFLFAAQYERVYAGSFHKDVQIHWGDGRGKILDNVGNLLSLSLDKFSGSGFQSHQEFLYGKVEVQMKLVPGNSAGTVTTFYLKSPGTTWDEIDFEFLGNISGHPYTLHTNVYTKGTGDKEQQFHLWFDPTVDFHTYCIIWNPQRVIFTIDGIPIREFKNSEALGVPFPKHQPMRLYASLWEAEHWATRGGLEKTDWSKAPFTAFYRNYNVDACVWSNGKSSCSANSSWFTQVLDFKGKNRVKWAQRKYMVYNYCTDKKRFPQGAPPECS

SEQ ID NO: 83540 - protein, 204 aa, Arabidopsis thaliana
  peptide (1)..(204): Ceres Seq. ID no. 12670728
  misc_feature (1)..(133): Pfam Name: Glycosyl hydrolases family 16 Pfam Description: Glycosyl hydrolases family 16
  misc_feature (1)..(204): Homolog of NCBI NO: 15238891 NR Description: xyloglucan endotransglycosylase, putative;
  misc_feature (1)..(204): Homolog of NCBI NO: 15218642 NR Description: xyloglucan endotransglycosylase, putative; id: At1g65310.1, supported by cDNA: gi_13877724 [Arabidopsis
  misc_feature (1)..(204): Homolog of NCBI NO: 15234681 NR Description: xyloglucan endotransglycosylase, putative; id: At4g30280.1, supported by cDNA: 142204., supported by cDNA:
  misc_feature (1)..(204): Homolog of NCBI NO: 15234701 NR Description: xyloglucan endotransglycosylase, putative; id: At4g30290.1, supported by cDNA: gi_15215689 [Arabidopsis >gi|25313544|pir||B85354 hypothetical protein AT4g30290
  misc_feature (1)..(204): Homolog of NCBI NO: 15215690 NR Description: AT4g30290/F17I23_370 [Arabidopsis thaliana]
  misc_feature (1)..(203): Homolog of NCBI NO: 15242781 NR Description: xyloglucan endotransglycosylase (TCH4); protein At5g57560.1, supported by cDNA: gi_14194112, supported by cDNA:
  misc_feature (1)..(204): Homolog of NCBI NO: 3901012 NR Description: xyloglucan endotransglycosylase 1 [Fagus
  misc_feature (1)..(204): Homolog of NCBI NO: 29500891 NR Description: putative xyloglucan endotransglycosylase [Cucumis >gi|29500899|emb|CAD87533.1| putative xyloglucan
  misc_feature (1)..(204): Homolog of NCBI NO: 29500893 NR Description: putative xyloglucan endotransglycosylase [Cucumis >gi|29500901|emb|CAD87534.1| putative xyloglucan
  misc_feature (1)..(203): Homolog of NCBI NO: 2129773 NR Description: xyloglucan endo-1,4-beta-D-glucanase (EC 3.2.1.-) - Arabidopsis thaliana (fragment) >gi|1244752|gb|AAB18364.1|
MKLVPGNSAGTVTTFYLKSPGTTWDEIDFEFLGNISGHPYTLHTNVYTKGTGDKEQQFHLWFDPTVDFHTYCIIWNPQRVIFTIDGIPIREFKNSEALGVPFPKHQPMRLYASLWEAEHWATRGGLEKTDWSKAPFTAFYRNYNVDACVWSNGKSSCSANSSWFTQVLDFKGKNRVKWAQRKYMVYNYCTDKKRFPQGAPPECS

SEQ ID NO: 83541 - DNA, 1510 bp, Arabidopsis thaliana
  misc_feature (1)..(1510): Ceres Seq. ID no. 12670729
  misc_feature: MA Experiment ID: 108434 Result: Up-regulated in Transcription
  misc_feature: MA Experiment 108434 PARAMETER Experiment Name: At_Root_Tips_cDNA_P Parameter: Tissue Value: Root Tips
  misc_feature: MA Experiment ID: 108461 Result: Up-regulated in Transcription
  misc_feature: MA Experiment 108461 PARAMETER Experiment Name: At_Germinating_Seeds_cDNA_P Parameter: Age (day) Value: 1 vs. 0
  misc_feature: MA Experiment 108461 PARAMETER Experiment Name: At_Germinating_Seeds_cDNA_P Parameter: Tissue Value: Germinating Seeds
  misc_feature: MA Experiment ID: 108595 Result: Down-regulated in Transcription
  misc_feature: MA Experiment 108595 PARAMETER Experiment Name: At_Ler-pi_Ovule_cDNA_P Parameter: Plant Line Value: null
  misc_feature: MA Experiment ID: 20000113 Result: Down-regulated in Transcription
  misc_feature: MA Experiment 20000113 PARAMETER Experiment Name: At_42deg_Heat_cDNA_P Parameter: Temperature (deg C) Value: 42 vs. 22
  misc_feature: MA Experiment 20000113 PARAMETER Experiment Name: At_42deg_Heat_cDNA_P Parameter: Timepoint (hr) Value: 8
  misc_feature: MA Experiment 20000113 PARAMETER Experiment Name: At_42deg_Heat_cDNA_P Parameter: Tissue Value: Aerial
  misc_feature: MA Experiment ID: 20000179 Result: Up-regulated in Transcription
  misc_feature: MA Experiment 20000179 PARAMETER Experiment Name: At_Germinating_Seeds_P Parameter: Age (hr) Value: 6 vs. 0
  misc_feature: MA Experiment 20000179 PARAMETER Experiment Name: At_Germinating_Seeds_P Parameter: Tissue Value: Germinating Seeds
  misc_feature: MA Experiment ID: 20000180 Result: Up-regulated in Transcription
  misc_feature: MA Experiment 20000180 PARAMETER Experiment Name: At_Germinating_Seeds_P Parameter: Age (hr) Value: 24 vs. 0
  misc_feature: MA Experiment 20000180 PARAMETER Experiment Name: At_Germinating_Seeds_P Parameter: Tissue Value: Germinating Seeds
  misc_feature: MA Experiment ID: 20000185 Result: Up-regulated in Transcription
  misc_feature: MA Experiment 20000185 PARAMETER Experiment Name: At_Roots__P Parameter: Age (day) Value: 7 vs. 21
  misc_feature: MA Experiment 20000185 PARAMETER Experiment Name: At_Roots__P Parameter: Organism Value: A. thaliana
  misc_feature: MA Experiment 20000185 PARAMETER Experiment Name: At_Roots__P Parameter: Tissue Value: Roots vs. Whole Plant
  misc_feature: MA Experiment ID: 20000224 Result: Down-regulated in Transcription
  misc_feature: MA Experiment ID: 20000227 Result: Up-regulated in Transcription
  misc_feature: MA Experiment 20000227 PARAMETER Experiment Name: At_Root-Tips-vs-Tops_P Parameter: Tissue Value: Root Tips vs. Root Tops
  misc_feature: MA Experiment ID: 20000234 Result: Up-regulated in Transcription
  misc_feature: MA Experiment 20000234 PARAMETER Experiment Name: At_Siliques_P Parameter: Age (day) Value: 21
  misc_feature: MA Experiment 20000234 PARAMETER Experiment Name: At_Siliques_P Parameter: Organism Value: A. thaliana
  misc_feature: MA Experiment 20000234 PARAMETER Experiment Name: At_Siliques_P Parameter: Plant Line Value: WS
  misc_feature: MA Experiment 20000234 PARAMETER Experiment Name: At_Siliques_P Parameter: Tissue Value: Less Than 5mm Siliques vs. Whole Plant
  misc_feature: MA Experiment ID: 20000265 Result: Up-regulated in Transcription
  misc_feature: MA Experiment 20000265 PARAMETER Experiment Name: At_Open_Flower_P Parameter: Age (day) Value: 21
  misc_feature: MA Experiment 20000265 PARAMETER Experiment Name: At_Open_Flower_P Parameter: Plant Line Value: WS
  misc_feature: MA Experiment 20000265 PARAMETER Experiment Name: At_Open_Flower_P Parameter: Tissue Value: Closed Flower vs. Whole Plant
  misc_feature: MA Experiment ID: 20000286 Result: Up-regulated in Transcription
  misc_feature: MA Experiment 20000286 PARAMETER Experiment Name: At_Open_Flower_P Parameter: Age (day) Value: 21
  misc_feature: MA Experiment 20000286 PARAMETER Experiment Name: At_Open_Flower_P Parameter: Plant Line Value: WS
  misc_feature: MA Experiment 20000286 PARAMETER Experiment Name: At_Open_Flower_P Parameter: Tissue Value: Half Open vs. Whole Plant
  misc_feature: MA Experiment ID: 20000794 Result: Up-regulated in Transcription
  misc_feature: MA Experiment 20000794 PARAMETER Experiment Name: At_Petals_P Parameter: Age (day) Value: 23-25 days
  misc_feature: MA Experiment 20000794 PARAMETER Experiment Name: At_Petals_P Parameter: Plant Line Value: WS
  misc_feature: MA Experiment 20000794 PARAMETER Experiment Name: At_Petals_P Parameter: Tissue Value: Petals vs. Whole plant
  misc_feature: MA Experiment ID: 20001248 Result: Up-regulated in Transcription
  misc_feature: MA Experiment 20001248 PARAMETER Experiment Name: At_Far-red-induction_P Parameter: Age (day) Value: 7
  misc_feature: MA Experiment 20001248 PARAMETER Experiment Name: At_Far-red-induction_P Parameter: Light Value: Far-red vs. White
  misc_feature: MA Experiment 20001248 PARAMETER Experiment Name: At_Far-red-induction_P Parameter: Organism Value: A. thaliana
  misc_feature: MA Experiment 20001248 PARAMETER Experiment Name: At_Far-red-induction_P Parameter: Plant Line Value: Columbia
  misc_feature: MA Experiment 20001248 PARAMETER Experiment Name: At_Far-red-induction_P Parameter: Timepoint (hr) Value: 4
  misc_feature: MA Experiment 20001248 PARAMETER Experiment Name: At_Far-red-induction_P Parameter: Tissue Value: Whole Plant
  misc_feature: MA Experiment ID: 20001911 Result: Down-regulated in Transcription
  misc_feature: MA Experiment 20001911 PARAMETER Experiment Name: At_Drought_Reproduction_P Parameter: Age (day) Value: 40
  misc_feature: MA Experiment 20001911 PARAMETER Experiment Name: At_Drought_Reproduction_P Parameter: Organism Value: A. thaliana
  misc_feature: MA Experiment 20001911 PARAMETER Experiment Name: At_Drought_Reproduction_P Parameter: Plant Line Value: WS
  misc_feature: MA Experiment 20001911 PARAMETER Experiment Name: At_Drought_Reproduction_P Parameter: Timepoint (day) Value: 10
  misc_feature: MA Experiment 20001911 PARAMETER Experiment Name: At_Drought_Reproduction_P Parameter: Tissue Value: Flowers
  misc_feature: MA Experiment 20001911 PARAMETER Experiment Name: At_Drought_Reproduction_P Parameter: Treatment Value: Drought vs. No Drought
gaatcctagaggtaacaaaacactttcattagtaaactgaatttgaaggatgaattttttttttgatatatgaatgttgatgaatcagatgtttgcattgtgggtgttgcacgtactccaatgggtggctttctcggatctctttcatctttacctgccacaaagcttggatctttagctattgcagctgctttgaagagagcaaatgttgatccagctcttgttcaagaagttgtctttggcaatgttcttagtgctaatttgggtcaagctcctgctcgtcaagctgctttaggtgcaggaatccctaactctgttatctgtactacagttaacaaggtttgtgcatcaggcatgaaagcggtaatgattgctgctcaaagtatccagttagggatcaatgatgtagttgtggcgggtggtatggaaagcatgtctaatacaccaaaatatttggcagaagcaaggaagggatctcgttttggtcatgattctttagtagatggaatgttgaaggatggactatgggatgtctataacgactgtgggatgggaagctgtgcagaattatgcgctgagaagtttcagattacaagggagcagcaagatgactatgcagttcagagttttgagcgtggtattgctgcccaggaagctggcgccttcacatgggaaatcgtcccggttgaagtttctggaggaagaggtaggccatcaaccattgttgacaaggacgaaggtcttgggaagtttgatgctgcaaaattgaggaaactccgtcctagtttcaaagagaatggagggactgttacagctggaaatgcgtctagcataagtgatggtgcagctgcccttgtcctagtgagcggagagaaggctcttcagctaggacttctagtattagcaaaaattaaagggtatggtgacgcagctcaggaaccagagtttttcactactgctcctgctcttgctataccaaaagccattgcacatgctggtttggaatcttctcaagttgattactatgagatcaatgaagcatttgcagttgtagcacttgcaaatcaaaagctactcgggattgctccagagaaagtgaacgtaaatggaggagctgtctccttaggacaccctctaggctgcagtggcgcccgtattctaatcacgttgcttgggatactaaagaagagaaacggaaagtacggtgtgggaggagtgtgcaacggaggaggaggtgcttctgctctagttcttgagctcctttgatgcattatgaatccaggttggtaaactaaatagatggatctatctctcatccaacttccatgagtcagtcattgcactttacgttttatgttagttggtctctcaataaaggagtgatcgttgatgttgttaagtctatttatttatatgaactcggcttctttttttctcttaccggtgacagtcagttattgaatcatggaccgatttaccgtagttaatgatttatcctcatgtactcatt

SEQ ID NO: 83542 - protein, 398 aa, Arabidopsis thaliana
  peptide (1)..(398): Ceres Seq. ID no. 12670730
  misc_feature (7)..(268): Pfam Name: Thiolase, N-terminal domain Pfam Description: Thiolase, N-terminal domain
  misc_feature (1)..(398): Homolog of NCBI NO: 30695409 NR Description: acetyl-CoA C-acetyltransferase A thiolase), putative [Arabidopsis thaliana]
  misc_feature (2)..(398): Homolog of NCBI NO: 8777413 NR Description: acetyl-CoA C-acetyltransferase [Arabidopsis
  misc_feature (2)..(398): Homolog of NCBI NO: 30695411 NR Description: acetyl-CoA C-acetyltransferase A thiolase), putative [Arabidopsis thaliana]
  misc_feature (7)..(398): Homolog of NCBI NO: 7433657 NR Description: acetyl-CoA C-acetyltransferase (EC 2.3.1.9),
  misc_feature (7)..(398): Homolog of NCBI NO: 15238793 NR Description: acetoacyl-CoA-thiolase; protein id: At5g47720.1,
  misc_feature (7)..(398): Homolog of NCBI NO: 30695277 NR Description: acetyl-CoA C-acetyltransferase
  misc_feature (2)..(398): Homolog of NCBI NO: 16417944 NR Description: acetyl Co-A acetyltransferase [Hevea brasiliensis]
  misc_feature (7)..(398): Homolog of NCBI NO: 34894172 NR Description: putative acetoacyl-CoA-thiolase [Oryza sativa
  misc_feature (6)..(396): Homolog of NCBI NO: 19113478 NR Description: acetyl-coa acetyltransferase (EC 2.3.1.9)
  misc_feature (6)..(396): Homolog of NCBI NO: 11257345 NR Description: probable acetyl-CoA C-acetyltransferase (EC - fission yeast (Schizosaccharomyces pombe)
MNVDESDVCIVGVARTPMGGFLGSLSSLPATKLGSLAIAAALKRANVDPALVQEVVFGNVLSANLGQAPARQAALGAGIPNSVICTTVNKVCASGMKAVMIAAQSIQLGINDVVVAGGMESMSNTPKYLAEARKGSRFGHDSLVDGMLKDGLWDVYNDCGMGSCAELCAEKFQITREQQDDYAVQSFERGIAAQEAGAFTWEIVPVEVSGGRGRPSTIVDKDEGLGKFDAAKLRKLRPSFKENGGTVTAGNASSISDGAAALVLVSGEKALQLGLLVLAKIKGYGDAAQEPEFFTTAPALAIPKAIAHAGLESSQVDYYEINEAFAVVALANQKLLGIAPEKVNVNGGAVSLGHPLGCSGARILITLLGILKKRNGKYGVGGVCNGGGGASALVLELL

SEQ ID NO: 83543 - protein, 381 aa, Arabidopsis thaliana; identical to SEQ ID NO: 41747
  peptide (1)..(381): Ceres Seq. ID no. 12670731
  misc_feature (1)..(251): Pfam Name: Thiolase, N-terminal domain Pfam Description: Thiolase, N-terminal domain
  misc_feature (1)..(381): Homolog of NCBI NO: 30695409 NR Description: acetyl-CoA C-acetyltransferase A thiolase), putative [Arabidopsis thaliana]
  misc_feature (1)..(381): Homolog of NCBI NO: 8777413 NR Description: acetyl-CoA C-acetyltransferase [Arabidopsis
  misc_feature (1)..(381): Homolog of NCBI NO: 30695411 NR Description: acetyl-CoA C-acetyltransferase A thiolase), putative [Arabidopsis thaliana]
  misc_feature (1)..(381): Homolog of NCBI NO: 7433657 NR Description: acetyl-CoA C-acetyltransferase (EC 2.3.1.9),
  misc_feature (1)..(381): Homolog of NCBI NO: 15238793 NR Description: acetoacyl-CoA-thiolase; protein id: At5g47720.1,
  misc_feature (1)..(381): Homolog of NCBI NO: 30695277 NR Description: acetyl-CoA C-acetyltransferase
  misc_feature (1)..(381): Homolog of NCBI NO: 16417944 NR Description: acetyl Co-A acetyltransferase [Hevea brasiliensis]
  misc_feature (1)..(381): Homolog of NCBI NO: 34894172 NR Description: putative acetoacyl-CoA-thiolase [Oryza sativa
  misc_feature (1)..(379): Homolog of NCBI NO: 19113478 NR Description: acetyl-coa acetyltransferase (EC 2.3.1.9)
  misc_feature (1)..(379): Homolog of NCBI NO: 11257345 NR Description: probable acetyl-CoA C-acetyltransferase (EC - fission yeast (Schizosaccharomyces pombe)

SEQ ID NO: 83544 - protein, 303 aa, Arabidopsis thaliana; identical to SEQ ID NO: 41748
  peptide (1)..(303): Ceres Seq. ID no. 12670732
  misc_feature (1)..(173): Pfam Name: Thiolase, N-terminal domain Pfam Description: Thiolase, N-terminal domain
  misc_feature (1)..(303): Homolog of NCBI NO: 30695409 NR Description: acetyl-CoA C-acetyltransferase A thiolase), putative [Arabidopsis thaliana]
  misc_feature (1)..(303): Homolog of NCBI NO: 8777413 NR Description: acetyl-CoA C-acetyltransferase [Arabidopsis
  misc_feature (1)..(303): Homolog of NCBI NO: 30695411 NR Description: acetyl-CoA C-acetyltransferase A thiolase), putative [Arabidopsis thaliana]
  misc_feature (1)..(303): Homolog of NCBI NO: 7433657 NR Description: acetyl-CoA C-acetyltransferase (EC 2.3.1.9),
  misc_feature (1)..(303): Homolog of NCBI NO: 15238793 NR Description: acetoacyl-CoA-thiolase; protein id: At5g47720.1,
  misc_feature (1)..(303): Homolog of NCBI NO: 30695277 NR Description: acetyl-CoA C-acetyltransferase
  misc_feature (1)..(303): Homolog of NCBI NO: 16417944 NR Description: acetyl Co-A acetyltransferase [Hevea brasiliensis]
  misc_feature (1)..(303): Homolog of NCBI NO: 34894172 NR Description: putative acetoacyl-CoA-thiolase [Oryza sativa
  misc_feature (1)..(301): Homolog of NCBI NO: 19113478 NR Description: acetyl-coa acetyltransferase (EC 2.3.1.9)
  misc_feature (1)..(301): Homolog of NCBI NO: 11257345 NR Description: probable acetyl-CoA C-acetyltransferase (EC - fission yeast (Schizosaccharomyces pombe)

SEQ ID NO: 83545 - DNA, 701 bp, Arabidopsis thaliana
  misc_feature (1)..(701): Ceres Seq. ID no. 12670747
  misc_feature: MA Experiment ID: 20000184 Result: Up-regulated in Transcription
  misc_feature: MA Experiment 20000184 PARAMETER Experiment Name: At_Shoots__P Parameter: Age (day) Value: 7
  misc_feature: MA Experiment 20000184 PARAMETER Experiment Name: At_Shoots__P Parameter: Tissue Value: Shoots vs. Whole Plant
atggaatgcaaaagagaagaagggaagtcttacgtgaagagagggttgtggaaaccagaagaagatatgatattaaaaagctatgttgagactcatggtgaaggaaactgggcagacatttctcgtagatccgggttgaagagaggaggaaaaagctgtaggctgagatggaagaactatctaagaccaaatatcaaaagaggaagcatgtcaccacaagaacaagaccttatcatccgcatgcataagcttcttggaaacagatggtcgttgatcgctggtcgccttccaggtcgtactgacaatgaagtgaagaactactggaatactcatttgaacaagaaacctaattcccgaagacagaatgcacctgaatcaatcgtcggcgccactcctttcacggataagccagttatgtctacagaactgagaagaagccatggagaaggaggagaagaggagagcaatacctggatggaggagaccaaccactttggctatgacgtccacgtaggatctcccttgccacttatttcccactacccagacaacactctcgtgtttgacccatgtttttcctttaccgatttctttcctctgctttaggactttcctggatttatctcgaaggataaattcttgcatagacttttcgagtcattatgttattattgctttacttatacaatttacatcgagtt

SEQ ID NO: 83546 - protein, 201 aa, Arabidopsis thaliana
  peptide (1)..(201): Ceres Seq. ID no. 12670748
  misc_feature (14)..(61): Pfam Name: Myb-like DNA-binding domain Pfam Description: Myb-like DNA-binding domain
  misc_feature (1)..(201): Homolog of NCBI NO: 22327794 NR Description: similar to myb family transcription factor; id: At5g52600.1 [Arabidopsis thaliana]
  misc_feature (1)..(201): Homolog of NCBI NO: 6491896 NR Description: MYB82 [Arabidopsis thaliana]
  misc_feature (72)..(201): Homolog of NCBI NO: 11358688 NR Description: probable transcription factor MYB82 [imported] - thaliana (fragment) >gi|3941516|gb|AAC83634.1| putative
  misc_feature (4)..(177): Homolog of NCBI NO: 9954118 NR Description: tuber-specific and sucrose-responsive element
  misc_feature (6)..(126): Homolog of NCBI NO: 15241488 NR Description: myb family transcription factor; protein id: [Arabidopsis thaliana] >gi|11273997|pir||T51420 myb transcription
  misc_feature (3)..(124): Homolog of NCBI NO: 13346186 NR Description: GHMYB10 [Gossypium hirsutum]
  misc_feature (6)..(126): Homolog of NCBI NO: 20514371 NR Description: werewolf [Cucumis sativus]
  misc_feature (3)..(122): Homolog of NCBI NO: 13346192 NR Description: GHMYB38 [Gossypium hirsutum]
  misc_feature (3)..(132): Homolog of NCBI NO: 7438351 NR Description: anthocyanin biosynthesis regulatory protein -
  misc_feature (7)..(115): Homolog of NCBI NO: 15242649 NR Description: myb-related protein; protein id: At5g40330.1
MECKREEGKSYVKRGLWKPEEDMILKSYVETHGEGNWADISRRSGLKRGGKSCRLRWKNYLRPNIKRGSMSPQEQDLIIRMHKLLGNRWSLIAGRLPGRTDNEVKNYWNTHLNKKPNSRRQNAPESIVGATPFTDKPVMSTELRRSHGEGGEEESNTWMEETNHFGYDVHVGSPLPLISHYPDNTLVFDPCFSFTDFFPLL

SEQ ID NO: 83547 - protein, 179 aa, Arabidopsis thaliana
  peptide (1)..(179): Ceres Seq. ID no. 12670749
  misc_feature (1)..(39): Pfam Name: Myb-like DNA-binding domain Pfam Description: Myb-like DNA-binding domain
  misc_feature (1)..(179): Homolog of NCBI NO: 22327794 NR Description: similar to myb family transcription factor; id: At5g52600.1 [Arabidopsis thaliana]
  misc_feature (1)..(179): Homolog of NCBI NO: 6491896 NR Description: MYB82 [Arabidopsis thaliana]
  misc_feature (50)..(179): Homolog of NCBI NO: 11358688 NR Description: probable transcription factor MYB82 [imported] - thaliana (fragment) >gi|3941516|gb|AAC83634.1| putative
  misc_feature (1)..(155): Homolog of NCBI NO: 9954118 NR Description: tuber-specific and sucrose-responsive element
  misc_feature (1)..(104): Homolog of NCBI NO: 15241488 NR Description: myb family transcription factor; protein id: [Arabidopsis thaliana] >gi|11273997|pir||T51420 myb transcription
  misc_feature (1)..(102): Homolog of NCBI NO: 13346186 NR Description: GHMYB10 [Gossypium hirsutum]
  misc_feature (1)..(104): Homolog of NCBI NO: 20514371 NR Description: werewolf [Cucumis sativus]
  misc_feature (1)..(100): Homolog of NCBI NO: 13346192 NR Description: GHMYB38 [Gossypium hirsutum]
  misc_feature (1)..(110): Homolog of NCBI NO: 7438351 NR Description: anthocyanin biosynthesis regulatory protein -
  misc_feature (1)..(93): Homolog of NCBI NO: 15242649 NR Description: myb-related protein; protein id: At5g40330.1
MILKSYVETHGEGNWADISRRSGLKRGGKSCRLRWKNYLRPNIKRGSMSPQEQDLIIRMHKLLGNRWSLIAGRLPGRTDNEVKNYWNTHLNKKPNSRRQNAPESIVGATPFTDKPVMSTELRRSHGEGGEEESNTWMEETNHFGYDVHVGSPLPLISHYPDNTLVFDPCFSFTDFFPLL

SEQ ID NO: 83548 - protein, 132 aa, Arabidopsis thaliana
  peptide (1)..(132): Ceres Seq. ID no. 12670750
  misc_feature (1)..(132): Homolog of NCBI NO: 22327794 NR Description: similar to myb family transcription factor; id: At5g52600.1 [Arabidopsis thaliana]
  misc_feature (1)..(132): Homolog of NCBI NO: 6491896 NR Description: MYB82 [Arabidopsis thaliana]
  misc_feature (3)..(132): Homolog of NCBI NO: 11358688 NR Description: probable transcription factor MYB82 [imported] - thaliana (fragment) >gi|3941516|gb|AAC83634.1| putative
  misc_feature (1)..(108): Homolog of NCBI NO: 9954118 NR Description: tuber-specific and sucrose-responsive element
  misc_feature (1)..(57): Homolog of NCBI NO: 15241488 NR Description: myb family transcription factor; protein id: [Arabidopsis thaliana] >gi|11273997|pir||T51420 myb transcription
  misc_feature (1)..(55): Homolog of NCBI NO: 13346186 NR Description: GHMYB10 [Gossypium hirsutum]
  misc_feature (1)..(57): Homolog of NCBI NO: 20514371 NR Description: werewolf [Cucumis sativus]
  misc_feature (1)..(53): Homolog of NCBI NO: 13346192 NR Description: GHMYB38 [Gossypium hirsutum]
  misc_feature (1)..(63): Homolog of NCBI NO: 7438351 NR Description: anthocyanin biosynthesis regulatory protein -
  misc_feature (1)..(46): Homolog of NCBI NO: 15242649 NR Description: myb-related protein; protein id: At5g40330.1
MSPQEQDLIIRMHKLLGNRWSLIAGRLPGRTDNEVKNYWNTHLNKKPNSRRQNAPESIVGATPFTDKPVMSTELRRSHGEGGEEESNTWMEETNHFGYDVHVGSPLPLISHYPDNTLVFDPCFSFTDFFPLL

SEQ ID NO: 83549 - DNA, 1065 bp, Arabidopsis thaliana
  misc_feature (1)..(1065): Ceres Seq. ID no. 12670772
  misc_feature: MA Experiment ID: 20000179 Result: Down-regulated in Transcription
  misc_feature: MA Experiment 20000179 PARAMETER Experiment Name: At_Germinating_Seeds_P Parameter: Age (hr) Value: 6 vs. 0
  misc_feature: MA Experiment 20000179 PARAMETER Experiment Name: At_Germinating_Seeds_P Parameter: Tissue Value: Germinating Seeds
  misc_feature: MA Experiment ID: 20000180 Result: Down-regulated in Transcription
  misc_feature: MA Experiment 20000180 PARAMETER Experiment Name: At_Germinating_Seeds_P Parameter: Age (hr) Value: 24 vs. 0
  misc_feature: MA Experiment 20000180 PARAMETER Experiment Name: At_Germinating_Seeds_P Parameter: Tissue Value: Germinating Seeds
  misc_feature: MA Experiment ID: 20000185 Result: Up-regulated in Transcription
  misc_feature: MA Experiment 20000185 PARAMETER Experiment Name: At_Roots__P Parameter: Age (day) Value: 7 vs. 21
  misc_feature: MA Experiment 20000185 PARAMETER Experiment Name: At_Roots__P Parameter: Organism Value: A. thaliana
  misc_feature: MA Experiment 20000185 PARAMETER Experiment Name: At_Roots__P Parameter: Tissue Value: Roots vs. Whole Plant
  misc_feature: MA Experiment ID: 20000495 Result: Down-regulated in Transcription
  misc_feature: MA Experiment 20000495 PARAMETER Experiment Name: At_Guard_Cells_P Parameter: Harvest Date Value: 8/2/2002
  misc_feature: MA Experiment 20000495 PARAMETER Experiment Name: At_Guard_Cells_P Parameter: Organism Value: A. thaliana
  misc_feature: MA Experiment 20000495 PARAMETER Experiment Name: At_Guard_Cells_P Parameter: Tissue Value: Guard Cells vs. Leaves
  misc_feature: MA Experiment ID: 20001557 Result: Up-regulated in Transcription
  misc_feature: MA Experiment 20001557 PARAMETER Experiment Name: At_Drought_Soil_Dry_P Parameter: Age (day) Value: 27
  misc_feature: MA Experiment 20001557 PARAMETER Experiment Name: At_Drought_Soil_Dry_P Parameter: Organism Value: A. thaliana
  misc_feature: MA Experiment 20001557 PARAMETER Experiment Name: At_Drought_Soil_Dry_P Parameter: Plant Line Value: WS
  misc_feature: MA Experiment 20001557 PARAMETER Experiment Name: At_Drought_Soil_Dry_P Parameter: Post Timepoint (hr) Value: 3
  misc_feature: MA Experiment 20001557 PARAMETER Experiment Name: At_Drought_Soil_Dry_P Parameter: Post-Treatment Value: Re-Water vs. No Drought
  misc_feature: MA Experiment 20001557 PARAMETER Experiment Name: At_Drought_Soil_Dry_P Parameter: Timepoint (day) Value: 13
  misc_feature: MA Experiment 20001557 PARAMETER Experiment Name: At_Drought_Soil_Dry_P Parameter: Treatment Value: Drought vs. No Drought
atggacgaatatattgatttccgaccattgaagtacacagagcacaagacttcaatgactaaatacaccaaaaagtcatcggaaaaactttccggtggtaagtcattgaaaaaggttagtatttgttatactgatcctgacgcaacagattcatcaagtgacgaagacgaagaagatttcttgtttcctcgccggagagtcaaaagattcgttaacgagatcactgttgagcctagctgtaacaacgtcgtcaccggagtttcgatgaaagatagaaagagactctcttcttcctccgatgaaactcaatctccggcgtcgagtcgtcaacgtcctaataacaaagtttcagtctccggtcagataaagaagttccgtggtgttagacaacggccatgggggaaatgggcggcggagattagagatccggagcaacgtcggaggatttggctcgggacttttgagacggcggaggaagctgccgtggtttatgataacgccgctataagactccgtggaccggacgctttaactaatttctccataccgcctcaagaagaggaagaagaagaagaaccggaaccggttattgaggagaaaccggttattatgacgacgccaacaccaacaacatcgagttctgaatcaactgaagaagatttacaacatctctcatctcctacttcggttctcaatcaccggtcagaagagattcaacaagtacaacaaccgtttaaatcagctaaacccgaaccgggggtttcaaatgcaccatggtggcataccgggtttaataccggtttaggtgaatcagacgattcatttcctttggatactccgtttcttgacaactatttcaatgaatcaccaccagagatgtcaatatttgaccaaccaatggatcaaattttctgtgaaaatgatgatatcttcaatgatatgttgttcttgggtggtgaaactatgaacattgaagatgagttaacaagttctagtatcaaagatatgggttcaacgtttagtgattttgatgattcattgatatcagatctattagttgcttaa

SEQ ID NO: 83550 - protein, 354 aa, Arabidopsis thaliana
  peptide (1)..(354): Ceres Seq. ID no. 12670773
  misc_feature (122)..(186): Pfam Name: AP2 domain Pfam Description: AP2 domain
  misc_feature (1)..(354): Homolog of NCBI NO: 15238705 NR Description: putative protein; protein id: At5g53290.1
  misc_feature (1)..(353): Homolog of NCBI NO: 15234337 NR Description: putative protein; protein id: At4g27950.1
  misc_feature (10)..(285): Homolog of NCBI NO: 15236595 NR Description: putative Ap2 domain protein; protein id: supported by cDNA: gi_15982736 [Arabidopsis thaliana]
  misc_feature (10)..(285): Homolog of NCBI NO: 22655200 NR Description: putative Ap2 domain protein [Arabidopsis thaliana]
  misc_feature (32)..(231): Homolog of NCBI NO: 34904146 NR Description: unnamed protein product [Oryza sativa (japonica group)] >gi|8096469|dbj|BAA94514.2| unnamed protein product
  misc_feature (35)..(285): Homolog of NCBI NO: 15237053 NR Description: putative Ap2 domain protein; protein id:
  misc_feature (37)..(250): Homolog of NCBI NO: 15225959 NR Description: putative AP2 domain transcription factor; protein At2g46310.1, supported by cDNA: gi_18491258 [Arabidopsis >gi|25347738|pir||C84901 probable AP2 domain transcription factor
  misc_feature (14)..(242): Homolog of NCBI NO: 15233169 NR Description: putative protein; protein id: At3g61630.1, by cDNA: 100688. [Arabidopsis thaliana] >gi|11281604|pir||T47955
  misc_feature (39)..(231): Homolog of NCBI NO: 34898320 NR Description: Similar to Nicotiana tabacum mRNA for ERF1,
  misc_feature (39)..(190): Homolog of NCBI NO: 18409769 NR Description: expressed protein; protein id: At1g71130.1, by cDNA: 19578. [Arabidopsis thaliana] >gi|25406103|pir||H96735
MDEYIDFRPLKYTEHKTSMTKYTKKSSEKLSGGKSLKKVSICYTDPDATDSSSDEDEEDFLFPRRRVKRFVNEITVEPSCNNVVTGVSMKDRKRLSSSSDETQSPASSRQRPNNKVSVSGQIKKFRGVRQRPWGKWAAEIRDPEQRRRIWLGTFETAEEAAVVYDNAAIRLRGPDALTNFSIPPQEEEEEEEPEPVIEEKPVIMTTPTPTTSSSESTEEDLQHLSSPTSVLNHRSEEIQQVQQPFKSAKPEPGVSNAPWWHTGFNTGLGESDDSFPLDTPFLDNYFNESPPEMSIFDQPMDQIFCENDDIFNDMLFLGGETMNIEDELTSSSIKDMGSTFSDFDDSLISDLLVA

SEQ ID NO: 83551 - protein, 336 aa, Arabidopsis thaliana
  peptide (1)..(336): Ceres Seq. ID no. 12670774
  misc_feature (104)..(168): Pfam Name: AP2 domain Pfam Description: AP2 domain
  misc_feature (1)..(336): Homolog of NCBI NO: 15238705 NR Description: putative protein; protein id: At5g53290.1
  misc_feature (1)..(335): Homolog of NCBI NO: 15234337 NR Description: putative protein; protein id: At4g27950.1
  misc_feature (1)..(267): Homolog of NCBI NO: 15236595 NR Description: putative Ap2 domain protein; protein id: supported by cDNA: gi_15982736 [Arabidopsis thaliana]
  misc_feature (1)..(267): Homolog of NCBI NO: 22655200 NR Description: putative Ap2 domain protein [Arabidopsis thaliana]
  misc_feature (14)..(213): Homolog of NCBI NO: 34904146 NR Description: unnamed protein product [Oryza sativa (japonica group)] >gi|8096469|dbj|BAA94514.2| unnamed protein product
  misc_feature (17)..(267): Homolog of NCBI NO: 15237053 NR Description: putative Ap2 domain protein; protein id:
  misc_feature (19)..(232): Homolog of NCBI NO: 15225959 NR Description: putative AP2 domain transcription factor; protein At2g46310.1, supported by cDNA: gi_18491258 [Arabidopsis >gi|25347738|pir||C84901 probable AP2 domain transcription factor
  misc_feature (1)..(224): Homolog of NCBI NO: 15233169 NR Description: putative protein; protein id: At3g61630.1, by cDNA: 100688. [Arabidopsis thaliana] >gi|11281604|pir||T47955
  misc_feature (21)..(213): Homolog of NCBI NO: 34898320 NR Description: Similar to Nicotiana tabacum mRNA for ERF1,
  misc_feature (21)..(172): Homolog of NCBI NO: 18409769 NR Description: expressed protein; protein id: At1g71130.1, by cDNA: 19578. [Arabidopsis thaliana] >gi|25406103|pir||H96735
MTKYTKKSSEKLSGGKSLKKVSICYTDPDATDSSSDEDEEDFLFPRRRVKRFVNEITVEPSCNNVVTGVSMKDRKRLSSSSDETQSPASSRQRPNNKVSVSGQIKKFRGVRQRPWGKWAAEIRDPEQRRRIWLGTFETAEEAAVVYDNAAIRLRGPDALTNFSIPPQEEEEEEEPEPVIEEKPVIMTTPTPTTSSSESTEEDLQHLSSPTSVLNHRSEEIQQVQQPFKSAKPEPGVSNAPWWHTGFNTGLGESDDSFPLDTPFLDNYFNESPPEMSIFDQPMDQIFCENDDIFNDMLFLGGETMNIEDELTSSSIKDMGSTFSDFDDSLISDLLVA

SEQ ID NO: 83552 - protein, 266 aa, Arabidopsis thaliana
  peptide (1)..(266): Ceres Seq. ID no. 12670775
  misc_feature (34)..(98): Pfam Name: AP2 domain Pfam Description: AP2 domain
  misc_feature (1)..(266): Homolog of NCBI NO: 15238705 NR Description: putative protein; protein id: At5g53290.1
  misc_feature (1)..(265): Homolog of NCBI NO: 15234337 NR Description: putative protein; protein id: At4g27950.1
  misc_feature (1)..(197): Homolog of NCBI NO: 15236595 NR Description: putative Ap2 domain protein; protein id: supported by cDNA: gi_15982736 [Arabidopsis thaliana]
  misc_feature (1)..(197): Homolog of NCBI NO: 22655200 NR Description: putative Ap2 domain protein [Arabidopsis thaliana]
  misc_feature (1)..(143): Homolog of NCBI NO: 34904146 NR Description: unnamed protein product [Oryza sativa (japonica group)] >gi|8096469|dbj|BAA94514.2| unnamed protein product
  misc_feature (1)..(197): Homolog of NCBI NO: 15237053 NR Description: putative Ap2 domain protein; protein id:
  misc_feature (1)..(162): Homolog of NCBI NO: 15225959 NR Description: putative AP2 domain transcription factor; protein At2g46310.1, supported by cDNA: gi_18491258 [Arabidopsis >gi|25347738|pir||C84901 probable AP2 domain transcription factor
  misc_feature (1)..(154): Homolog of NCBI NO: 15233169 NR Description: putative protein; protein id: At3g61630.1, by cDNA: 100688. [Arabidopsis thaliana] >gi|11281604|pir||T47955
  misc_feature (1)..(143): Homolog of NCBI NO: 34898320 NR Description: Similar to Nicotiana tabacum mRNA for ERF1,
  misc_feature (1)..(102): Homolog of NCBI NO: 18409769 NR Description: expressed protein; protein id: At1g71130.1, by cDNA: 19578. [Arabidopsis thaliana] >gi|25406103|pir||H96735
MKDRKRLSSSSDETQSPASSRQRPNNKVSVSGQIKKFRGVRQRPWGKWAAEIRDPEQRRRIWLGTFETAEEAAVVYDNAAIRLRGPDALTNFSIPPQEEEEEEEPEPVIEEKPVIMTTPTPTTSSSESTEEDLQHLSSPTSVLNHRSEEIQQVQQPFKSAKPEPGVSNAPWWHTGFNTGLGESDDSFPLDTPFLDNYFNESPPEMSIFDQPMDQIFCENDDIFNDMLFLGGETMNIEDELTSSSIKDMGSTFSDFDDSLISDLLVA

SEQ ID NO: 83553 - DNA, 633 bp, Arabidopsis thaliana
  misc_feature (1)..(633): Ceres Seq. ID no. 12670780
  misc_feature: MA Experiment ID: 20000227 Result: Up-regulated in Transcription
  misc_feature: MA Experiment 20000227 PARAMETER Experiment Name: At_Root-Tips-vs-Tops_P Parameter: Tissue Value: Root Tips vs. Root Tops
atgtcggacatggatgatgaaatcacgaggattttcaaggtgcgtcgcacggtgcttcagatgctgagggatcgaggttacactatagaagaatcggacttgaacttgaaaagagaagagtttgttcagaggttttgtaaaactatgaacaaagtgaacaaggaagctcttttcgtctcagccaataaggggccaaatccagccgacaagatttacgtgttctacccggaagggcctaaggtgggagtcccagtgattaagaaggaagtggcaataaagatgcgagacgataaagttcatcgagggatcgtagttgttccaatggccataactgctcccgctagaatggccgtatcagaactcaacaagatgctaacgattgaagtctttgaggaagctgaattggtgaccaacatcactgagcataaactcgtcaacaagtactatgttctcgacgatcaagcaaagaagaaattactcaacacgtacacggtgcaagacacacagttgcctcgcatccttgtcactgatcctcttgccagatactatggactcaagcgaggacaagttgtcaagatcagacgaagcgatgctacttcattggactattatacctaccgatttgctgtttga

SEQ ID NO: 83554 - protein, 210 aa, Arabidopsis thaliana
  peptide (1)..(210): Ceres Seq. ID no. 12670781
  misc_feature (4)..(95): Pfam Name: RNA polymerase Rpb5, N-terminal domain Pfam Description: RNA polymerase Rpb5, N-terminal domain
  misc_feature (1)..(210): Homolog of NCBI NO: 15242916 NR Description: RNA polymerase I, II and III 24.3 kDa protein; protein id: At5g57980.1 [Arabidopsis thaliana]
  misc_feature (5)..(210): Homolog of NCBI NO: 38344231 NR Description: OJ991113_30.8 [Oryza sativa (japonica
  misc_feature (5)..(210): Homolog of NCBI NO: 15228724 NR Description: RNA polymerase I, II and III 24.3 kDa subunit; id: At3g22320.1, supported by cDNA: 21828., supported by cDNA: supported by cDNA: gi_15724321, supported by cDNA: gi_3372232
  misc_feature (1)..(210): Homolog of NCBI NO: 39595790 NR Description: Hypothetical protein CBG12745 [Caenorhabditis
  misc_feature (1)..(210): Homolog of NCBI NO: 17507947 NR Description: RNA polymerase Rpb5, N-terminal domain and RNA
  misc_feature (4)..(207): Homolog of NCBI NO: 19922004 NR Description: CG11979-PA [Drosophila melanogaster]
  misc_feature (3)..(207): Homolog of NCBI NO: 1173134 NR Description: DNA-directed RNA polymerase II 23 kDa polypeptide
  misc_feature (3)..(207): Homolog of NCBI NO: 28497750 NR Description: polymerase (RNA) II (DNA directed) polypeptide E musculus] >gi|28374319|gb|AAH45521.1| similar to DNA directed RNA
  misc_feature (3)..(207): Homolog of NCBI NO: 2135016 NR Description: DNA-directed RNA polymerase (EC 2.7.7.6) II 23K
  misc_feature (3)..(207): Homolog of NCBI NO: 14589951 NR Description: DNA directed RNA polymerase II polypeptide E; (RNA) II (DNA directed) polypeptide E (25kD); DNA directed RNA II 23 kda polypeptide [Homo sapiens] >gi|678549|gb|AAA62401.1|
MSDMDDEITRIFKVRRTVLQMLRDRGYTIEESDLNLKREEFVQRFCKTMNKVNKEALFVSANKGPNPADKIYVFYPEGPKVGVPVIKKEVAIKMRDDKVHRGIVVVPMAITAPARMAVSELNKMLTIEVFEEAELVTNITEHKLVNKYYVLDDQAKKKLLNTYTVQDTQLPRILVTDPLARYYGLKRGQVVKIRRSDATSLDYYTYRFAV

SEQ ID NO: 83555 - protein, 207 aa, Arabidopsis thaliana
  peptide (1)..(207): Ceres Seq. ID no. 12670782
  misc_feature (1)..(92): Pfam Name: RNA polymerase Rpb5, N-terminal domain Pfam Description: RNA polymerase Rpb5, N-terminal domain
  misc_feature (1)..(207): Homolog of NCBI NO: 15242916 NR Description: RNA polymerase I, II and III 24.3 kDa protein; protein id: At5g57980.1 [Arabidopsis thaliana]
  misc_feature (2)..(207): Homolog of NCBI NO: 38344231 NR Description: OJ991113_30.8 [Oryza sativa (japonica
  misc_feature (2)..(207): Homolog of NCBI NO: 15228724 NR Description: RNA polymerase I, II and III 24.3 kDa subunit; id: At3g22320.1, supported by cDNA: 21828., supported by cDNA: supported by cDNA: gi_15724321, supported by cDNA: gi_3372232
  misc_feature (1)..(207): Homolog of NCBI NO: 39595790 NR Description: Hypothetical protein CBG12745 [Caenorhabditis
  misc_feature (1)..(207): Homolog of NCBI NO: 17507947 NR Description: RNA polymerase Rpb5, N-terminal domain and RNA
  misc_feature (1)..(204): Homolog of NCBI NO: 19922004 NR Description: CG11979-PA [Drosophila melanogaster]
  misc_feature (1)..(204): Homolog of NCBI NO: 1173134 NR Description: DNA-directed RNA polymerase II 23 kDa polypeptide
  misc_feature (1)..(204): Homolog of NCBI NO: 28497750 NR Description: polymerase (RNA) II (DNA directed) polypeptide E musculus] >gi|28374319|gb|AAH45521.1| similar to DNA directed RNA
  misc_feature (1)..(204): Homolog of NCBI NO: 2135016 NR Description: DNA-directed RNA polymerase (EC 2.7.7.6) II 23K
  misc_feature (1)..(204): Homolog of NCBI NO: 14589951 NR Description: DNA directed RNA polymerase II polypeptide E; (RNA) II (DNA directed) polypeptide E (25kD); DNA directed RNA II 23 kda polypeptide [Homo sapiens] >gi|678549|gb|AAA62401.1|
MDDEITRIFKVRRTVLQMLRDRGYTIEESDLNLKREEFVQRFCKTMNKVNKEALFVSANKGPNPADKIYVFYPEGPKVGVPVIKKEVAIKMRDDKVHRGIVVVPMAITAPARMAVSELNKMLTIEVFEEAELVTNITEHKLVNKYYVLDDQAKKKLLNTYTVQDTQLPRILVTDPLARYYGLKRGQVVKIRRSDATSLDYYTYRFAV

SEQ ID NO: 83556 - protein, 190 aa, Arabidopsis thaliana
  peptide (1)..(190): Ceres Seq. ID no. 12670783
  misc_feature (1)..(75): Pfam Name: RNA polymerase Rpb5, N-terminal domain Pfam Description: RNA polymerase Rpb5, N-terminal domain
  misc_feature (1)..(190): Homolog of NCBI NO: 15242916 NR Description: RNA polymerase I, II and III 24.3 kDa protein; protein id: At5g57980.1 [Arabidopsis thaliana]
  misc_feature (1)..(190): Homolog of NCBI NO: 38344231 NR Description: OJ991113_30.8 [Oryza sativa (japonica
  misc_feature (1)..(190): Homolog of NCBI NO: 15228724 NR Description: RNA polymerase I, II and III 24.3 kDa subunit; id: At3g22320.1, supported by cDNA: 21828., supported by cDNA: supported by cDNA: gi_15724321, supported by cDNA: gi_3372232
  misc_feature (1)..(190): Homolog of NCBI NO: 39595790 NR Description: Hypothetical protein CBG12745 [Caenorhabditis
  misc_feature (1)..(190): Homolog of NCBI NO: 17507947 NR Description: RNA polymerase Rpb5, N-terminal domain and RNA
  misc_feature (1)..(187): Homolog of NCBI NO: 19922004 NR Description: CG11979-PA [Drosophila melanogaster]
  misc_feature (1)..(187): Homolog of NCBI NO: 1173134 NR Description: DNA-directed RNA polymerase II 23 kDa polypeptide
  misc_feature (1)..(187): Homolog of NCBI NO: 28497750 NR Description: polymerase (RNA) II (DNA directed) polypeptide E musculus] >gi|28374319|gb|AAH45521.1| similar to DNA directed RNA
  misc_feature (1)..(187): Homolog of NCBI NO: 2135016 NR Description: DNA-directed RNA polymerase (EC 2.7.7.6) II 23K
  misc_feature (1)..(187): Homolog of NCBI NO: 14589951 NR Description: DNA directed RNA polymerase II polypeptide E; (RNA) II (DNA directed) polypeptide E (25kD); DNA directed RNA II 23 kda polypeptide [Homo sapiens] >gi|678549|gb|AAA62401.1|
MLRDRGYTIEESDLNLKREEFVQRFCKTMNKVNKEALFVSANKGPNPADKIYVFYPEGPKVGVPVIKKEVAIKMRDDKVHRGIVVVPMAITAPARMAVSELNKMLTIEVFEEAELVTNITEHKLVNKYYVLDDQAKKKLLNTYTVQDTQLPRILVTDPLARYYGLKRGQVVKIRRSDATSLDYYTYRFAV

SEQ ID NO: 83557 - DNA, 1963 bp, Arabidopsis thaliana
  misc_feature (1)..(1963): Ceres Seq. ID no. 12670798
  misc_feature: MA Experiment ID: 20000436 Result: Up-regulated in Transcription
  misc_feature: MA Experiment 20000436 PARAMETER Experiment Name: At_Drought_P Parameter: Age (day) Value: 7
  misc_feature: MA Experiment 20000436 PARAMETER Experiment Name: At_Drought_P Parameter: Organism Value: A. thaliana
  misc_feature: MA Experiment 20000436 PARAMETER Experiment Name: At_Drought_P Parameter: Plant Line Value: WS
  misc_feature: MA Experiment 20000436 PARAMETER Experiment Name: At_Drought_P Parameter: Timepoint (hr) Value: 12
  misc_feature: MA Experiment 20000436 PARAMETER Experiment Name: At_Drought_P Parameter: Tissue Value: Whole Plant
  misc_feature: MA Experiment 20000436 PARAMETER Experiment Name: At_Drought_P Parameter: Treatment Value: Drought vs. No Drought
  misc_feature: MA Experiment ID: 20000437 Result: Up-regulated in Transcription
  misc_feature: MA Experiment 20000437 PARAMETER Experiment Name: At_Drought_P Parameter: Age (day) Value: 8
  misc_feature: MA Experiment 20000437 PARAMETER Experiment Name: At_Drought_P Parameter: Organism Value: A. thaliana
  misc_feature: MA Experiment 20000437 PARAMETER Experiment Name: At_Drought_P Parameter: Plant Line Value: WS
  misc_feature: MA Experiment 20000437 PARAMETER Experiment Name: At_Drought_P Parameter: Timepoint (hr) Value: 24
  misc_feature: MA Experiment 20000437 PARAMETER Experiment Name: At_Drought_P Parameter: Tissue Value: Whole Plant
  misc_feature: MA Experiment 20000437 PARAMETER Experiment Name: At_Drought_P Parameter: Treatment Value: Drought vs. No Drought
  misc_feature: MA Experiment ID: 20001904 Result: Up-regulated in Transcription
  misc_feature: MA Experiment 20001904 PARAMETER Experiment Name: At_Drought_Reproduction_P Parameter: Age (day) Value: 37
  misc_feature: MA Experiment 20001904 PARAMETER Experiment Name: At_Drought_Reproduction_P Parameter: Organism Value: A. thaliana
  misc_feature: MA Experiment 20001904 PARAMETER Experiment Name: At_Drought_Reproduction_P Parameter: Plant Line Value: WS
  misc_feature: MA Experiment 20001904 PARAMETER Experiment Name: At_Drought_Reproduction_P Parameter: Timepoint (day) Value: 7
  misc_feature: MA Experiment 20001904 PARAMETER Experiment Name: At_Drought_Reproduction_P Parameter: Tissue Value: Rosettes
  misc_feature: MA Experiment 20001904 PARAMETER Experiment Name: At_Drought_Reproduction_P Parameter: Treatment Value: Drought vs. No Drought
  misc_feature: MA Experiment ID: 20001905 Result: Up-regulated in Transcription
  misc_feature: MA Experiment 20001905 PARAMETER Experiment Name: At_Drought_Reproduction_P Parameter: Age (day) Value: 40
  misc_feature: MA Experiment 20001905 PARAMETER Experiment Name: At_Drought_Reproduction_P Parameter: Organism Value: A. thaliana
  misc_feature: MA Experiment 20001905 PARAMETER Experiment Name: At_Drought_Reproduction_P Parameter: Plant Line Value: WS
  misc_feature: MA Experiment 20001905 PARAMETER Experiment Name: At_Drought_Reproduction_P Parameter: Timepoint (day) Value: 10
  misc_feature: MA Experiment 20001905 PARAMETER Experiment Name: At_Drought_Reproduction_P Parameter: Tissue Value: Rosettes
  misc_feature: MA Experiment 20001905 PARAMETER Experiment Name: At_Drought_Reproduction_P Parameter: Treatment Value: Drought vs. No Drought
  misc_feature: MA Experiment ID: 20001910 Result: Up-regulated in Transcription
  misc_feature: MA Experiment 20001910 PARAMETER Experiment Name: At_Drought_Reproduction_P Parameter: Age (day) Value: 37
  misc_feature: MA Experiment 20001910 PARAMETER Experiment Name: At_Drought_Reproduction_P Parameter: Organism Value: A. thaliana
  misc_feature: MA Experiment 20001910 PARAMETER Experiment Name: At_Drought_Reproduction_P Parameter: Plant Line Value: WS
  misc_feature: MA Experiment 20001910 PARAMETER Experiment Name: At_Drought_Reproduction_P Parameter: Timepoint (day) Value: 7
  misc_feature: MA Experiment 20001910 PARAMETER Experiment Name: At_Drought_Reproduction_P Parameter: Tissue Value: Flowers
  misc_feature: MA Experiment 20001910 PARAMETER Experiment Name: At_Drought_Reproduction_P Parameter: Treatment Value: Drought vs. No Drought
gtggaccgccaatgacgtttaacttcgttttcatctcttcttcttcttcttcttccgtcttctcctccatttttgttggtaaacccagaaagaaataaggaagagaaggggcctttaggggcggatagagagatctacacgtctttctactagatctcggattcattcccagaatcctctttcctcaccggctcaattctaccaagtttctaagaggtttattcatattcggcatagaaactcagaaatggtggaggatgtgtcctcctatcactaggggattagctgcacgagctcatgaggttatgactcatgagctacctccaactctgagctatctctggatcaagtagtttttttttttttggagcctgttataagtttgtagattagatggaaaataagccaagtgttttgactgataaatatgatgttgggaggttattgggtcaaggtacttttgccaaggtgtattatggaaggagtattcttactaaccagagtgttgctatcaagatgatcgataaggaaaaggttatgaaagttgggcttatcgaacagatcaagagagagatctctgttatgaggattgctagacaccctaacgttgtggagctatatgaggtcatggcaacaaaaacgaggatctactttgttatggagtattgtaaaggtggagagcttttcaacaaggttgccaaagggaaattgagagatgatgttgcttggaaatacttttatcagcttatcaacgcagttgatttttgccacagccgagaggtgtatcatcgtgacataaagccggagaacctattgctagatgataatgagaatctcaaggtatctgatttcgggttaagcgcccttgctgactgcaagagacaagatggcctcctccacactacttgtggtacacctgcatatgttgctccagaagtgatcaatcgaaaaggctatgatggcacaaaagcagatatttggtcttgtggtgtggttttgtttgtcctattggcaggctatctacctttccatgactccaatctgatggagatgtacaggaagataggaaaagcagattttaaggcaccaagctggtttgctccagaagtacggaggctgttgtgtaagatgctagaccctaaccctgaaactagaatcaccatcgcaagaatcagggagagttcttggttcagaaaaggtttacatatgaaacagaaaaagatggagaaacgagtcaaagagataaactctgtggaagctggtactgcaggtacaaatgagaacggagcaggtccaagtgagaatggagcaggtccaagtgaaaacggagacagggtcacggaggaaaaccatacagacgaacctacaaatttgaacgcttttgatttaattgccttgtctgctgggtttgatctggcaggactgtttggagatgataacaagagagaatctagattcacatcacagaaacctgcttcagtgatcatatctaagctggaggaagtagcacagcgattgaaactgagcataagaaagcgagaagcaggtttgttcaaattggaacgattaaaagaaggaagaaaagggattctgtcgatggatgcagaaatatttcaagtgacgccaaactttcatttagtggaagtgaagaaatcaaatggagatactctcgagtatcagaaattagtagcagaggatcttagacctgctctgtcagatattgtatgggtttggcagggtgagaaagatgagcttacttcacagcaagagacagaataccaacaacaacaacaacaagaacaacaagaacaggaagaaccattgaagttttgaaatttgttcttgtcaagtttttggaattttgcttaacactgaatcactgatgttaatcgtatatgagtttcttacatttttaatttgtggaaaaaaggaatccatcataatataaagaagtcgtttaaag

SEQ ID NO: 83558 - protein, 479 aa, Arabidopsis thaliana
  peptide (1)..(479): Ceres Seq. ID no. 12670799
  misc_feature (12)..(266): Pfam Name: Protein kinase domain Pfam Description: Protein kinase domain
  misc_feature (1)..(479): Homolog of NCBI NO: 18424099 NR Description: serine/threonine protein kinase; protein id: supported by cDNA: gi_13249118, supported by cDNA: gi_13448028, by cDNA: gi_20453091 [Arabidopsis thaliana]
  misc_feature (1)..(479): Homolog of NCBI NO: 8777339 NR Description: serine/threonine protein kinase [Arabidopsis
  misc_feature (1)..(468): Homolog of NCBI NO: 15240687 NR Description: serine threonine protein kinase-like protein; id: At5g07070.1, supported by cDNA: gi_9280635 [Arabidopsis
  misc_feature (1)..(468): Homolog of NCBI NO: 9280636 NR Description: CBL-interacting protein kinase 2 [Arabidopsis
  misc_feature (1)..(460): Homolog of NCBI NO: 23428550 NR Description: Serine/threonine Kinase [Persea americana]
  misc_feature (6)..(476): Homolog of NCBI NO: 34907870 NR Description: putative serine/threonine protein kinase [Oryza
  misc_feature (1)..(468): Homolog of NCBI NO: 7446373 NR Description: probable serine/threonine protein kinase (EC
  misc_feature (1)..(287): Homolog of NCBI NO: 15242509 NR Description: serine threonine protein kinase; protein id: supported by cDNA: gi_14486383 [Arabidopsis thaliana]
  misc_feature (323)..(458): Homolog of NCBI NO: 15242509 NR Description: serine threonine protein kinase; protein id: supported by cDNA: gi_14486383 [Arabidopsis thaliana]
  misc_feature (1)..(293): Homolog of NCBI NO: 15241066 NR Description: serine/threonine protein kinase ATPK10; protein At5g01810.1, supported by cDNA: gi_13249133, supported by cDNA: supported by cDNA: gi_1777311 [Arabidopsis thaliana]
MENKPSVLTDKYDVGRLLGQGTFAKVYYGRSILTNQSVAIKMIDKEKVMKVGLIEQIKREISVMRIARHPNVVELYEVMATKTRIYFVMEYCKGGELFNKVAKGKLRDDVAWKYFYQLINAVDFCHSREVYHRDIKPENLLLDDNENLKVSDFGLSALADCKRQDGLLHTTCGTPAYVAPEVINRKGYDGTKADIWSCGVVLFVLLAGYLPFHDSNLMEMYRKIGKADFKAPSWFAPEVRRLLCKMLDPNPETRITIARIRESSWFRKGLHMKQKKMEKRVKEINSVEAGTAGTNENGAGPSENGAGPSENGDRVTEENHTDEPTNLNAFDLIALSAGFDLAGLFGDDNKRESRFTSQKPASVIISKLEEVAQRLKLSIRKREAGLFKLERLKEGRKGILSMDAEIFQVTPNFHLVEVKKSNGDTLEYQKLVAEDLRPALSDIVWVWQGEKDELTSQQETEYQQQQQQEQQEQEEPLKF

SEQ ID NO: 83559 - protein, 438 aa, Arabidopsis thaliana
  peptide (1)..(438): Ceres Seq. ID no. 12670800
  misc_feature (1)..(225): Pfam Name: Protein kinase domain Pfam Description: Protein kinase domain
  misc_feature (1)..(438): Homolog of NCBI NO: 18424099 NR Description: serine/threonine protein kinase; protein id: supported by cDNA: gi_13249118, supported by cDNA: gi_13448028, by cDNA: gi_20453091 [Arabidopsis thaliana]
  misc_feature (1)..(438): Homolog of NCBI NO: 8777339 NR Description: serine/threonine protein kinase [Arabidopsis
  misc_feature (1)..(427): Homolog of NCBI NO: 15240687 NR Description: serine threonine protein kinase-like protein; id: At5g07070.1, supported by cDNA: gi_9280635 [Arabidopsis
  misc_feature (1)..(427): Homolog of NCBI NO: 9280636 NR Description: CBL-interacting protein kinase 2 [Arabidopsis
  misc_feature (1)..(419): Homolog of NCBI NO: 23428550 NR Description: Serine/threonine Kinase [Persea americana]
  misc_feature (1)..(435): Homolog of NCBI NO: 34907870 NR Description: putative serine/threonine protein kinase [Oryza
  misc_feature (1)..(427): Homolog of NCBI NO: 7446373 NR Description: probable serine/threonine protein kinase (EC
  misc_feature (1)..(246): Homolog of NCBI NO: 15242509 NR Description: serine threonine protein kinase; protein id: supported by cDNA: gi_14486383 [Arabidopsis thaliana]
  misc_feature (282)..(417): Homolog of NCBI NO: 15242509 NR Description: serine threonine protein kinase; protein id: supported by cDNA: gi_14486383 [Arabidopsis thaliana]
  misc_feature (1)..(252): Homolog of NCBI NO: 15241066 NR Description: serine/threonine protein kinase ATPK10; protein At5g01810.1, supported by cDNA: gi_13249133, supported by cDNA: supported by cDNA: gi_1777311 [Arabidopsis thaliana]
MIDKEKVMKVGLIEQIKREISVMRIARHPNVVELYEVMATKTRIYFVMEYCKGGELFNKVAKGKLRDDVAWKYFYQLINAVDFCHSREVYHRDIKPENLLLDDNENLKVSDFGLSALADCKRQDGLLHTTCGTPAYVAPEVINRKGYDGTKADIWSCGVVLFVLLAGYLPFHDSNLMEMYRKIGKADFKAPSWFAPEVRRLLCKMLDPNPETRITIARIRESSWFRKGLHMKQKKMEKRVKEINSVEAGTAGTNENGAGPSENGAGPSENGDRVTEENHTDEPTNLNAFDLIALSAGFDLAGLFGDDNKRESRFTSQKPASVIISKLEEVAQRLKLSIRKREAGLFKLERLKEGRKGILSMDAEIFQVTPNFHLVEVKKSNGDTLEYQKLVAEDLRPALSDIVWVWQGEKDELTSQQETEYQQQQQQEQQEQEEPLKF

SEQ ID NO: 83560 - protein, 431 aa, Arabidopsis thaliana
  peptide (1)..(431): Ceres Seq. ID no. 12670801
  misc_feature (1)..(218): Pfam Name: Protein kinase domain Pfam Description: Protein kinase domain
  misc_feature (1)..(431): Homolog of NCBI NO: 18424099 NR Description: serine/threonine protein kinase; protein id: supported by cDNA: gi_13249118, supported by cDNA: gi_13448028, by cDNA: gi_20453091 [Arabidopsis thaliana]
  misc_feature (1)..(431): Homolog of NCBI NO: 8777339 NR Description: serine/threonine protein kinase [Arabidopsis
  misc_feature (1)..(420): Homolog of NCBI NO: 15240687 NR Description: serine threonine protein kinase-like protein; id: At5g07070.1, supported by cDNA: gi_9280635 [Arabidopsis
  misc_feature (1)..(420): Homolog of NCBI NO: 9280636 NR Description: CBL-interacting protein kinase 2 [Arabidopsis
  misc_feature (1)..(412): Homolog of NCBI NO: 23428550 NR Description: Serine/threonine Kinase [Persea americana]
  misc_feature (1)..(428): Homolog of NCBI NO: 34907870 NR Description: putative serine/threonine protein kinase [Oryza
  misc_feature (1)..(420): Homolog of NCBI NO: 7446373 NR Description: probable serine/threonine protein kinase (EC
  misc_feature (1)..(239): Homolog of NCBI NO: 15242509 NR Description: serine threonine protein kinase; protein id: supported by cDNA: gi_14486383 [Arabidopsis thaliana]
  misc_feature (275)..(410): Homolog of NCBI NO: 15242509 NR Description: serine threonine protein kinase; protein id: supported by cDNA: gi_14486383 [Arabidopsis thaliana]
  misc_feature (1)..(245): Homolog of NCBI NO: 15241066 NR Description: serine/threonine protein kinase ATPK10; protein At5g01810.1, supported by cDNA: gi_13249133, supported by cDNA: supported by cDNA: gi_1777311 [Arabidopsis thaliana]
MKVGLIEQIKREISVMRIARHPNVVELYEVMATKTRIYFVMEYCKGGELFNKVAKGKLRDDVAWKYFYQLINAVDFCHSREVYHRDIKPENLLLDDNENLKVSDFGLSALADCKRQDGLLHTTCGTPAYVAPEVINRKGYDGTKADIWSCGVVLFVLLAGYLPFHDSNLMEMYRKIGKADFKAPSWFAPEVRRLLCKMLDPNPETRITIARIRESSWFRKGLHMKQKKMEKRVKEINSVEAGTAGTNENGAGPSENGAGPSENGDRVTEENHTDEPTNLNAFDLIALSAGFDLAGLFGDDNKRESRFTSQKPASVIISKLEEVAQRLKLSIRKREAGLFKLERLKEGRKGILSMDAEIFQVTPNFHLVEVKKSNGDTLEYQKLVAEDLRPALSDIVWVWQGEKDELTSQQETEYQQQQQQEQQEQEEPLKF

SEQ ID NO: 83561 - DNA, 549 bp, Arabidopsis thaliana
  misc_feature (1)..(549): Ceres Seq. ID no. 12670806
  misc_feature: MA Experiment ID: 20000173 Result: Down-regulated in Transcription
  misc_feature: MA Experiment 20000173 PARAMETER Experiment Name: At_42deg_Heat_P Parameter: Age (day) Value: 14
  misc_feature: MA Experiment 20000173 PARAMETER Experiment Name: At_42deg_Heat_P Parameter: Organism Value: A. thaliana
  misc_feature: MA Experiment 20000173 PARAMETER Experiment Name: At_42deg_Heat_P Parameter: Plant Line Value: WS
  misc_feature: MA Experiment 20000173 PARAMETER Experiment Name: At_42deg_Heat_P Parameter: Temperature (deg C) Value: 42 vs. 22
  misc_feature: MA Experiment 20000173 PARAMETER Experiment Name: At_42deg_Heat_P Parameter: Timepoint (hr) Value: 6
  misc_feature: MA Experiment 20000173 PARAMETER Experiment Name: At_42deg_Heat_P Parameter: Tissue Value: Aerial
  misc_feature: MA Experiment ID: 20000185 Result: Up-regulated in Transcription
  misc_feature: MA Experiment 20000185 PARAMETER Experiment Name: At_Roots__P Parameter: Age (day) Value: 7 vs. 21
  misc_feature: MA Experiment 20000185 PARAMETER Experiment Name: At_Roots__P Parameter: Organism Value: A. thaliana
  misc_feature: MA Experiment 20000185 PARAMETER Experiment Name: At_Roots__P Parameter: Tissue Value: Roots vs. Whole Plant
  misc_feature: MA Experiment ID: 20000227 Result: Down-regulated in Transcription
  misc_feature: MA Experiment 20000227 PARAMETER Experiment Name: At_Root-Tips-vs-Tops_P Parameter: Tissue Value: Root Tips vs. Root Tops
  misc_feature: MA Experiment ID: 20000234 Result: Up-regulated in Transcription
  misc_feature: MA Experiment 20000234 PARAMETER Experiment Name: At_Siliques_P Parameter: Age (day) Value: 21
  misc_feature: MA Experiment 20000234 PARAMETER Experiment Name: At_Siliques_P Parameter: Organism Value: A. thaliana
  misc_feature: MA Experiment 20000234 PARAMETER Experiment Name: At_Siliques_P Parameter: Plant Line Value: WS
  misc_feature: MA Experiment 20000234 PARAMETER Experiment Name: At_Siliques_P Parameter: Tissue Value: Less Than 5mm Siliques vs. Whole Plant
  misc_feature: MA Experiment ID: 20000235 Result: Up-regulated in Transcription
  misc_feature: MA Experiment 20000235 PARAMETER Experiment Name: At_Siliques_P Parameter: Age (day) Value: 21
  misc_feature: MA Experiment 20000235 PARAMETER Experiment Name: At_Siliques_P Parameter: Organism Value: A. thaliana
  misc_feature: MA Experiment 20000235 PARAMETER Experiment Name: At_Siliques_P Parameter: Plant Line Value: WS
  misc_feature: MA Experiment 20000235 PARAMETER Experiment Name: At_Siliques_P Parameter: Tissue Value: 5-10mm Siliques vs. Whole Plant
  misc_feature: MA Experiment ID: 20000264 Result: Down-regulated in Transcription
  misc_feature: MA Experiment 20000264 PARAMETER Experiment Name: At_Open_Flower_P Parameter: Age (day) Value: 21
  misc_feature: MA Experiment 20000264 PARAMETER Experiment Name: At_Open_Flower_P Parameter: Plant Line Value: WS
  misc_feature: MA Experiment 20000264 PARAMETER Experiment Name: At_Open_Flower_P Parameter: Tissue Value: Open Flower vs. Whole Plant
  misc_feature: MA Experiment ID: 20000437 Result: Down-regulated in Transcription
  misc_feature: MA Experiment 20000437 PARAMETER Experiment Name: At_Drought_P Parameter: Age (day) Value: 8
  misc_feature: MA Experiment 20000437 PARAMETER Experiment Name: At_Drought_P Parameter: Organism Value: A. thaliana
  misc_feature: MA Experiment 20000437 PARAMETER Experiment Name: At_Drought_P Parameter: Plant Line Value: WS
  misc_feature: MA Experiment 20000437 PARAMETER Experiment Name: At_Drought_P Parameter: Timepoint (hr) Value: 24
  misc_feature: MA Experiment 20000437 PARAMETER Experiment Name: At_Drought_P Parameter: Tissue Value: Whole Plant
  misc_feature: MA Experiment 20000437 PARAMETER Experiment Name: At_Drought_P Parameter: Treatment Value: Drought vs. No Drought
  misc_feature: MA Experiment ID: 20000439 Result: Up-regulated in Transcription
  misc_feature: MA Experiment 20000439 PARAMETER Experiment Name: At_Roots__P Parameter: Age (day) Value: 14 vs. 21
  misc_feature: MA Experiment 20000439 PARAMETER Experiment Name: At_Roots__P Parameter: Organism Value: A. thaliana
  misc_feature: MA Experiment 20000439 PARAMETER Experiment Name: At_Roots__P Parameter: Tissue Value: Roots vs. Whole Plant
  misc_feature: MA Experiment ID: 20000460 Result: Down-regulated in Transcription
  misc_feature: MA Experiment 20000460 PARAMETER Experiment Name: At_10percent_PEG_P Parameter: Age (day) Value: 12
  misc_feature: MA Experiment 20000460 PARAMETER Experiment Name: At_10percent_PEG_P Parameter: Organism Value: A. thaliana
  misc_feature: MA Experiment 20000460 PARAMETER Experiment Name: At_10percent_PEG_P Parameter: Plant Line Value: WS
  misc_feature: MA Experiment 20000460 PARAMETER Experiment Name: At_10percent_PEG_P Parameter: Timepoint (day) Value: 12
  misc_feature: MA Experiment 20000460 PARAMETER Experiment Name: At_10percent_PEG_P Parameter: Tissue Value: Whole Plant
  misc_feature: MA Experiment 20000460 PARAMETER Experiment Name: At_10percent_PEG_P Parameter: Treatment Value: 10percent PEG vs. No Treatment
  misc_feature: MA Experiment ID: 20001911 Result: Up-regulated in Transcription
  misc_feature: MA Experiment 20001911 PARAMETER Experiment Name: At_Drought_Reproduction_P Parameter: Age (day) Value: 40
  misc_feature: MA Experiment 20001911 PARAMETER Experiment Name: At_Drought_Reproduction_P Parameter: Organism Value: A. thaliana
  misc_feature: MA Experiment 20001911 PARAMETER Experiment Name: At_Drought_Reproduction_P Parameter: Plant Line Value: WS
  misc_feature: MA Experiment 20001911 PARAMETER Experiment Name: At_Drought_Reproduction_P Parameter: Timepoint (day) Value: 10
  misc_feature: MA Experiment 20001911 PARAMETER Experiment Name: At_Drought_Reproduction_P Parameter: Tissue Value: Flowers
  misc_feature: MA Experiment 20001911 PARAMETER Experiment Name: At_Drought_Reproduction_P Parameter: Treatment Value: Drought vs. No Drought
atggagggagaaaccgcagccaaagcagcggcaagttcctcctcatccccgagccggtacgagtctcaaaagaggcgagactggaacactttccttcagtatctaaggaaccacaagccacctctgaatctgtctcgttgtagtggcgcacacgtccttgagttccttaagtacctcgaccagtttggtaagaccaaagtccatgccacggcttgtcccttcttcggacaacctaacccaccgtctcagtgcacttgccctctcaagcaagcttggggaagtctcgatgctctcatcggccgtctaagggctgctttcgaggaaatcggcggtggtcttcctgagtcaaaccctttcgctgccaaggctgttaggatctatcttaaagaagtccgtcaaacacaggctaaggctcgagggattccttacgacaagaagaaaagaaaacgtccgcatacagacacggcaactccaatcgccggtgacggagacgatgccgaaggaagtggtggtgctgctttggtcgttacggctgcaactacggtatag

SEQ ID NO: 83562 - protein, 182 aa, Arabidopsis thaliana
  peptide (1)..(182): Ceres Seq. ID no. 12670807
  misc_feature (1)..(134): Pfam Name: Protein of unknown function (DUF640) Pfam Description: Protein of unknown function (DUF640)
  misc_feature (1)..(182): Homolog of NCBI NO: 15237680 NR Description: putative protein; protein id: At5g58500.1 thaliana] >gi|10177027|dbj|BAB10265.1|
  misc_feature (1)..(164): Homolog of NCBI NO: 18390725 NR Description: expressed protein; protein id: At1g07090.1, by cDNA: 28780. [Arabidopsis thaliana] >gi|25341953|pir||G86205
  misc_feature (3)..(178): Homolog of NCBI NO: 34907938 NR Description: B1088C09.17 [Oryza sativa (japonica
  misc_feature (5)..(169): Homolog of NCBI NO: 37535384 NR Description: hypothetical protein [Oryza sativa (japonica group)] >gi|10140752|gb|AAG13584.1| hypothetical protein [Oryza >gi|31432676|gb|AAP54281.1| hypothetical protein [Oryza sativa
  misc_feature (11)..(168): Homolog of NCBI NO: 38344650 NR Description: OSJNBb0072M01.12 [Oryza sativa (japonica
  misc_feature (3)..(157): Homolog of NCBI NO: 18402578 NR Description: expressed protein; protein id: At2g31160.1, by cDNA: gi_15912210, supported by cDNA: gi_19547988 [Arabidopsis >gi|25408134|pir||C84717 hypothetical protein At2g31160
  misc_feature (3)..(172): Homolog of NCBI NO: 18406012 NR Description: expressed protein; protein id: At2g42610.1, by cDNA: gi_6691164 [Arabidopsis thaliana]
  misc_feature (16)..(159): Homolog of NCBI NO: 15241821 NR Description: putative protein; protein id: At5g28490.1
  misc_feature (5)..(157): Homolog of NCBI NO: 15229310 NR Description: unknown protein; protein id: At3g04510.1 thaliana] >gi|7547110|gb|AAF63782.1| unknown protein [Arabidopsis
  misc_feature (18)..(150): Homolog of NCBI NO: 15233942 NR Description: putative protein; protein id: At4g18610.1
MEGETAAKAAASSSSSPSRYESQKRRDWNTFLQYLRNHKPPLNLSRCSGAHVLEFLKYLDQFGKTKVHATACPFFGQPNPPSQCTCPLKQAWGSLDALIGRLRAAFEEIGGGLPESNPFAAKAVRIYLKEVRQTQAKARGIPYDKKKRKRPHTDTATPIAGDGDDAEGSGGAALVVTAATTV

SEQ ID NO: 83563 - DNA, 1815 bp, Arabidopsis thaliana
  misc_feature (1)..(1815): Ceres Seq. ID no. 12670808
  misc_feature: MA Experiment ID: 20000315 Result: Down-regulated in Transcription
  misc_feature: MA Experiment 20000315 PARAMETER Experiment Name: At_14day_Shoots-Roots_Sub_P Parameter: Age (day) Value: 14
  misc_feature: MA Experiment 20000315 PARAMETER Experiment Name: At_14day_Shoots-Roots_Sub_P Parameter: Organism Value: A. thaliana
  misc_feature: MA Experiment 20000315 PARAMETER Experiment Name: At_14day_Shoots-Roots_Sub_P Parameter: Plant Line Value: WS
  misc_feature: MA Experiment 20000315 PARAMETER Experiment Name: At_14day_Shoots-Roots_Sub_P Parameter: Tissue Value: Shoots vs. Whole Plant
atggctgcagccttggagtgctggtcgagtcgtgccggagatggtggcgatcccgacaacgatctggtcgatcaggtactcatgcgaacgcacgacaggtctgagtccgtaattacgtctctacctgagacgagtttggaggttgaaggttccacgacggtttttgatcagagctcgtcggctatgcagaagcggtttcagcgtctcagccgcaacgtgtcagaggcgattgtgtcgcttaaaaacacgcttaatctggattctgctcgggataatcagagtttcggcggagctatgacgcccaaggcggaagtcagtggcggcggcggcggaaggaagctcgtttgggctactgtagtgaagaaccttgctaagatgtatcctgggagtcaattaccggagaagctcgtatcaaatctcaagaagcattacgattccttgccattcagttatagtcaggctgatttcgatatgaaagaagtatttctacacgtcaagttgatagaacaagctgctggagatgacaatcctgtgtttatgattcaagaagtgtctactgaggaacctcgaggttccgtgctcagactcacattcgcctgtaactcttttctatcatggtcaactatgtcaggcgttcttgatagtgcttcgatttgttgcaagaagatacaaatctttgagaagaaggggttgactctcggggttgttcttcttctggatcaatctgggcaacatagtttgtttaaaacccgggtagaaaacaccctcaaggttgcaaccaaaaagccaaaaccgacatctgttaagctccctttcgggctttgtggctgtcaagaacagaacggtggtgtaggggaacttggaggtgttgaagaagagtccattcagcatagtagtaggctagggatagaaaacttgaatagtacgatccagattcaggttccacttccgagttcttcatttgctgtatcagtagatgaatggcagaccatccaatcgggtggcaatgagattggaaaatggctattgaattctgatagttttgagttcggtgatcagattggaccaacttctctcaaaggaattttccgcggtaaaagagtgggaatcgagaaactaaaaggttgtgataaggggaattcctatgagtttgagctccgaaaagattacttggagctgatggcttgtggacacaagagcattctgcaattttacggtgtttgcatcgatgagaaccatggattatgcgttgtgacaaaactgatggaaggtgggtcactccatgaactgatgttgaagaataagaagcttcaaaccaagcagatactgcgaattgcaatagacatagccgaagggctgaagttcgtgaatgaccatggtgttgcttatcgggaccttaacacacaaagaatattactagataagcatggcaatgcatgtttgggaaatattgggatagtcaccgcttgtaagagctttggtgaggccgtggaatatgaaactgatggttatcgatggcttgcacctgagatcatagctggtgacccggaaaatacgacagagacttggatgagcaatgcttatagttttgggatggtactgtgggagatggtgacgggagaggcggcttatgcatcttgctcgcccgtgcaggcggcagttgggatagcggcttgtggcctgagaccggaaattccaaaagaatgccctcaagtcctgagaactctgatgatcaattgctggaacaactccccctccaaacgccccaacttctctcatatccataacacgttacttcgcgccgtttcacggtaa

SEQ ID NO: 83564 - protein, 604 aa, Arabidopsis thaliana
  peptide (1)..(604): Ceres Seq. ID no. 12670809
  misc_feature (1)..(604): Homolog of NCBI NO: 10177030 NR Description: contains similarity to protein
  misc_feature (56)..(604): Homolog of NCBI NO: 18491187 NR Description: unknown protein [Arabidopsis thaliana]
  misc_feature (56)..(604): Homolog of NCBI NO: 30681763 NR Description: protein kinase family [Arabidopsis thaliana]
  misc_feature (56)..(604): Homolog of NCBI NO: 11358270 NR Description: hypothetical protein T28J14.80 - Arabidopsis >gi|7546692|emb|CAB87270.1| putative protein [Arabidopsis
  misc_feature (360)..(594): Homolog of NCBI NO: 15227883 NR Description: putative protein kinase; protein id: At2g17700.1, by cDNA: gi_17979170, supported by cDNA: gi_20465914 [Arabidopsis >gi|25411811|pir||D84555 probable protein kinase putative protein
  misc_feature (340)..(602): Homolog of NCBI NO: 7486654 NR Description: hypothetical protein F8D20.290 - Arabidopsis >gi|3367596|emb|CAA20048.1| putative protein [Arabidopsis >gi|7270530|emb|CAB81487.1| putative protein [Arabidopsis
  misc_feature (340)..(602): Homolog of NCBI NO: 22329194 NR Description: putative protein; protein id: At4g35780.1, by cDNA: gi_20260235 [Arabidopsis thaliana] putative protein [Arabidopsis thaliana]
  misc_feature (300)..(594): Homolog of NCBI NO: 18420244 NR Description: protein kinase like protein; protein id:
  misc_feature (360)..(598): Homolog of NCBI NO: 15235845 NR Description: protein kinase - like protein; protein id: supported by cDNA: 156374. [Arabidopsis thaliana]
  misc_feature (360)..(601): Homolog of NCBI NO: 27085280 NR Description: serine/threonine protein kinase [Oryza sativa
MAAALECWSSRAGDGGDPDNDLVDQVLMRTHDRSESVITSLPETSLEVEGSTTVFDQSSSAMQKRFQRLSRNVSEAIVSLKNTLNLDSARDNQSFGGAMTPKAEVSGGGGGRKLVWATVVKNLAKMYPGSQLPEKLVSNLKKHYDSLPFSYSQADFDMKEVFLHVKLIEQAAGDDNPVFMIQEVSTEEPRGSVLRLTFACNSFLSWSTMSGVLDSASICCKKIQIFEKKGLTLGVVLLLDQSGQHSLFKTRVENTLKVATKKPKPTSVKLPFGLCGCQEQNGGVGELGGVEEESIQHSSRLGIENLNSTIQIQVPLPSSSFAVSVDEWQTIQSGGNEIGKWLLNSDSFEFGDQIGPTSLKGIFRGKRVGIEKLKGCDKGNSYEFELRKDYLELMACGHKSILQFYGVCIDENHGLCVVTKLMEGGSLHELMLKNKKLQTKQILRIAIDIAEGLKFVNDHGVAYRDLNTQRILLDKHGNACLGNIGIVTACKSFGEAVEYETDGYRWLAPEIIAGDPENTTETWMSNAYSFGMVLWEMVTGEAAYASCSPVQAAVGIAACGLRPEIPKECPQVLRTLMINCWNNSPSKRPNFSHIHNTLLRAVSR

SEQ ID NO: 83565 - protein, 577 aa, Arabidopsis thaliana
  peptide (1)..(577): Ceres Seq. ID no. 12670810
  misc_feature (1)..(577): Homolog of NCBI NO: 10177030 NR Description: contains similarity to protein
  misc_feature (29)..(577): Homolog of NCBI NO: 18491187 NR Description: unknown protein [Arabidopsis thaliana]
  misc_feature (29)..(577): Homolog of NCBI NO: 30681763 NR Description: protein kinase family [Arabidopsis thaliana]
  misc_feature (29)..(577): Homolog of NCBI NO: 11358270 NR Description: hypothetical protein T28J14.80 - Arabidopsis >gi|7546692|emb|CAB87270.1| putative protein [Arabidopsis
  misc_feature (333)..(567): Homolog of NCBI NO: 15227883 NR Description: putative protein kinase; protein id: At2g17700.1, by cDNA: gi_17979170, supported by cDNA: gi_20465914 [Arabidopsis >gi|25411811|pir||D84555 probable protein kinase putative protein
  misc_feature (313)..(575): Homolog of NCBI NO: 7486654 NR Description: hypothetical protein F8D20.290 - Arabidopsis >gi|3367596|emb|CAA20048.1| putative protein [Arabidopsis >gi|7270530|emb|CAB81487.1| putative protein [Arabidopsis
  misc_feature (313)..(575): Homolog of NCBI NO: 22329194 NR Description: putative protein; protein id: At4g35780.1, by cDNA: gi_20260235 [Arabidopsis thaliana] putative protein [Arabidopsis thaliana]
  misc_feature (273)..(567): Homolog of NCBI NO: 18420244 NR Description: protein kinase like protein; protein id:
  misc_feature (333)..(571): Homolog of NCBI NO: 15235845 NR Description: protein kinase - like protein; protein id: supported by cDNA: 156374. [Arabidopsis thaliana]
  misc_feature (333)..(574): Homolog of NCBI NO: 27085280 NR Description: serine/threonine protein kinase [Oryza sativa
MRTHDRSESVITSLPETSLEVEGSTTVFDQSSSAMQKRFQRLSRNVSEAIVSLKNTLNLDSARDNQSFGGAMTPKAEVSGGGGGRKLVWATVVKNLAKMYPGSQLPEKLVSNLKKHYDSLPFSYSQADFDMKEVFLHVKLIEQAAGDDNPVFMIQEVSTEEPRGSVLRLTFACNSFLSWSTMSGVLDSASICCKKIQIFEKKGLTLGVVLLLDQSGQHSLFKTRVENTLKVATKKPKPTSVKLPFGLCGCQEQNGGVGELGGVEEESIQHSSRLGIENLNSTIQIQVPLPSSSFAVSVDEWQTIQSGGNEIGKWLLNSDSFEFGDQIGPTSLKGIFRGKRVGIEKLKGCDKGNSYEFELRKDYLELMACGHKSILQFYGVCIDENHGLCVVTKLMEGGSLHELMLKNKKLQTKQILRIAIDIAEGLKFVNDHGVAYRDLNTQRILLDKHGNACLGNIGIVTACKSFGEAVEYETDGYRWLAPEIIAGDPENTTETWMSNAYSFGMVLWEMVTGEAAYASCSPVQAAVGIAACGLRPEIPKECPQVLRTLMINCWNNSPSKRPNFSHIHNTLLRAVSR

SEQ ID NO: 83566 - protein, 543 aa, Arabidopsis thaliana
  peptide (1)..(543): Ceres Seq. ID no. 12670811
  misc_feature (1)..(543): Homolog of NCBI NO: 10177030 NR Description: contains similarity to protein
  misc_feature (1)..(543): Homolog of NCBI NO: 18491187 NR Description: unknown protein [Arabidopsis thaliana]
  misc_feature (1)..(543): Homolog of NCBI NO: 30681763 NR Description: protein kinase family [Arabidopsis thaliana]
  misc_feature (1)..(543): Homolog of NCBI NO: 11358270 NR Description: hypothetical protein T28J14.80 - Arabidopsis >gi|7546692|emb|CAB87270.1| putative protein [Arabidopsis
  misc_feature (299)..(533): Homolog of NCBI NO: 15227883 NR Description: putative protein kinase; protein id: At2g17700.1, by cDNA: gi_17979170, supported by cDNA: gi_20465914 [Arabidopsis >gi|25411811|pir||D84555 probable protein kinase putative protein
  misc_feature (279)..(541): Homolog of NCBI NO: 7486654 NR Description: hypothetical protein F8D20.290 - Arabidopsis >gi|3367596|emb|CAA20048.1| putative protein [Arabidopsis >gi|7270530|emb|CAB81487.1| putative protein [Arabidopsis
  misc_feature (279)..(541): Homolog of NCBI NO: 22329194 NR Description: putative protein; protein id: At4g35780.1, by cDNA: gi_20260235 [Arabidopsis thaliana] putative protein [Arabidopsis thaliana]
  misc_feature (239)..(533): Homolog of NCBI NO: 18420244 NR Description: protein kinase like protein; protein id:
  misc_feature (299)..(537): Homolog of NCBI NO: 15235845 NR Description: protein kinase - like protein; protein id: supported by cDNA: 156374. [Arabidopsis thaliana]
  misc_feature (299)..(540): Homolog of NCBI NO: 27085280 NR Description: serine/threonine protein kinase [Oryza sativa
MQKRFQRLSRNVSEAIVSLKNTLNLDSARDNQSFGGAMTPKAEVSGGGGGRKLVWATVVKNLAKMYPGSQLPEKLVSNLKKHYDSLPFSYSQADFDMKEVFLHVKLIEQAAGDDNPVFMIQEVSTEEPRGSVLRLTFACNSFLSWSTMSGVLDSASICCKKIQIFEKKGLTLGVVLLLDQSGQHSLFKTRVENTLKVATKKPKPTSVKLPFGLCGCQEQNGGVGELGGVEEESIQHSSRLGIENLNSTIQIQVPLPSSSFAVSVDEWQTIQSGGNEIGKWLLNSDSFEFGDQIGPTSLKGIFRGKRVGIEKLKGCDKGNSYEFELRKDYLELMACGHKSILQFYGVCIDENHGLCVVTKLMEGGSLHELMLKNKKLQTKQILRIAIDIAEGLKFVNDHGVAYRDLNTQRILLDKHGNACLGNIGIVTACKSFGEAVEYETDGYRWLAPEIIAGDPENTTETWMSNAYSFGMVLWEMVTGEAAYASCSPVQAAVGIAACGLRPEIPKECPQVLRTLMINCWNNSPSKRPNFSHIHNTLLRAVSR

SEQ ID NO: 83567 - DNA, 1867 bp, Arabidopsis thaliana
  misc_feature (1)..(1867): Ceres Seq. ID no. 12670812
  misc_feature: MA Experiment ID: 20000179 Result: Up-regulated in Transcription
  misc_feature: MA Experiment 20000179 PARAMETER Experiment Name: At_Germinating_Seeds_P Parameter: Age (hr) Value: 6 vs. 0
  misc_feature: MA Experiment 20000179 PARAMETER Experiment Name: At_Germinating_Seeds_P Parameter: Tissue Value: Germinating Seeds
  misc_feature: MA Experiment ID: 20000180 Result: Up-regulated in Transcription
  misc_feature: MA Experiment 20000180 PARAMETER Experiment Name: At_Germinating_Seeds_P Parameter: Age (hr) Value: 24 vs. 0
  misc_feature: MA Experiment 20000180 PARAMETER Experiment Name: At_Germinating_Seeds_P Parameter: Tissue Value: Germinating Seeds
  misc_feature: MA Experiment ID: 20000185 Result: Down-regulated in Transcription
  misc_feature: MA Experiment 20000185 PARAMETER Experiment Name: At_Roots__P Parameter: Age (day) Value: 7 vs. 21
  misc_feature: MA Experiment 20000185 PARAMETER Experiment Name: At_Roots__P Parameter: Organism Value: A. thaliana
  misc_feature: MA Experiment 20000185 PARAMETER Experiment Name: At_Roots__P Parameter: Tissue Value: Roots vs. Whole Plant
  misc_feature: MA Experiment ID: 20000214 Result: Down-regulated in Transcription
  misc_feature: MA Experiment 20000214 PARAMETER Experiment Name: At_4deg_Cold_P Parameter: Timepoint (hr) Value: 6
  misc_feature: MA Experiment ID: 20000264 Result: Up-regulated in Transcription
  misc_feature: MA Experiment 20000264 PARAMETER Experiment Name: At_Open_Flower_P Parameter: Age (day) Value: 21
  misc_feature: MA Experiment 20000264 PARAMETER Experiment Name: At_Open_Flower_P Parameter: Plant Line Value: WS
  misc_feature: MA Experiment 20000264 PARAMETER Experiment Name: At_Open_Flower_P Parameter: Tissue Value: Open Flower vs. Whole Plant
  misc_feature: MA Experiment ID: 20000286 Result: Up-regulated in Transcription
  misc_feature: MA Experiment 20000286 PARAMETER Experiment Name: At_Open_Flower_P Parameter: Age (day) Value: 21
  misc_feature: MA Experiment 20000286 PARAMETER Experiment Name: At_Open_Flower_P Parameter: Plant Line Value: WS
  misc_feature: MA Experiment 20000286 PARAMETER Experiment Name: At_Open_Flower_P Parameter: Tissue Value: Half Open vs. Whole Plant
  misc_feature: MA Experiment ID: 20000439 Result: Down-regulated in Transcription
  misc_feature: MA Experiment 20000439 PARAMETER Experiment Name: At_Roots__P Parameter: Age (day) Value: 14 vs. 21
  misc_feature: MA Experiment 20000439 PARAMETER Experiment Name: At_Roots__P Parameter: Organism Value: A. thaliana
  misc_feature: MA Experiment 20000439 PARAMETER Experiment Name: At_Roots__P Parameter: Tissue Value: Roots vs. Whole Plant
  misc_feature: MA Experiment ID: 20000794 Result: Up-regulated in Transcription
  misc_feature: MA Experiment 20000794 PARAMETER Experiment Name: At_Petals_P Parameter: Age (day) Value: 23-25 days
  misc_feature: MA Experiment 20000794 PARAMETER Experiment Name: At_Petals_P Parameter: Plant Line Value: WS
  misc_feature: MA Experiment 20000794 PARAMETER Experiment Name: At_Petals_P Parameter: Tissue Value: Petals vs. Whole plant
  misc_feature: MA Experiment ID: 20001905 Result: Down-regulated in Transcription
  misc_feature: MA Experiment 20001905 PARAMETER Experiment Name: At_Drought_Reproduction_P Parameter: Age (day) Value: 40
  misc_feature: MA Experiment 20001905 PARAMETER Experiment Name: At_Drought_Reproduction_P Parameter: Organism Value: A. thaliana
  misc_feature: MA Experiment 20001905 PARAMETER Experiment Name: At_Drought_Reproduction_P Parameter: Plant Line Value: WS
  misc_feature: MA Experiment 20001905 PARAMETER Experiment Name: At_Drought_Reproduction_P Parameter: Timepoint (day) Value: 10
  misc_feature: MA Experiment 20001905 PARAMETER Experiment Name: At_Drought_Reproduction_P Parameter: Tissue Value: Rosettes
  misc_feature: MA Experiment 20001905 PARAMETER Experiment Name: At_Drought_Reproduction_P Parameter: Treatment Value: Drought vs. No Drought
actgactctatcactctcagagattaggatagaaataatcagaaatctccgtctattgtcgtcgtcggccggagattaattattccggtgacgtttagttggtttttcttcattgtgcagcaaaaagaaaaagagtgagcgagagagcttagaaactgagcccaaagacattgactactggtactctgttcaattcaatcgagatcctccgagattcgctctcaaatctgagaataacaatcaccattcccgcagtaagagcggcggcgatttttgcaagaagaagaagagaggagaaatggcgaacaaggtttctaacttctcggatctgattcaacgagttacggcgtcttgtttgttgcatccactctccgccggccggcaagatctcgctgtgaatcgccgggaagagtacgatactgaagaagaggagaatgaggaggaaggtgagattcagtacgaagacgcattggagaaggagaatggtaaagatgagacaattagggctaagaacggaaggaacggtgtgagtgttgagacggtgcaggagatggagatggtgatggacgaagttttcacggcggctgctgctatgaagagagcttacgttgcgcttcaggaagctcattcgccgtgggatccggagaagatgcacgatgctgatatggcgatggtggctgagctgagaaggattggttcattgagggaaagattcaggaggatgagaggtaccggaagtggtggtcgaaggaaaaacgacgccggaagaggaatgctgagagaggccgtggcgccttatgaggcggttgtgaaggagctgaagaaagaagtgaaagtgaaagatactgagattgagaatctgaaggagaaagtcaaagtggcttctatggccaacggtaacggaggcaagaaacaccgattgctttcaagccggaaagttaactgtaccacacagattgctgtgtctccggtgccggagttatttgagatgacaatgattcaggtgaaagaagcatcaaagtctttcacagggattctattgtcactaatgcgagctgcacattgggacattgcagcggctgttcgatccattgaagccgcttcagcttcatccgacggaatgtctgcttcttcgtttgcatcctcggttcagtcatctgtcccgaaccagcacgcgaagtttgctcttgagtcttacatctgtaggaaaatcttccaaggatttgatcacgaaacgttttacatggatggaagcttatcttctcttatcaacccggatcagtaccgtcgtgactgctttgcgcagttcaaagatatgaaagcaatggatcctatggagttgctagggatcttaccaacttgccattttggtaaattctgctcgaagaagtacctttcgatcattcaccaaaaaatggaagagtcgttgttcggggactcggaacagcgggagttggttgtagccggtaaccacccaagaagtcagttctatggagagttcttggggctagctaaagcagtctggctgcttcatctcctggcattctcgctcgacccatccccgagtcactttgaagcaaacagaggagccgagtttcactctcagtacatggagagtgtcgtgaggttttcggatggccgtgttcctgcgggtcaagttgttggatttcctgtttgtccaggattcaagcttagccatcaagggaaaggatcaatcatcaaatccagagtttacttggttccaagggcttaaaaaggtttctttgagttcactgtttcttaggaatacattatgtcctcgtgtgttgtttaagactttaagacaatctagcttcggaaaaatcttgaaataaagagaccgttcgta

SEQ ID NO: 83568 - protein, 484 aa, Arabidopsis thaliana
  peptide (1)..(484): Ceres Seq. ID no. 12670813
  misc_feature (71)..(206): Pfam Name: Plant protein of unknown function (DUF641) Pfam Description: Plant protein of unknown function (DUF641)
  misc_feature (1)..(484): Homolog of NCBI NO: 30697152 NR Description: expressed protein [Arabidopsis thaliana]
  misc_feature (1)..(484): Homolog of NCBI NO: 26452122 NR Description: unknown protein [Arabidopsis thaliana]
  misc_feature (1)..(484): Homolog of NCBI NO: 22327960 NR Description: putative protein; protein id: At5g58960.1, by cDNA: gi_19715644 [Arabidopsis thaliana] gb|AAB82637.1~gene_id:K19M22.15~similar to unknown protein
  misc_feature (269)..(483): Homolog of NCBI NO: 34897362 NR Description: hypothetical protein [Oryza sativa]
  misc_feature (60)..(480): Homolog of NCBI NO: 15225441 NR Description: hypothetical protein; protein id: At2g45260.1, by cDNA: gi_20268755, supported by cDNA: gi_21281073 [Arabidopsis >gi|25367434|pir||D84888 hypothetical protein At2g45260
  misc_feature (64)..(480): Homolog of NCBI NO: 37535904 NR Description: hypothetical protein [Oryza sativa (japonica group)] >gi|22267584|gb|AAM94919.1| hypothetical protein [Oryza
  misc_feature (83)..(349): Homolog of NCBI NO: 15235221 NR Description: putative protein; protein id: At4g34080.1
  misc_feature (382)..(443): Homolog of NCBI NO: 15235221 NR Description: putative protein; protein id: At4g34080.1
  misc_feature (80)..(480): Homolog of NCBI NO: 15219282 NR Description: unknown protein; protein id: At1g53380.1
  misc_feature (86)..(480): Homolog of NCBI NO: 34903732 NR Description: unnamed protein product [Oryza sativa (japonica group)] >gi|7340858|dbj|BAA92948.1| unnamed protein product
MANKVSNFSDLIQRVTASCLLHPLSAGRQDLAVNRREEYDTEEEENEEEGEIQYEDALEKENGKDETIRAKNGRNGVSVETVQEMEMVMDEVFTAAAAMKRAYVALQEAHSPWDPEKMHDADMAMVAELRRIGSLRERFRRMRGTGSGGRRKNDAGRGMLREAVAPYEAVVKELKKEVKVKDTEIENLKEKVKVASMANGNGGKKHRLLSSRKVNCTTQIAVSPVPELFEMTMIQVKEASKSFTGILLSLMRAAHWDIAAAVRSIEAASASSDGMSASSFASSVQSSVPNQHAKFALESYICRKIFQGFDHETFYMDGSLSSLINPDQYRRDCFAQFKDMKAMDPMELLGILPTCHFGKFCSKKYLSIIHQKMEESLFGDSEQRELVVAGNHPRSQFYGEFLGLAKAVWLLHLLAFSLDPSPSHFEANRGAEFHSQYMESVVRFSDGRVPAGQVVGFPVCPGFKLSHQGKGSIIKSRVYLVPRA

SEQ ID NO: 83569 - protein, 400 aa, Arabidopsis thaliana
  peptide (1)..(400): Ceres Seq. ID no. 12670814
  misc_feature (1)..(122): Pfam Name: Plant protein of unknown function (DUF641) Pfam Description: Plant protein of unknown function (DUF641)
  misc_feature (1)..(400): Homolog of NCBI NO: 30697152 NR Description: expressed protein [Arabidopsis thaliana]
  misc_feature (1)..(400): Homolog of NCBI NO: 26452122 NR Description: unknown protein [Arabidopsis thaliana]
  misc_feature (1)..(400): Homolog of NCBI NO: 22327960 NR Description: putative protein; protein id: At5g58960.1, by cDNA: gi_19715644 [Arabidopsis thaliana] gb|AAB82637.1~gene_id:K19M22.15~similar to unknown protein
  misc_feature (185)..(399): Homolog of NCBI NO: 34897362 NR Description: hypothetical protein [Oryza sativa]
  misc_feature (1)..(396): Homolog of NCBI NO: 15225441 NR Description: hypothetical protein; protein id: At2g45260.1, by cDNA: gi_20268755, supported by cDNA: gi_21281073 [Arabidopsis >gi|25367434|pir||D84888 hypothetical protein At2g45260
  misc_feature (1)..(396): Homolog of NCBI NO: 37535904 NR Description: hypothetical protein [Oryza sativa (japonica group)] >gi|22267584|gb|AAM94919.1| hypothetical protein [Oryza
  misc_feature (1)..(265): Homolog of NCBI NO: 15235221 NR Description: putative protein; protein id: At4g34080.1
  misc_feature (298)..(359): Homolog of NCBI NO: 15235221 NR Description: putative protein; protein id: At4g34080.1
  misc_feature (1)..(396): Homolog of NCBI NO: 15219282 NR Description: unknown protein; protein id: At1g53380.1
  misc_feature (2)..(396): Homolog of NCBI NO: 34903732 NR Description: unnamed protein product [Oryza sativa (japonica group)] >gi|7340858|dbj|BAA92948.1| unnamed protein product
MEMVMDEVFTAAAAMKRAYVALQEAHSPWDPEKMHDADMAMVAELRRIGSLRERFRRMRGTGSGGRRKNDAGRGMLREAVAPYEAVVKELKKEVKVKDTEIENLKEKVKVASMANGNGGKKHRLLSSRKVNCTTQIAVSPVPELFEMTMIQVKEASKSFTGILLSLMRAAHWDIAAAVRSIEAASASSDGMSASSFASSVQSSVPNQHAKFALESYICRKIFQGFDHETFYMDGSLSSLINPDQYRRDCFAQFKDMKAMDPMELLGILPTCHFGKFCSKKYLSIIHQKMEESLFGDSEQRELVVAGNHPRSQFYGEFLGLAKAVWLLHLLAFSLDPSPSHFEANRGAEFHSQYMESVVRFSDGRVPAGQVVGFPVCPGFKLSHQGKGSIIKSRVYLVPRA

SEQ ID NO: 83570 - protein, 398 aa, Arabidopsis thaliana
  peptide (1)..(398): Ceres Seq. ID no. 12670815
  misc_feature (1)..(120): Pfam Name: Plant protein of unknown function (DUF641) Pfam Description: Plant protein of unknown function (DUF641)
  misc_feature (1)..(398): Homolog of NCBI NO: 30697152 NR Description: expressed protein [Arabidopsis thaliana]
  misc_feature (1)..(398): Homolog of NCBI NO: 26452122 NR Description: unknown protein [Arabidopsis thaliana]
  misc_feature (1)..(398): Homolog of NCBI NO: 22327960 NR Description: putative protein; protein id: At5g58960.1, by cDNA: gi_19715644 [Arabidopsis thaliana] gb|AAB82637.1~gene_id:K19M22.15~similar to unknown protein
  misc_feature (183)..(397): Homolog of NCBI NO: 34897362 NR Description: hypothetical protein [Oryza sativa]
  misc_feature (1)..(394): Homolog of NCBI NO: 15225441 NR Description: hypothetical protein; protein id: At2g45260.1, by cDNA: gi_20268755, supported by cDNA: gi_21281073 [Arabidopsis >gi|25367434|pir||D84888 hypothetical protein At2g45260
  misc_feature (1)..(394): Homolog of NCBI NO: 37535904 NR Description: hypothetical protein [Oryza sativa (japonica group)] >gi|22267584|gb|AAM94919.1| hypothetical protein [Oryza
  misc_feature (1)..(263): Homolog of NCBI NO: 15235221 NR Description: putative protein; protein id: At4g34080.1
  misc_feature (296)..(357): Homolog of NCBI NO: 15235221 NR Description: putative protein; protein id: At4g34080.1
  misc_feature (1)..(394): Homolog of NCBI NO: 15219282 NR Description: unknown protein; protein id: At1g53380.1
  misc_feature (1)..(394): Homolog of NCBI NO: 34903732 NR Description: unnamed protein product [Oryza sativa (japonica group)] >gi|7340858|dbj|BAA92948.1| unnamed protein product
MVMDEVFTAAAAMKRAYVALQEAHSPWDPEKMHDADMAMVAELRRIGSLRERFRRMRGTGSGGRRKNDAGRGMLREAVAPYEAVVKELKKEVKVKDTEIENLKEKVKVASMANGNGGKKHRLLSSRKVNCTTQIAVSPVPELFEMTMIQVKEASKSFTGILLSLMRAAHWDIAAAVRSIEAASASSDGMSASSFASSVQSSVPNQHAKFALESYICRKIFQGFDHETFYMDGSLSSLINPDQYRRDCFAQFKDMKAMDPMELLGILPTCHFGKFCSKKYLSIIHQKMEESLFGDSEQRELVVAGNHPRSQFYGEFLGLAKAVWLLHLLAFSLDPSPSHFEANRGAEFHSQYMESVVRFSDGRVPAGQVVGFPVCPGFKLSHQGKGSIIKSRVYLVPRA

SEQ ID NO: 83571 - DNA, 1513 bp, Arabidopsis thaliana
  misc_feature (1)..(1513): Ceres Seq. ID no. 12670824
  misc_feature: MA Experiment ID: 20000184 Result: Down-regulated in Transcription
  misc_feature: MA Experiment 20000184 PARAMETER Experiment Name: At_Shoots__P Parameter: Age (day) Value: 7
  misc_feature: MA Experiment 20000184 PARAMETER Experiment Name: At_Shoots__P Parameter: Tissue Value: Shoots vs. Whole Plant
  misc_feature: MA Experiment ID: 20001451 Result: Down-regulated in Transcription
  misc_feature: MA Experiment 20001451 PARAMETER Experiment Name: At_Far-red-induction_P Parameter: Age (day) Value: 7
  misc_feature: MA Experiment 20001451 PARAMETER Experiment Name: At_Far-red-induction_P Parameter: Light Value: Far-red vs. White
  misc_feature: MA Experiment 20001451 PARAMETER Experiment Name: At_Far-red-induction_P Parameter: Organism Value: A. thaliana
  misc_feature: MA Experiment 20001451 PARAMETER Experiment Name: At_Far-red-induction_P Parameter: Plant Line Value: Columbia
  misc_feature: MA Experiment 20001451 PARAMETER Experiment Name: At_Far-red-induction_P Parameter: Timepoint (hr) Value: 24
  misc_feature: MA Experiment 20001451 PARAMETER Experiment Name: At_Far-red-induction_P Parameter: Tissue Value: Whole Plant
  misc_feature: MA Experiment ID: 20001905 Result: Up-regulated in Transcription
  misc_feature: MA Experiment 20001905 PARAMETER Experiment Name: At_Drought_Reproduction_P Parameter: Age (day) Value: 40
  misc_feature: MA Experiment 20001905 PARAMETER Experiment Name: At_Drought_Reproduction_P Parameter: Organism Value: A. thaliana
  misc_feature: MA Experiment 20001905 PARAMETER Experiment Name: At_Drought_Reproduction_P Parameter: Plant Line Value: WS
  misc_feature: MA Experiment 20001905 PARAMETER Experiment Name: At_Drought_Reproduction_P Parameter: Timepoint (day) Value: 10
  misc_feature: MA Experiment 20001905 PARAMETER Experiment Name: At_Drought_Reproduction_P Parameter: Tissue Value: Rosettes
  misc_feature: MA Experiment 20001905 PARAMETER Experiment Name: At_Drought_Reproduction_P Parameter: Treatment Value: Drought vs. No Drought
accgttaaatcgacgttcgaaattccgaggagaggaatcataccatggaatcgcaccacgcgtctctaggtcgccgtactttggaagagattcgtcaaaagagagcagctcaaaggctaagcaaagcttcttcaggtccagatcttagtgaaattcccaatcctgccgatttcccagtgatcagaaaatctgagagcggaaatcgactttctgagacagatgttggtgctttatattcccagcttaaagaactgcagaagaagaatgcagaaatggaggagcgcaacaaaattttgtcttcaaagcttcaaacgaaggaagttgagaatgaatcacttgagactcggttgaatgtgctggaacaaaacacagtgccatctctgagaaaagccctcaaggaaattgcaatggagaaagatgctgctgttgttttacgagaggatctctcagctcaagttaggactcttaagagacgtgttaatcaggcagaggaggaacaatatcgagctgaggaagatgcagcatctcttagagcagagcttaattcgatacaacagcaagcaatgggtaattcatttgctggcatgtcgccaatgggagtttccccagaccaactaccaatattagaaaaggagatggctaacctaaaactagaattacagaaagaatcagtgttgaggcagcaagaacaacatcgtttagctgaagaacaaactcgagtagcttctttaatgtctgaaaagcaggaactggaacagaaaatttcagttttatccagcagggcctcagaagtatcagagtctggtcaaaaagtattttcagtggaagataaagaaaaactcgagaagcagttgcatgatatggctgttgcacttgaaagattagagagtagtaggcaaaaacttctcatggaaattgacaaccaatcatctgaaatagagaagctatttgaggaaaactcgaacctctcagcttcgtatcaagaatcaatcaacatatcaaatcagtgggagaatcaagtgaaagaatgtctgaagcaaaacgtagaactccgtgaagttctggacaagttgagaacagaacaagctggttctttttcacgagggccttcagaatttgaggcaaatgggtcgcatggaactgatactctatccctcaagggtgaacttgcgaaagaacagagcagagcggaatcattatctgctcaagtcctccaactctcagctcaactccagcaagcaacacaagcatacaatgggcttatgcgcatctataaacctgtgcttagaaacatagagagtagcttaatcaagctgaagcaagatggatcggttacagtggcacagtgaatcaggaaccaagggcacacttctgagtattgaatatatttttatacaacaaaacatctatttagaaccaaggggacaagtgaatctaacacttttttctttattgaacaatttggttcgttgtgttgtaactgttgttcattgaaagcttcggttcgttttcc

SEQ ID NO: 83572 - protein, 434 aa, Arabidopsis thaliana
  peptide (1)..(434): Ceres Seq. ID no. 12670825
  misc_feature (1)..(420): Pfam Name: Myosin tail Pfam Description: Myosin tail
  misc_feature (1)..(434): Homolog of NCBI NO: 30697185 NR Description: expressed protein [Arabidopsis thaliana] AT5g59210/mnc17_100 [Arabidopsis thaliana]
  misc_feature (1)..(434): Homolog of NCBI NO: 30697188 NR Description: expressed protein [Arabidopsis thaliana]
  misc_feature (41)..(434): Homolog of NCBI NO: 9759242 NR Description: gene_id:MNC17.12~unknown protein [Arabidopsis
  misc_feature (194)..(432): Homolog of NCBI NO: 29367485 NR Description: myosin-like protein [Oryza sativa (japonica >gi|29369065|gb|AAO72684.1| putative myosin heavy chain [Oryza
  misc_feature (89)..(411): Homolog of NCBI NO: 34902040 NR Description: hypothetical protein [Oryza sativa (japonica group)] >gi|29893636|gb|AAP06890.1| hypothetical protein [Oryza
  misc_feature (1)..(336): Homolog of NCBI NO: 9759242 NR Description: gene_id:MNC17.12~unknown protein [Arabidopsis
  misc_feature (33)..(414): Homolog of NCBI NO: 34860755 NR Description: similar to hypothetical protein [Rattus
  misc_feature (45)..(427): Homolog of NCBI NO: 3986194 NR Description: myosin heavy chain [Dugesia japonica]
  misc_feature (95)..(429): Homolog of NCBI NO: 34860755 NR Description: similar to hypothetical protein [Rattus
  misc_feature (1)..(398): Homolog of NCBI NO: 24762818 NR Description: zipper CG15792-PB >gi|21645103|gb|AAM70805.1|
MESHHASLGRRTLEEIRQKRAAQRLSKASSGPDLSEIPNPADFPVIRKSESGNRLSETDVGALYSQLKELQKKNAEMEERNKILSSKLQTKEVENESLETRLNVLEQNTVPSLRKALKEIAMEKDAAVVLREDLSAQVRTLKRRVNQAEEEQYRAEEDAASLRAELNSIQQQAMGNSFAGMSPMGVSPDQLPILEKEMANLKLELQKESVLRQQEQHRLAEEQTRVASLMSEKQELEQKISVLSSRASEVSESGQKVFSVEDKEKLEKQLHDMAVALERLESSRQKLLMEIDNQSSEIEKLFEENSNLSASYQESINISNQWENQVKECLKQNVELREVLDKLRTEQAGSFSRGPSEFEANGSHGTDTLSLKGELAKEQSRAESLSAQVLQLSAQLQQATQAYNGLMRIYKPVLRNIESSLIKLKQDGSVTVAQ

SEQ ID NO: 83573 - protein, 358 aa, Arabidopsis thaliana
  peptide (1)..(358): Ceres Seq. ID no. 12670826
  misc_feature (1)..(344): Pfam Name: Myosin tail Pfam Description: Myosin tail
  misc_feature (1)..(358): Homolog of NCBI NO: 30697185 NR Description: expressed protein [Arabidopsis thaliana] AT5g59210/mnc17_100 [Arabidopsis thaliana]
  misc_feature (1)..(358): Homolog of NCBI NO: 30697188 NR Description: expressed protein [Arabidopsis thaliana]
  misc_feature (1)..(358): Homolog of NCBI NO: 9759242 NR Description: gene_id:MNC17.12~unknown protein [Arabidopsis
  misc_feature (118)..(356): Homolog of NCBI NO: 29367485 NR Description: myosin-like protein [Oryza sativa (japonica >gi|29369065|gb|AAO72684.1| putative myosin heavy chain [Oryza
  misc_feature (13)..(335): Homolog of NCBI NO: 34902040 NR Description: hypothetical protein [Oryza sativa (japonica group)] >gi|29893636|gb|AAP06890.1| hypothetical protein [Oryza
  misc_feature (1)..(260): Homolog of NCBI NO: 9759242 NR Description: gene_id:MNC17.12~unknown protein [Arabidopsis
  misc_feature (1)..(338): Homolog of NCBI NO: 34860755 NR Description: similar to hypothetical protein [Rattus
  misc_feature (1)..(351): Homolog of NCBI NO: 3986194 NR Description: myosin heavy chain [Dugesia japonica]
  misc_feature (19)..(353): Homolog of NCBI NO: 34860755 NR Description: similar to hypothetical protein [Rattus
  misc_feature (1)..(322): Homolog of NCBI NO: 24762818 NR Description: zipper CG15792-PB >gi|21645103|gb|AAM70805.1|
MEERNKILSSKLQTKEVENESLETRLNVLEQNTVPSLRKALKEIAMEKDAAVVLREDLSAQVRTLKRRVNQAEEEQYRAEEDAASLRAELNSIQQQAMGNSFAGMSPMGVSPDQLPILEKEMANLKLELQKESVLRQQEQHRLAEEQTRVASLMSEKQELEQKISVLSSRASEVSESGQKVFSVEDKEKLEKQLHDMAVALERLESSRQKLLMEIDNQSSEIEKLFEENSNLSASYQESINISNQWENQVKECLKQNVELREVLDKLRTEQAGSFSRGPSEFEANGSHGTDTLSLKGELAKEQSRAESLSAQVLQLSAQLQQATQAYNGLMRIYKPVLRNIESSLIKLKQDGSVTVAQ

SEQ ID NO: 83574 - protein, 313 aa, Arabidopsis thaliana
  peptide (1)..(313): Ceres Seq. ID no. 12670827
  misc_feature (1)..(299): Pfam Name: Myosin tail Pfam Description: Myosin tail
  misc_feature (1)..(313): Homolog of NCBI NO: 30697185 NR Description: expressed protein [Arabidopsis thaliana] AT5g59210/mnc17_100 [Arabidopsis thaliana]
  misc_feature (1)..(313): Homolog of NCBI NO: 30697188 NR Description: expressed protein [Arabidopsis thaliana]
  misc_feature (1)..(313): Homolog of NCBI NO: 9759242 NR Description: gene_id:MNC17.12~unknown protein [Arabidopsis
  misc_feature (73)..(311): Homolog of NCBI NO: 29367485 NR Description: myosin-like protein [Oryza sativa (japonica >gi|29369065|gb|AAO72684.1| putative myosin heavy chain [Oryza
  misc_feature (1)..(290): Homolog of NCBI NO: 34902040 NR Description: hypothetical protein [Oryza sativa (japonica group)] >gi|29893636|gb|AAP06890.1| hypothetical protein [Oryza
  misc_feature (1)..(215): Homolog of NCBI NO: 9759242 NR Description: gene_id:MNC17.12~unknown protein [Arabidopsis
  misc_feature (1)..(293): Homolog of NCBI NO: 34860755 NR Description: similar to hypothetical protein [Rattus
  misc_feature (1)..(306): Homolog of NCBI NO: 3986194 NR Description: myosin heavy chain [Dugesia japonica]
  misc_feature (1)..(308): Homolog of NCBI NO: 34860755 NR Description: similar to hypothetical protein [Rattus
  misc_feature (1)..(277): Homolog of NCBI NO: 24762818 NR Description: zipper CG15792-PB >gi|21645103|gb|AAM70805.1|
MEKDAAVVLREDLSAQVRTLKRRVNQAEEEQYRAEEDAASLRAELNSIQQQAMGNSFAGMSPMGVSPDQLPILEKEMANLKLELQKESVLRQQEQHRLAEEQTRVASLMSEKQELEQKISVLSSRASEVSESGQKVFSVEDKEKLEKQLHDMAVALERLESSRQKLLMEIDNQSSEIEKLFEENSNLSASYQESINISNQWENQVKECLKQNVELREVLDKLRTEQAGSFSRGPSEFEANGSHGTDTLSLKGELAKEQSRAESLSAQVLQLSAQLQQATQAYNGLMRIYKPVLRNIESSLIKLKQDGSVTVAQ

SEQ ID NO: 83575 - DNA, 561 bp, Arabidopsis thaliana
  misc_feature (1)..(561): Ceres Seq. ID no. 12670830
  misc_feature: MA Experiment ID: 20000180 Result: Up-regulated in Transcription
  misc_feature: MA Experiment 20000180 PARAMETER Experiment Name: At_Germinating_Seeds_P Parameter: Age (hr) Value: 24 vs. 0
  misc_feature: MA Experiment 20000180 PARAMETER Experiment Name: At_Germinating_Seeds_P Parameter: Tissue Value: Germinating Seeds
  misc_feature: MA Experiment ID: 20000185 Result: Up-regulated in Transcription
  misc_feature: MA Experiment 20000185 PARAMETER Experiment Name: At_Roots__P Parameter: Age (day) Value: 7 vs. 21
  misc_feature: MA Experiment 20000185 PARAMETER Experiment Name: At_Roots__P Parameter: Organism Value: A. thaliana
  misc_feature: MA Experiment 20000185 PARAMETER Experiment Name: At_Roots__P Parameter: Tissue Value: Roots vs. Whole Plant
  misc_feature: MA Experiment ID: 20000264 Result: Up-regulated in Transcription
  misc_feature: MA Experiment 20000264 PARAMETER Experiment Name: At_Open_Flower_P Parameter: Age (day) Value: 21
  misc_feature: MA Experiment 20000264 PARAMETER Experiment Name: At_Open_Flower_P Parameter: Plant Line Value: WS
  misc_feature: MA Experiment 20000264 PARAMETER Experiment Name: At_Open_Flower_P Parameter: Tissue Value: Open Flower vs. Whole Plant
  misc_feature: MA Experiment ID: 20000265 Result: Up-regulated in Transcription
  misc_feature: MA Experiment 20000265 PARAMETER Experiment Name: At_Open_Flower_P Parameter: Age (day) Value: 21
  misc_feature: MA Experiment 20000265 PARAMETER Experiment Name: At_Open_Flower_P Parameter: Plant Line Value: WS
  misc_feature: MA Experiment 20000265 PARAMETER Experiment Name: At_Open_Flower_P Parameter: Tissue Value: Closed Flower vs. Whole Plant
  misc_feature: MA Experiment ID: 20000286 Result: Up-regulated in Transcription
  misc_feature: MA Experiment 20000286 PARAMETER Experiment Name: At_Open_Flower_P Parameter: Age (day) Value: 21
  misc_feature: MA Experiment 20000286 PARAMETER Experiment Name: At_Open_Flower_P Parameter: Plant Line Value: WS
  misc_feature: MA Experiment 20000286 PARAMETER Experiment Name: At_Open_Flower_P Parameter: Tissue Value: Half Open vs. Whole Plant
  misc_feature: MA Experiment ID: 20000439 Result: Up-regulated in Transcription
  misc_feature: MA Experiment 20000439 PARAMETER Experiment Name: At_Roots__P Parameter: Age (day) Value: 14 vs. 21
  misc_feature: MA Experiment 20000439 PARAMETER Experiment Name: At_Roots__P Parameter: Organism Value: A. thaliana
  misc_feature: MA Experiment 20000439 PARAMETER Experiment Name: At_Roots__P Parameter: Tissue Value: Roots vs. Whole Plant
  misc_feature: MA Experiment ID: 20000794 Result: Up-regulated in Transcription
  misc_feature: MA Experiment 20000794 PARAMETER Experiment Name: At_Petals_P Parameter: Age (day) Value: 23-25 days
  misc_feature: MA Experiment 20000794 PARAMETER Experiment Name: At_Petals_P Parameter: Plant Line Value: WS
  misc_feature: MA Experiment 20000794 PARAMETER Experiment Name: At_Petals_P Parameter: Tissue Value: Petals vs. Whole plant
  misc_feature: MA Experiment ID: 20001757 Result: Down-regulated in Transcription
  misc_feature: MA Experiment 20001757 PARAMETER Experiment Name: At_50mM_NH4NO3_L-to-H_P Parameter: Timepoint (hr) Value: 6
  misc_feature: MA Experiment 20001757 PARAMETER Experiment Name: At_50mM_NH4NO3_L-to-H_P Parameter: Tissue Value: Leaf
  misc_feature: MA Experiment 20001757 PARAMETER Experiment Name: At_50mM_NH4NO3_L-to-H_P Parameter: Treatment Value: 50mM NH4NO3 vs 100mM Mannitol
  misc_feature: MA Experiment ID: 20001910 Result: Up-regulated in Transcription
  misc_feature: MA Experiment 20001910 PARAMETER Experiment Name: At_Drought_Reproduction_P Parameter: Age (day) Value: 37
  misc_feature: MA Experiment 20001910 PARAMETER Experiment Name: At_Drought_Reproduction_P Parameter: Organism Value: A. thaliana
  misc_feature: MA Experiment 20001910 PARAMETER Experiment Name: At_Drought_Reproduction_P Parameter: Plant Line Value: WS
  misc_feature: MA Experiment 20001910 PARAMETER Experiment Name: At_Drought_Reproduction_P Parameter: Timepoint (day) Value: 7
  misc_feature: MA Experiment 20001910 PARAMETER Experiment Name: At_Drought_Reproduction_P Parameter: Tissue Value: Flowers
  misc_feature: MA Experiment 20001910 PARAMETER Experiment Name: At_Drought_Reproduction_P Parameter: Treatment Value: Drought vs. No Drought
atgttcaacaaaaaccaaggatccaacggtggttcatcttccaatgtcggcatcggagctgattcaccttaccttcaaaaggcacgttcaggcaaaacagagatcagagaactcgaagcagttttcaagaaattcgacgtgaacggagatggtaagatctcgtcaaaggaacttggtgcaataatgacgagtctaggtcatgaggtaccagaagaagaactagagaaagcgatcactgagatagatcgtaaaggagatggttacataaactttgaagagtttgtggagctgaacacgaaaggtatggatcaaaatgatgttttggagaatctgaaagatgcgttttcggtttacgatatcgatgggaatggttcgatatcggctgaggagttgcatgaggttttgaggagtcttggtgatgaatgttcgatcgcggagtgtaggaagatgattggtggtgttgataaagatggtgatggtacgattgattttgaagagtttaagattatgatgactatgggatctagacgtgataatgtcatgggaggtggtccgaggtag

SEQ ID NO: 83576 - protein, 186 aa, Arabidopsis thaliana
  peptide (1)..(186): Ceres Seq. ID no. 12670831
  misc_feature (146)..(174): Pfam Name: EF hand Pfam Description: EF hand
  misc_feature (1)..(186): Homolog of NCBI NO: 15221781 NR Description: putative calmodulin; protein id: At1g24620.1
  misc_feature (19)..(174): Homolog of NCBI NO: 19386815 NR Description: B1147A04.10 [Oryza sativa (japonica
  misc_feature (36)..(181): Homolog of NCBI NO: 13397927 NR Description: putative calmodulin-related protein [Medicago
  misc_feature (35)..(172): Homolog of NCBI NO: 14423843 NR Description: Polcalcin Jun o 2 (Calcium-binding pollen Jun o 2) >gi|5391446|gb|AAC15474.2| pollen allergen Jun o 4
  misc_feature (37)..(175): Homolog of NCBI NO: 15221030 NR Description: calcium-binding protein, putative; protein id: supported by cDNA: 19462., supported by cDNA: gi_15027896, by cDNA: gi_19310788 [Arabidopsis thaliana]
  misc_feature (29)..(174): Homolog of NCBI NO: 15240340 NR Description: CALMODULIN-RELATED PROTEIN 2, TOUCH-INDUCED protein id: At5g37770.1, supported by cDNA: 25475. [Arabidopsis
  misc_feature (35)..(175): Homolog of NCBI NO: 18408502 NR Description: calmodulin-related protein; protein id: supported by cDNA: 95959., supported by cDNA: gi_17380757
  misc_feature (35)..(175): Homolog of NCBI NO: 21618074 NR Description: calmodulin-related protein [Arabidopsis thaliana]
  misc_feature (27)..(172): Homolog of NCBI NO: 15219514 NR Description: putative calmodulin; protein id: At1g73630.1, by cDNA: 94584. [Arabidopsis thaliana] >gi|25295748|pir||C96763
  misc_feature (34)..(172): Homolog of NCBI NO: 14589311 NR Description: calcium binding protein [Sesbania rostrata]
MFNKNQGSNGGSSSNVGIGADSPYLQKARSGKTEIRELEAVFKKFDVNGDGKISSKELGAIMTSLGHEVPEEELEKAITEIDRKGDGYINFEEFVELNTKGMDQNDVLENLKDAFSVYDIDGNGSISAEELHEVLRSLGDECSIAECRKMIGGVDKDGDGTIDFEEFKIMMTMGSRRDNVMGGGPR

SEQ ID NO: 83577 - protein, 125 aa, Arabidopsis thaliana
  peptide (1)..(125): Ceres Seq. ID no. 12670832
  misc_feature (85)..(113): Pfam Name: EF hand Pfam Description: EF hand
  misc_feature (1)..(125): Homolog of NCBI NO: 15221781 NR Description: putative calmodulin; protein id: At1g24620.1
  misc_feature (1)..(113): Homolog of NCBI NO: 19386815 NR Description: B1147A04.10 [Oryza sativa (japonica
  misc_feature (1)..(120): Homolog of NCBI NO: 13397927 NR Description: putative calmodulin-related protein [Medicago
  misc_feature (1)..(111): Homolog of NCBI NO: 14423843 NR Description: Polcalcin Jun o 2 (Calcium-binding pollen Jun o 2) >gi|5391446|gb|AAC15474.2| pollen allergen Jun o 4
  misc_feature (1)..(114): Homolog of NCBI NO: 15221030 NR Description: calcium-binding protein, putative; protein id: supported by cDNA: 19462., supported by cDNA: gi_15027896, by cDNA: gi_19310788 [Arabidopsis thaliana]
  misc_feature (1)..(113): Homolog of NCBI NO: 15240340 NR Description: CALMODULIN-RELATED PROTEIN 2, TOUCH-INDUCED protein id: At5g37770.1, supported by cDNA: 25475. [Arabidopsis
  misc_feature (1)..(114): Homolog of NCBI NO: 18408502 NR Description: calmodulin-related protein; protein id: supported by cDNA: 95959., supported by cDNA: gi_17380757
  misc_feature (1)..(114): Homolog of NCBI NO: 21618074 NR Description: calmodulin-related protein [Arabidopsis thaliana]
  misc_feature (1)..(111): Homolog of NCBI NO: 15219514 NR Description: putative calmodulin; protein id: At1g73630.1, by cDNA: 94584. [Arabidopsis thaliana] >gi|25295748|pir||C96763
  misc_feature (1)..(111): Homolog of NCBI NO: 14589311 NR Description: calcium binding protein [Sesbania rostrata]
MTSLGHEVPEEELEKAITEIDRKGDGYINFEEFVELNTKGMDQNDVLENLKDAFSVYDIDGNGSISAEELHEVLRSLGDECSIAECRKMIGGVDKDGDGTIDFEEFKIMMTMGSRRDNVMGGGPR

SEQ ID NO: 83578 - DNA, 669 bp, Arabidopsis thaliana
  misc_feature (1)..(669): Ceres Seq. ID no. 12670837
  misc_feature: MA Experiment ID: 20000315 Result: Down-regulated in Transcription
  misc_feature: MA Experiment 20000315 PARAMETER Experiment Name: At_14day_Shoots-Roots_Sub_P Parameter: Age (day) Value: 14
  misc_feature: MA Experiment 20000315 PARAMETER Experiment Name: At_14day_Shoots-Roots_Sub_P Parameter: Organism Value: A. thaliana
  misc_feature: MA Experiment 20000315 PARAMETER Experiment Name: At_14day_Shoots-Roots_Sub_P Parameter: Plant Line Value: WS
  misc_feature: MA Experiment 20000315 PARAMETER Experiment Name: At_14day_Shoots-Roots_Sub_P Parameter: Tissue Value: Shoots vs. Whole Plant
  misc_feature: MA Experiment ID: 20000346 Result: Up-regulated in Transcription
  misc_feature: MA Experiment 20000346 PARAMETER Experiment Name: At_2mM_SA_Sub_P Parameter: Age (day) Value: 14
  misc_feature: MA Experiment 20000346 PARAMETER Experiment Name: At_2mM_SA_Sub_P Parameter: Organism Value: A. thaliana
  misc_feature: MA Experiment 20000346 PARAMETER Experiment Name: At_2mM_SA_Sub_P Parameter: Plant Line Value: WS
  misc_feature: MA Experiment 20000346 PARAMETER Experiment Name: At_2mM_SA_Sub_P Parameter: Timepoint (hr) Value: 1
  misc_feature: MA Experiment 20000346 PARAMETER Experiment Name: At_2mM_SA_Sub_P Parameter: Tissue Value: Aerial
  misc_feature: MA Experiment 20000346 PARAMETER Experiment Name: At_2mM_SA_Sub_P Parameter: Treatment Value: 2mM SA vs. No Treatment
  misc_feature: MA Experiment ID: 20000355 Result: Down-regulated in Transcription
  misc_feature: MA Experiment 20000355 PARAMETER Experiment Name: At_Siliques_Sub_P Parameter: Age (day) Value: 21
  misc_feature: MA Experiment 20000355 PARAMETER Experiment Name: At_Siliques_Sub_P Parameter: Organism Value: A. thaliana
  misc_feature: MA Experiment 20000355 PARAMETER Experiment Name: At_Siliques_Sub_P Parameter: Plant Line Value: WS
  misc_feature: MA Experiment 20000355 PARAMETER Experiment Name: At_Siliques_Sub_P Parameter: Tissue Value: Less Than 5mm Siliques vs. Whole Plant
atggcagaatcgaattcgataccttccgttgttatcaattcctctaaacagaatggtcctatcatcgtgattgataattacgacagcttcacttacaatctctgccagtatatgggagagctacaatgccattttgaagtttaccgcaatgatgaacttacagtagaagagctgaaaagaaaaaatccaagaggagtgttgatttctcctggacctggtacccctcaagactctgggatttccttgcaaactgttttggaactcggaccacttgttcctttatttggagtatgtatgggtttgcagtgtataggagaagcatttggaggaaagattgtgcggtcaccatttggtgttatgcatgggaaaagctcaatggttcactatgatgagaaaggagaagaaggcttgttctctggattatcaaaccctttcattgtaggtagatatcacagtctcgtgatcgaaaaagatacatttcctagtgatgagctcgaggttacagcatggacagaagatggtctggttatggctgcccgtcacagaaagtacaagcatatacagggagttcaatttcatccggagagtattataacaactgagggcaagacaattgtccgcaatttcatcaaaatcgtagagaaaaaggattccgagaagctgacgtag

SEQ ID NO: 83579 - protein, 222 aa, Arabidopsis thaliana
  peptide (1)..(222): Ceres Seq. ID no. 12670838
  misc_feature (22)..(212): Pfam Name: Glutamine amidotransferase class-I Pfam Description: Glutamine amidotransferase class-I
  misc_feature (1)..(222): Homolog of NCBI NO: 15221840 NR Description: F5A9.7; protein id: At1g25083.1 [Arabidopsis >gi|18395568|ref|NP_564224.1| anthranilate synthase beta subunit; id: At1g24909.1 [Arabidopsis thaliana]
  misc_feature (1)..(222): Homolog of NCBI NO: 25403004 NR Description: probable anthranilate synthase beta subunit
  misc_feature (1)..(222): Homolog of NCBI NO: 15222532 NR Description: anthranilate synthase beta subunit; protein id: supported by cDNA: gi_20466735, supported by cDNA: gi_403433 thaliana] >gi|541849|pir||JQ2340 anthranilate synthase (EC
  misc_feature (1)..(222): Homolog of NCBI NO: 15221810 NR Description: F5A9.17; protein id: At1g24807.1 [Arabidopsis >gi|9945079|gb|AAG03116.1|AC004133_10 F5A9.17 [Arabidopsis
  misc_feature (1)..(221): Homolog of NCBI NO: 15242893 NR Description: anthranilate synthase beta chain; protein id: supported by cDNA: 6495. [Arabidopsis thaliana]
  misc_feature (1)..(221): Homolog of NCBI NO: 21594026 NR Description: anthranilate synthase beta chain [Arabidopsis
  misc_feature (20)..(214): Homolog of NCBI NO: 28301926 NR Description: putative anthranilate synthase beta subunit
  misc_feature (2)..(220): Homolog of NCBI NO: 21741992 NR Description: OSJNBa0060P14.13 [Oryza sativa (japonica
  misc_feature (21)..(211): Homolog of NCBI NO: 37520452 NR Description: anthranilate synthase component II [Gloeobacter >gi|35211446|dbj|BAC88824.1| anthranilate synthase component II
  misc_feature (21)..(210): Homolog of NCBI NO: 11467408 NR Description: anthranilate synthase component II [Cyanophora >gi|1351304|sp|P48261|TRPG_CYAPA Anthranilate synthase component
MAESNSIPSVVINSSKQNGPIIVIDNYDSFTYNLCQYMGELQCHFEVYRNDELTVEELKRKNPRGVLISPGPGTPQDSGISLQTVLELGPLVPLFGVCMGLQCIGEAFGGKIVRSPFGVMHGKSSMVHYDEKGEEGLFSGLSNPFIVGRYHSLVIEKDTFPSDELEVTAWTEDGLVMAARHRKYKHIQGVQFHPESIITTEGKTIVRNFIKIVEKKDSEKLT

SEQ ID NO: 83580 - protein, 185 aa, Arabidopsis thaliana
  peptide (1)..(185): Ceres Seq. ID no. 12670839
  misc_feature (1)..(175): Pfam Name: Glutamine amidotransferase class-I Pfam Description: Glutamine amidotransferase class-I
  misc_feature (1)..(185): Homolog of NCBI NO: 15221840 NR Description: F5A9.7; protein id: At1g25083.1 [Arabidopsis >gi|18395568|ref|NP_564224.1| anthranilate synthase beta subunit; id: At1g24909.1 [Arabidopsis thaliana]
  misc_feature (1)..(185): Homolog of NCBI NO: 25403004 NR Description: probable anthranilate synthase beta subunit
  misc_feature (1)..(185): Homolog of NCBI NO: 15222532 NR Description: anthranilate synthase beta subunit; protein id: supported by cDNA: gi_20466735, supported by cDNA: gi_403433 thaliana] >gi|541849|pir||JQ2340 anthranilate synthase (EC
  misc_feature (1)..(185): Homolog of NCBI NO: 15221810 NR Description: F5A9.17; protein id: At1g24807.1 [Arabidopsis >gi|9945079|gb|AAG03116.1|AC004133_10 F5A9.17 [Arabidopsis
  misc_feature (1)..(184): Homolog of NCBI NO: 15242893 NR Description: anthranilate synthase beta chain; protein id: supported by cDNA: 6495. [Arabidopsis thaliana]
  misc_feature (1)..(184): Homolog of NCBI NO: 21594026 NR Description: anthranilate synthase beta chain [Arabidopsis
  misc_feature (1)..(177): Homolog of NCBI NO: 28301926 NR Description: putative anthranilate synthase beta subunit
  misc_feature (1)..(183): Homolog of NCBI NO: 21741992 NR Description: OSJNBa0060P14.13 [Oryza sativa (japonica
  misc_feature (1)..(174): Homolog of NCBI NO: 37520452 NR Description: anthranilate synthase component II [Gloeobacter >gi|35211446|dbj|BAC88824.1| anthranilate synthase component II
  misc_feature (1)..(173): Homolog of NCBI NO: 11467408 NR Description: anthranilate synthase component II [Cyanophora >gi|1351304|sp|P48261|TRPG_CYAPA Anthranilate synthase component
MGELQCHFEVYRNDELTVEELKRKNPRGVLISPGPGTPQDSGISLQTVLELGPLVPLFGVCMGLQCIGEAFGGKIVRSPFGVMHGKSSMVHYDEKGEEGLFSGLSNPFIVGRYHSLVIEKDTFPSDELEVTAWTEDGLVMAARHRKYKHIQGVQFHPESIITTEGKTIVRNFIKIVEKKDSEKLT

SEQ ID NO: 83581 - protein, 124 aa, Arabidopsis thaliana
  peptide (1)..(124): Ceres Seq. ID no. 12670840
  misc_feature (1)..(114): Pfam Name: Glutamine amidotransferase class-I Pfam Description: Glutamine amidotransferase class-I
  misc_feature (1)..(124): Homolog of NCBI NO: 15221840 NR Description: F5A9.7; protein id: At1g25083.1 [Arabidopsis >gi|18395568|ref|NP_564224.1| anthranilate synthase beta subunit; id: At1g24909.1 [Arabidopsis thaliana]
  misc_feature (1)..(124): Homolog of NCBI NO: 25403004 NR Description: probable anthranilate synthase beta subunit
  misc_feature (1)..(124): Homolog of NCBI NO: 15222532 NR Description: anthranilate synthase beta subunit; protein id: supported by cDNA: gi_20466735, supported by cDNA: gi_403433 thaliana] >gi|541849|pir||JQ2340 anthranilate synthase (EC
  misc_feature (1)..(124): Homolog of NCBI NO: 15221810 NR Description: F5A9.17; protein id: At1g24807.1 [Arabidopsis >gi|9945079|gb|AAG03116.1|AC004133_10 F5A9.17 [Arabidopsis
  misc_feature (1)..(123): Homolog of NCBI NO: 15242893 NR Description: anthranilate synthase beta chain; protein id: supported by cDNA: 6495. [Arabidopsis thaliana]
  misc_feature (1)..(123): Homolog of NCBI NO: 21594026 NR Description: anthranilate synthase beta chain [Arabidopsis
  misc_feature (1)..(116): Homolog of NCBI NO: 28301926 NR Description: putative anthranilate synthase beta subunit
  misc_feature (1)..(122): Homolog of NCBI NO: 21741992 NR Description: OSJNBa0060P14.13 [Oryza sativa (japonica
  misc_feature (1)..(113): Homolog of NCBI NO: 37520452 NR Description: anthranilate synthase component II [Gloeobacter >gi|35211446|dbj|BAC88824.1| anthranilate synthase component II
  misc_feature (1)..(112): Homolog of NCBI NO: 11467408 NR Description: anthranilate synthase component II [Cyanophora >gi|1351304|sp|P48261|TRPG_CYAPA Anthranilate synthase component
MGLQCIGEAFGGKIVRSPFGVMHGKSSMVHYDEKGEEGLFSGLSNPFIVGRYHSLVIEKDTFPSDELEVTAWTEDGLVMAARHRKYKHIQGVQFHPESIITTEGKTIVRNFIKIVEKKDSEKLT

SEQ ID NO: 83582 - DNA, 3738 bp, Arabidopsis thaliana
  misc_feature (1)..(3738): Ceres Seq. ID no. 12670845
  misc_feature: MA Experiment ID: 20000327 Result: Down-regulated in Transcription
  misc_feature: MA Experiment 20000327 PARAMETER Experiment Name: At_42deg_Heat_Sub_P Parameter: Age (day) Value: 14
  misc_feature: MA Experiment 20000327 PARAMETER Experiment Name: At_42deg_Heat_Sub_P Parameter: Organism Value: A. thaliana
  misc_feature: MA Experiment 20000327 PARAMETER Experiment Name: At_42deg_Heat_Sub_P Parameter: Plant Line Value: WS
  misc_feature: MA Experiment 20000327 PARAMETER Experiment Name: At_42deg_Heat_Sub_P Parameter: Temperature (deg C) Value: 42 vs. 22
  misc_feature: MA Experiment 20000327 PARAMETER Experiment Name: At_42deg_Heat_Sub_P Parameter: Timepoint (hr) Value: 1
  misc_feature: MA Experiment 20000327 PARAMETER Experiment Name: At_42deg_Heat_Sub_P Parameter: Tissue Value: Aerial
  misc_feature: MA Experiment ID: 20000328 Result: Down-regulated in Transcription
  misc_feature: MA Experiment 20000328 PARAMETER Experiment Name: At_42deg_Heat_Sub_P Parameter: Age (day) Value: 14
  misc_feature: MA Experiment 20000328 PARAMETER Experiment Name: At_42deg_Heat_Sub_P Parameter: Organism Value: A. thaliana
  misc_feature: MA Experiment 20000328 PARAMETER Experiment Name: At_42deg_Heat_Sub_P Parameter: Plant Line Value: WS
  misc_feature: MA Experiment 20000328 PARAMETER Experiment Name: At_42deg_Heat_Sub_P Parameter: Temperature (deg C) Value: 42 vs. 22
  misc_feature: MA Experiment 20000328 PARAMETER Experiment Name: At_42deg_Heat_Sub_P Parameter: Timepoint (hr) Value: 6
  misc_feature: MA Experiment 20000328 PARAMETER Experiment Name: At_42deg_Heat_Sub_P Parameter: Tissue Value: Aerial
  misc_feature: MA Experiment ID: 20000329 Result: Up-regulated in Transcription
  misc_feature: MA Experiment 20000329 PARAMETER Experiment Name: At_4deg_Cold_Sub_P Parameter: Age (day) Value: 14
  misc_feature: MA Experiment 20000329 PARAMETER Experiment Name: At_4deg_Cold_Sub_P Parameter: Organism Value: A. thaliana
  misc_feature: MA Experiment 20000329 PARAMETER Experiment Name: At_4deg_Cold_Sub_P Parameter: Plant Line Value: WS
  misc_feature: MA Experiment 20000329 PARAMETER Experiment Name: At_4deg_Cold_Sub_P Parameter: Temperature (deg C) Value: 4 vs. 22
  misc_feature: MA Experiment 20000329 PARAMETER Experiment Name: At_4deg_Cold_Sub_P Parameter: Timepoint (hr) Value: 6
  misc_feature: MA Experiment 20000329 PARAMETER Experiment Name: At_4deg_Cold_Sub_P Parameter: Tissue Value: Aerial
  misc_feature: MA Experiment ID: 20000355 Result: Up-regulated in Transcription
  misc_feature: MA Experiment 20000355 PARAMETER Experiment Name: At_Siliques_Sub_P Parameter: Age (day) Value: 21
  misc_feature: MA Experiment 20000355 PARAMETER Experiment Name: At_Siliques_Sub_P Parameter: Organism Value: A. thaliana
  misc_feature: MA Experiment 20000355 PARAMETER Experiment Name: At_Siliques_Sub_P Parameter: Plant Line Value: WS
  misc_feature: MA Experiment 20000355 PARAMETER Experiment Name: At_Siliques_Sub_P Parameter: Tissue Value: Less Than 5mm Siliques vs. Whole Plant
  misc_feature: MA Experiment ID: 20000440 Result: Up-regulated in Transcription
  misc_feature: MA Experiment 20000440 PARAMETER Experiment Name: At_Closed-Flower__Sub_P Parameter: Tissue Value: Closed Flower vs. Whole Plant
atggataacacagaaagatcctctaatggaaacatccaagccgagacggaagcaaaggaggagaagaaaaatataaagaaggaatcagtgtcattgatgggtttgtttagcgcagcagataaacttgattactttctcatgttgctaggaggtttaggtgcgtgtatacatggcgctacgcttcctctcttcttcgtgttcttcggaaaaatgctagattctcttggaaatctttctacagatcctaaagccatatcttcccgcgtttcacagaatgctctgtacttggtctacttaggattggtcaattttgtatcagcttggatcggagtttcttgttggatgcaaacaggggaaagacaaacagcacgattgcgtataaattatctcaaatcgatattagcaaaagacattactttctttgatactgaagctagagattcaaatctcatttttcacatatcaagcgatgctatcttggttcaagatgcaattggcgataagaccgaccatgttttgcggtatctatctcagtttatagcgggatttgtcattggttttttgtcggtatggcaactaacgctgctcacgttaggagtggttccactgatagctattgcaggaggagggtatgctatagtcatgtctacaatctcagagaagagtgagactgcttatgctgatgcaggaaaagtcgcagaagaggttatgtcacaggtgagaacagtgtatgcttttgtaggagaagagaaagctgtaaaatcttactcaaattctctcaagaaagctctgaaactcggtaaaaggagcggtcttgctaaaggtttaggagttggattaacatatagcctcttgttctgtgcttgggctttgcttttgtggtatgcaagtcttcttgtacgccacggcaaaaccaatggtgcaaaagccttcacaaccatcctcaatgtcattttcagtggattcgccttaggtcaagccgcacctagcttatccgcgattgctaagggtagagttgctgctgcaaacatattcagaatgatagggaacaacaattctgaaagttctcaaagattagacgagggaacaacattgcaaaatgtagctgggaggattgagtttcaaaaagtgtctttcgcatatccttctagaccaaacatggtttttgagaatcttagtttcacaatacggtcaggcaagacttttgcatttgtcggtccaagtggttcagggaaaagcacaatcatatcaatggttcaacgtttctatgaacctaactcaggggagattctcttagatggaaatgacatcaagagcctaaagcttaaatggtttagagaacagcttggattagtgagtcaagaaccagcattattcgccacaacaatagcttccaatattcttttaggtaaagagaatgcgaatatggatcagatcatagaagctgctaaagcagctaatgctgattctttcattaaatcattacctaatggttacaatactcaggttggagaaggaggaactcaactctcaggaggacagaaacagaggattgcaattgctcgagcagttctaagaaatccaaagatattacttttagatgaagcaacaagcgctcttgatgccgaatcagagaagattgttcagcaagcacttgacaatgtcatggaaaaaagaacaacaatcgtcgttgcacatagattatccaccattcgaaatgttgacaagattgttgtcttgagagatggtcaagttagggaaaccggaagccactcagaactcatgttaagaggaggagattatgcgactcttgtcaattgccaagagacagaacctcaagaaaactcgagatcaattatgtctgaaacttgtaaatctcaagctggatcttctagttcaagaagagtttctagctcaaggaggacttcaagcttcagggtagaccaagagaagactaaaaatgatgattccaaaaaagactttagctcttcttcgatgatatgggaacttataaagttgaattctccagaatggccatatgcattacttggctccattggtgcagtacttgctggagcacaaactccattgttctctatggggattgcttatgtgttaactgcattttattcgccttttcctaatgtgatcaagcgcgacgtagaaaaggtagctattatctttgctggagctggaatagtaactgcacctatatatcttctccaacattacttctatacactaatgggagagcgtcttacttctagggttcgcttatccttgttctcagcgattctttcaaatgagattggatggtttgatctggatgagaacaacactggctcacttacttcaatcttagctgctgatgcaactttggtgaggagtgctctagcggatcgcctctcgacaatagtccaaaacttgtctcttacagtcactgcattggcacttgcctttttctatagttggcgtgttgcagctgtggtaacggcttgtttccctcttctcattgcggcttcacttaccgagcaactatttttaaaaggctttggaggagattacacaagagcttactctagggcaacttcagtggcacgtgaagcgattgcaaatataagaactgtcgctgcatatggtgccgaaaagcagatctcggaacagtttacttgtgagctaagcaagcccaccaagaatgcctttgtcagaggtcatatctctggatttggatacggtttgtctcagtttcttgcgttctgttcctacgctcttggtctctggtacgtatcggttttgatcaatcataaggagacgaattttggggatagtatcaaatccttcatggtgttgatcgtcacagctttctcagtttcggaaacgcttgctttgaccccagatatcgtgaagggcacgcaagcactcgggtcagttttcagggttttacatagagagaccaagatatctccagaccagcctaactcaagaatggttagtcaagtcaaaggagatatagagtttagaaacgtgagttttgtgtatcccacaagacccgaaattgacattttcaaaaacctaaacctccgagtttcagccgggaaaagtcttgcggtcgtaggacctagtggttcgggaaagagcacggtgatcggactgatcatgagattctacgatccgagcaacggcaatctttgcatcgatgggcaagacataaaaaccctaaacttacgtagcttgcgcaagaagctagcgctagttcaacaagaaccggctctcttttcaacaaccatatacgaaaacattaagtatggcaatgaaaacgcatcggaggcagagatcatggaagctgcgaaagcggcgaatgcgcacgagttcattatcaagatggaagaagggtacaaaacgcacgcgggtgataagggagtacaattatcaggtgggcagaaacagagagtggctatcgcgagggcggttttaaaggacccttcagtgcttctccttgatgaggcaacaagtgctctggacacgagctcggagaaactagtccaagaggcgctagacaagctaatgaagggacgaacgacggtattggtggctcataggctgtcgaccataagaaaagcagatacggtcgctgtgttgcataagggaagggttgtagagaaaggaagtcatagagagcttgtttcaatacctaatgggttttataagcaattgacgagtcttcaagaagtactgtga

SEQ ID NO: 83583 - protein, 1245 aa, Arabidopsis thaliana
  peptide (1)..(1245): Ceres Seq. ID no. 12670846
  misc_feature (47)..(324): Pfam Name: ABC transporter transmembrane region Pfam Description: ABC transporter transmembrane region
  misc_feature (613)..(1238): Homolog of NCBI NO: 27368853 NR Description: MDR-like ABC transporter [Oryza sativa (japonica
  misc_feature (29)..(643): Homolog of NCBI NO: 27368853 NR Description: MDR-like ABC transporter [Oryza sativa (japonica
  misc_feature (2)..(933): Homolog of NCBI NO: 18496818 NR Description: ABC transporter AbcB3 [Dictyostelium discoideum]
  misc_feature (940)..(1238): Homolog of NCBI NO: 18496818 NR Description: ABC transporter AbcB3 [Dictyostelium discoideum]
  misc_feature (17)..(1227): Homolog of NCBI NO: 22328760 NR Description: multidrug resistance P-glycoprotein, putative;
  misc_feature (17)..(677): Homolog of NCBI NO: 25407562 NR Description: hypothetical protein AT4g18050 [imported] -
  misc_feature (788)..(1227): Homolog of NCBI NO: 25407562 NR Description: hypothetical protein AT4g18050 [imported] -
  misc_feature (161)..(659): Homolog of NCBI NO: 18496816 NR Description: ABC transporter AbcB2 [Dictyostelium discoideum]
  misc_feature (599)..(937): Homolog of NCBI NO: 18496816 NR Description: ABC transporter AbcB2 [Dictyostelium discoideum]
  misc_feature (940)..(1242): Homolog of NCBI NO: 18496816 NR Description: ABC transporter AbcB2 [Dictyostelium discoideum]
MDNTERSSNGNIQAETEAKEEKKNIKKESVSLMGLFSAADKLDYFLMLLGGLGACIHGATLPLFFVFFGKMLDSLGNLSTDPKAISSRVSQNALYLVYLGLVNFVSAWIGVSCWMQTGERQTARLRINYLKSILAKDITFFDTEARDSNLIFHISSDAILVQDAIGDKTDHVLRYLSQFIAGFVIGFLSVWQLTLLTLGVVPLIAIAGGGYAIVMSTISEKSETAYADAGKVAEEVMSQVRTVYAFVGEEKAVKSYSNSLKKALKLGKRSGLAKGLGVGLTYSLLFCAWALLLWYASLLVRHGKTNGAKAFTTILNVIFSGFALGQAAPSLSAIAKGRVAAANIFRMIGNNNSESSQRLDEGTTLQNVAGRIEFQKVSFAYPSRPNMVFENLSFTIRSGKTFAFVGPSGSGKSTIISMVQRFYEPNSGEILLDGNDIKSLKLKWFREQLGLVSQEPALFATTIASNILLGKENANMDQIIEAAKAANADSFIKSLPNGYNTQVGEGGTQLSGGQKQRIAIARAVLRNPKILLLDEATSALDAESEKIVQQALDNVMEKRTTIVVAHRLSTIRNVDKIVVLRDGQVRETGSHSELMLRGGDYATLVNCQETEPQENSRSIMSETCKSQAGSSSSRRVSSSRRTSSFRVDQEKTKNDDSKKDFSSSSMIWELIKLNSPEWPYALLGSIGAVLAGAQTPLFSMGIAYVLTAFYSPFPNVIKRDVEKVAIIFAGAGIVTAPIYLLQHYFYTLMGERLTSRVRLSLFSAILSNEIGWFDLDENNTGSLTSILAADATLVRSALADRLSTIVQNLSLTVTALALAFFYSWRVAAVVTACFPLLIAASLTEQLFLKGFGGDYTRAYSRATSVAREAIANIRTVAAYGAEKQISEQFTCELSKPTKNAFVRGHISGFGYGLSQFLAFCSYALGLWYVSVLINHKETNFGDSIKSFMVLIVTAFSVSETLALTPDIVKGTQALGSVFRVLHRETKISPDQPNSRMVSQVKGDIEFRNVSFVYPTRPEIDIFKNLNLRVSAGKSLAVVGPSGSGKSTVIGLIMRFYDPSNGNLCIDGQDIKTLNLRSLRKKLALVQQEPALFSTTIYENIKYGNENASEAEIMEAAKAANAHEFIIKMEEGYKTHAGDKGVQLSGGQKQRVAIARAVLKDPSVLLLDEATSALDTSSEKLVQEALDKLMKGRTTVLVAHRLSTIRKADTVAVLHKGRVVEKGSHRELVSIPNGFYKQLTSLQEVL

SEQ ID NO: 83584 - protein, 1213 aa, Arabidopsis thaliana
  peptide (1)..(1213): Ceres Seq. ID no. 12670847
  misc_feature (15)..(292): Pfam Name: ABC transporter transmembrane region Pfam Description: ABC transporter transmembrane region
  misc_feature (581)..(1206): Homolog of NCBI NO: 27368853 NR Description: MDR-like ABC transporter [Oryza sativa (japonica
  misc_feature (1)..(611): Homolog of NCBI NO: 27368853 NR Description: MDR-like ABC transporter [Oryza sativa (japonica
  misc_feature (1)..(901): Homolog of NCBI NO: 18496818 NR Description: ABC transporter AbcB3 [Dictyostelium discoideum]
  misc_feature (908)..(1206): Homolog of NCBI NO: 18496818 NR Description: ABC transporter AbcB3 [Dictyostelium discoideum]
  misc_feature (1)..(1195): Homolog of NCBI NO: 22328760 NR Description: multidrug resistance P-glycoprotein, putative;
  misc_feature (1)..(645): Homolog of NCBI NO: 25407562 NR Description: hypothetical protein AT4g18050 [imported] -
  misc_feature (756)..(1195): Homolog of NCBI NO: 25407562 NR Description: hypothetical protein AT4g18050 [imported] -
  misc_feature (129)..(627): Homolog of NCBI NO: 18496816 NR Description: ABC transporter AbcB2 [Dictyostelium discoideum]
  misc_feature (567)..(905): Homolog of NCBI NO: 18496816 NR Description: ABC transporter AbcB2 [Dictyostelium discoideum]
  misc_feature (908)..(1210): Homolog of NCBI NO: 18496816 NR Description: ABC transporter AbcB2 [Dictyostelium discoideum]
MGLFSAADKLDYFLMLLGGLGACIHGATLPLFFVFFGKMLDSLGNLSTDPKAISSRVSQNALYLVYLGLVNFVSAWIGVSCWMQTGERQTARLRINYLKSILAKDITFFDTEARDSNLIFHISSDAILVQDAIGDKTDHVLRYLSQFIAGFVIGFLSVWQLTLLTLGVVPLIAIAGGGYAIVMSTISEKSETAYADAGKVAEEVMSQVRTVYAFVGEEKAVKSYSNSLKKALKLGKRSGLAKGLGVGLTYSLLFCAWALLLWYASLLVRHGKTNGAKAFTTILNVIFSGFALGQAAPSLSAIAKGRVAAANIFRMIGNNNSESSQRLDEGTTLQNVAGRIEFQKVSFAYPSRPNMVFENLSFTIRSGKTFAFVGPSGSGKSTIISMVQRFYEPNSGEILLDGNDIKSLKLKWFREQLGLVSQEPALFATTIASNILLGKENANMDQIIEAAKAANADSFIKSLPNGYNTQVGEGGTQLSGGQKQRIAIARAVLRNPKILLLDEATSALDAESEKIVQQALDNVMEKRTTIVVAHRLSTIRNVDKIVVLRDGQVRETGSHSELMLRGGDYATLVNCQETEPQENSRSIMSETCKSQAGSSSSRRVSSSRRTSSFRVDQEKTKNDDSKKDFSSSSMIWELIKLNSPEWPYALLGSIGAVLAGAQTPLFSMGIAYVLTAFYSPFPNVIKRDVEKVAIIFAGAGIVTAPIYLLQHYFYTLMGERLTSRVRLSLFSAILSNEIGWFDLDENNTGSLTSILAADATLVRSALADRLSTIVQNLSLTVTALALAFFYSWRVAAVVTACFPLLIAASLTEQLFLKGFGGDYTRAYSRATSVAREAIANIRTVAAYGAEKQISEQFTCELSKPTKNAFVRGHISGFGYGLSQFLAFCSYALGLWYVSVLINHKETNFGDSIKSFMVLIVTAFSVSETLALTPDIVKGTQALGSVFRVLHRETKISPDQPNSRMVSQVKGDIEFRNVSFVYPTRPEIDIFKNLNLRVSAGKSLAVVGPSGSGKSTVIGLIMRFYDPSNGNLCIDGQDIKTLNLRSLRKKLALVQQEPALFSTTIYENIKYGNENASEAEIMEAAKAANAHEFIIKMEEGYKTHAGDKGVQLSGGQKQRVAIARAVLKDPSVLLLDEATSALDTSSEKLVQEALDKLMKGRTTVLVAHRLSTIRKADTVAVLHKGRVVEKGSHRELVSIPNGFYKQLTSLQEVL

SEQ ID NO: 83585 - protein, 1199 aa, Arabidopsis thaliana
  peptide (1)..(1199): Ceres Seq. ID no. 12670848
  misc_feature (1)..(278): Pfam Name: ABC transporter transmembrane region Pfam Description: ABC transporter transmembrane region
  misc_feature (567)..(1192): Homolog of NCBI NO: 27368853 NR Description: MDR-like ABC transporter [Oryza sativa (japonica
  misc_feature (1)..(597): Homolog of NCBI NO: 27368853 NR Description: MDR-like ABC transporter [Oryza sativa (japonica
  misc_feature (1)..(887): Homolog of NCBI NO: 18496818 NR Description: ABC transporter AbcB3 [Dictyostelium discoideum]
  misc_feature (894)..(1192): Homolog of NCBI NO: 18496818 NR Description: ABC transporter AbcB3 [Dictyostelium discoideum]
  misc_feature (1)..(1181): Homolog of NCBI NO: 22328760 NR Description: multidrug resistance P-glycoprotein, putative;
  misc_feature (1)..(631): Homolog of NCBI NO: 25407562 NR Description: hypothetical protein AT4g18050 [imported] -
  misc_feature (742)..(1181): Homolog of NCBI NO: 25407562 NR Description: hypothetical protein AT4g18050 [imported] -
  misc_feature (115)..(613): Homolog of NCBI NO: 18496816 NR Description: ABC transporter AbcB2 [Dictyostelium discoideum]
  misc_feature (553)..(891): Homolog of NCBI NO: 18496816 NR Description: ABC transporter AbcB2 [Dictyostelium discoideum]
  misc_feature (894)..(1196): Homolog of NCBI NO: 18496816 NR Description: ABC transporter AbcB2 [Dictyostelium discoideum]
MLLGGLGACIHGATLPLFFVFFGKMLDSLGNLSTDPKAISSRVSQNALYLVYLGLVNFVSAWIGVSCWMQTGERQTARLRINYLKSILAKDITFFDTEARDSNLIFHISSDAILVQDAIGDKTDHVLRYLSQFIAGFVIGFLSVWQLTLLTLGVVPLIAIAGGGYAIVMSTISEKSETAYADAGKVAEEVMSQVRTVYAFVGEEKAVKSYSNSLKKALKLGKRSGLAKGLGVGLTYSLLFCAWALLLWYASLLVRHGKTNGAKAFTTILNVIFSGFALGQAAPSLSAIAKGRVAAANIFRMIGNNNSESSQRLDEGTTLQNVAGRIEFQKVSFAYPSRPNMVFENLSFTIRSGKTFAFVGPSGSGKSTIISMVQRFYEPNSGEILLDGNDIKSLKLKWFREQLGLVSQEPALFATTIASNILLGKENANMDQIIEAAKAANADSFIKSLPNGYNTQVGEGGTQLSGGQKQRIAIARAVLRNPKILLLDEATSALDAESEKIVQQALDNVMEKRTTIVVAHRLSTIRNVDKIVVLRDGQVRETGSHSELMLRGGDYATLVNCQETEPQENSRSIMSETCKSQAGSSSSRRVSSSRRTSSFRVDQEKTKNDDSKKDFSSSSMIWELIKLNSPEWPYALLGSIGAVLAGAQTPLFSMGIAYVLTAFYSPFPNVIKRDVEKVAIIFAGAGIVTAPIYLLQHYFYTLMGERLTSRVRLSLFSAILSNEIGWFDLDENNTGSLTSILAADATLVRSALADRLSTIVQNLSLTVTALALAFFYSWRVAAVVTACFPLLIAASLTEQLFLKGFGGDYTRAYSRATSVAREAIANIRTVAAYGAEKQISEQFTCELSKPTKNAFVRGHISGFGYGLSQFLAFCSYALGLWYVSVLINHKETNFGDSIKSFMVLIVTAFSVSETLALTPDIVKGTQALGSVFRVLHRETKISPDQPNSRMVSQVKGDIEFRNVSFVYPTRPEIDIFKNLNLRVSAGKSLAVVGPSGSGKSTVIGLIMRFYDPSNGNLCIDGQDIKTLNLRSLRKKLALVQQEPALFSTTIYENIKYGNENASEAEIMEAAKAANAHEFIIKMEEGYKTHAGDKGVQLSGGQKQRVAIARAVLKDPSVLLLDEATSALDTSSEKLVQEALDKLMKGRTTVLVAHRLSTIRKADTVAVLHKGRVVEKGSHRELVSIPNGFYKQLTSLQEVL

SEQ ID NO: 83586 - DNA, 531 bp, Arabidopsis thaliana
  misc_feature (1)..(531): Ceres Seq. ID no. 12670853
  misc_feature: MA Experiment ID: 20000234 Result: Down-regulated in Transcription
  misc_feature: MA Experiment 20000234 PARAMETER Experiment Name: At_Siliques_P Parameter: Age (day) Value: 21
  misc_feature: MA Experiment 20000234 PARAMETER Experiment Name: At_Siliques_P Parameter: Organism Value: A. thaliana
  misc_feature: MA Experiment 20000234 PARAMETER Experiment Name: At_Siliques_P Parameter: Plant Line Value: WS
  misc_feature: MA Experiment 20000234 PARAMETER Experiment Name: At_Siliques_P Parameter: Tissue Value: Less Than 5mm Siliques vs. Whole Plant
  misc_feature: MA Experiment ID: 20000264 Result: Down-regulated in Transcription
  misc_feature: MA Experiment 20000264 PARAMETER Experiment Name: At_Open_Flower_P Parameter: Age (day) Value: 21
  misc_feature: MA Experiment 20000264 PARAMETER Experiment Name: At_Open_Flower_P Parameter: Plant Line Value: WS
  misc_feature: MA Experiment 20000264 PARAMETER Experiment Name: At_Open_Flower_P Parameter: Tissue Value: Open Flower vs. Whole Plant
  misc_feature: MA Experiment ID: 20000286 Result: Down-regulated in Transcription
  misc_feature: MA Experiment 20000286 PARAMETER Experiment Name: At_Open_Flower_P Parameter: Age (day) Value: 21
  misc_feature: MA Experiment 20000286 PARAMETER Experiment Name: At_Open_Flower_P Parameter: Plant Line Value: WS
  misc_feature: MA Experiment 20000286 PARAMETER Experiment Name: At_Open_Flower_P Parameter: Tissue Value: Half Open vs. Whole Plant
atggcggatataacagaatatctagagagatcgatgcagaattgttcacttattgatcggagaagtagtatgggagatggatttggtatgagcgatgaacatatcccgatctcagatagattcttggagctcagttctcacttctctgttccttctcatttggaacagtgtcttgatcttaagacaggagagatttactacagaagctggaatagtggaatgagagtgaaagaagatccgagaaaatcgatgagtcgtggtaactatgcagaccaatccagtggtgaatcgtctggaacagttttttcatcagaagaagttagctcgtattatgaaagcgaagagtcttcatcagagtcgtctccttcatcaagaaagtatcacaaagaggaacaagacgaagatgttcttgtggtagctggttgcaaagcttgtttaatgtatttcatggtacctaaactctttaaggattgccccaaatgtgcaactcagcttctccactttgatcaacttcactctacttctccttga

SEQ ID NO: 83587 - protein, 176 aa, Arabidopsis thaliana
  peptide (1)..(176): Ceres Seq. ID no. 12670854
  misc_feature (1)..(176): Homolog of NCBI NO: 15217816 NR Description: hypothetical protein; protein id: At1g28070.1
  misc_feature (1)..(175): Homolog of NCBI NO: 25408280 NR Description: hypothetical protein At2g33510 [imported] - thaliana >gi|2459433|gb|AAB80668.1| hypothetical protein
  misc_feature (1)..(175): Homolog of NCBI NO: 30685734 NR Description: expressed protein [Arabidopsis thaliana]
  misc_feature (1)..(175): Homolog of NCBI NO: 28393658 NR Description: unknown protein [Arabidopsis thaliana]
  misc_feature (36)..(175): Homolog of NCBI NO: 33113263 NR Description: Humj1 [Humulus japonicus]
MADITEYLERSMQNCSLIDRRSSMGDGFGMSDEHIPISDRFLELSSHFSVPSHLEQCLDLKTGEIYYRSWNSGMRVKEDPRKSMSRGNYADQSSGESSGTVFSSEEVSSYYESEESSSESSPSSRKYHKEEQDEDVLVVAGCKACLMYFMVPKLFKDCPKCATQLLHFDQLHSTSP

SEQ ID NO: 83588 - protein, 165 aa, Arabidopsis thaliana
  peptide (1)..(165): Ceres Seq. ID no. 12670855
  misc_feature (1)..(165): Homolog of NCBI NO: 15217816 NR Description: hypothetical protein; protein id: At1g28070.1
  misc_feature (1)..(164): Homolog of NCBI NO: 25408280 NR Description: hypothetical protein At2g33510 [imported] - thaliana >gi|2459433|gb|AAB80668.1| hypothetical protein
  misc_feature (1)..(164): Homolog of NCBI NO: 30685734 NR Description: expressed protein [Arabidopsis thaliana]
  misc_feature (1)..(164): Homolog of NCBI NO: 28393658 NR Description: unknown protein [Arabidopsis thaliana]
  misc_feature (25)..(164): Homolog of NCBI NO: 33113263 NR Description: Humj1 [Humulus japonicus]
MQNCSLIDRRSSMGDGFGMSDEHIPISDRFLELSSHFSVPSHLEQCLDLKTGEIYYRSWNSGMRVKEDPRKSMSRGNYADQSSGESSGTVFSSEEVSSYYESEESSSESSPSSRKYHKEEQDEDVLVVAGCKACLMYFMVPKLFKDCPKCATQLLHFDQLHSTSP

SEQ ID NO: 83589 - protein, 153 aa, Arabidopsis thaliana
  peptide (1)..(153): Ceres Seq. ID no. 12670856
  misc_feature (1)..(153): Homolog of NCBI NO: 15217816 NR Description: hypothetical protein; protein id: At1g28070.1
  misc_feature (1)..(152): Homolog of NCBI NO: 25408280 NR Description: hypothetical protein At2g33510 [imported] - thaliana >gi|2459433|gb|AAB80668.1| hypothetical protein
  misc_feature (1)..(152): Homolog of NCBI NO: 30685734 NR Description: expressed protein [Arabidopsis thaliana]
  misc_feature (1)..(152): Homolog of NCBI NO: 28393658 NR Description: unknown protein [Arabidopsis thaliana]
  misc_feature (13)..(152): Homolog of NCBI NO: 33113263 NR Description: Humj1 [Humulus japonicus]
MGDGFGMSDEHIPISDRFLELSSHFSVPSHLEQCLDLKTGEIYYRSWNSGMRVKEDPRKSMSRGNYADQSSGESSGTVFSSEEVSSYYESEESSSESSPSSRKYHKEEQDEDVLVVAGCKACLMYFMVPKLFKDCPKCATQLLHFDQLHSTSP

SEQ ID NO: 83590 - DNA, 1547 bp, Arabidopsis thaliana
  misc_feature (1)..(1547): Ceres Seq. ID no. 12670864
  misc_feature: MA Experiment ID: 20000180 Result: Down-regulated in Transcription
  misc_feature: MA Experiment 20000180 PARAMETER Experiment Name: At_Germinating_Seeds_P Parameter: Age (hr) Value: 24 vs. 0
  misc_feature: MA Experiment 20000180 PARAMETER Experiment Name: At_Germinating_Seeds_P Parameter: Tissue Value: Germinating Seeds
  misc_feature: MA Experiment ID: 20000264 Result: Up-regulated in Transcription
  misc_feature: MA Experiment 20000264 PARAMETER Experiment Name: At_Open_Flower_P Parameter: Age (day) Value: 21
  misc_feature: MA Experiment 20000264 PARAMETER Experiment Name: At_Open_Flower_P Parameter: Plant Line Value: WS
  misc_feature: MA Experiment 20000264 PARAMETER Experiment Name: At_Open_Flower_P Parameter: Tissue Value: Open Flower vs. Whole Plant
  misc_feature: MA Experiment ID: 20000265 Result: Up-regulated in Transcription
  misc_feature: MA Experiment 20000265 PARAMETER Experiment Name: At_Open_Flower_P Parameter: Age (day) Value: 21
  misc_feature: MA Experiment 20000265 PARAMETER Experiment Name: At_Open_Flower_P Parameter: Plant Line Value: WS
  misc_feature: MA Experiment 20000265 PARAMETER Experiment Name: At_Open_Flower_P Parameter: Tissue Value: Closed Flower vs. Whole Plant
  misc_feature: MA Experiment ID: 20000286 Result: Up-regulated in Transcription
  misc_feature: MA Experiment 20000286 PARAMETER Experiment Name: At_Open_Flower_P Parameter: Age (day) Value: 21
  misc_feature: MA Experiment 20000286 PARAMETER Experiment Name: At_Open_Flower_P Parameter: Plant Line Value: WS
  misc_feature: MA Experiment 20000286 PARAMETER Experiment Name: At_Open_Flower_P Parameter: Tissue Value: Half Open vs. Whole Plant
  misc_feature: MA Experiment ID: 20000794 Result: Up-regulated in Transcription
  misc_feature: MA Experiment 20000794 PARAMETER Experiment Name: At_Petals_P Parameter: Age (day) Value: 23-25 days
  misc_feature: MA Experiment 20000794 PARAMETER Experiment Name: At_Petals_P Parameter: Plant Line Value: WS
  misc_feature: MA Experiment 20000794 PARAMETER Experiment Name: At_Petals_P Parameter: Tissue Value: Petals vs. Whole plant
caaaaacctctccgttttttcctctctgtttagctttgaattcacaagagtcatgcgaagattcaactgggttctgcggcatgtacaagctcgaagaacttttgattccgcgatcggattgcgtcaagggtctcagaagccgttgttcgagcgatacattcacgctacaggtataaacaactccagtgctcgtaattactatgatgttctcggtgtttctcctaaagctacacgggaggagattaaaaaatcatttcatgagcttgcgaaaaaattccaccctgatacaaatagaaataatccgtcagcaaaaaggaagttccaggaaataagagaggcatatgagaccctgggaaattcggaaagaagagaagaatatgataagctgcagtatcggaattcggattatgtaaataatgacggtggtgattcagagaggttcagacgtgcataccagtccaatttctcggatactttccacaagattttttctgagatatttgagaacaatcagataaaacctgatattcgggtggaactgtcgctttctctttccgaagctgcagaagggtgcacaaaacgtttgtcttttgatgcatatgtcttttgtgattcctgtgatgggcttggccaccctagcgatgctgccatgagcatttgtccaacatgcaggggggttggacgagtaactattcctccttttacagcatcatgccagacgtgcaaggggacgggacacattattaaggaatactgcatgtcttgtagaggatcaggtattgtggaaggcacaaagacagctgaacttgtgatccctggaggggtggagtctgaagctacaatcacaatcgtaggtgctggtaatgtaagttcaagaacaagtcaacctgggaacttgtatatcaaactaaaggttgctaatgattcaactttcactagggatggctcagatatatatgtggatgctaatattagctttacacaagctattttggggggcaaagttgtggtgccaacactttcaggcaagatacagctagatataccaaaggggactcagcctgatcaacttcttgttttaagaggcaaaggactaccgaagcaaggcttttttgtagatcatggagatcagtatgttcgcttccgcgttaactttcctactgaagtgaatgaacgtcagcgtgctatactggaagagtttgcaaaggaagaaatcaacaatgagttgagcgactctgctgaaggaagttggtggaatctaacgggtcctcagatcatccgcgacttctcgttaatggtgctgctggcgctattgttgagcaggttaatgggatgaagccaccacgagagatgaaagataaaagcattcaacagaagacaaatgaagactaatttcatctattgctggtagaacaaaaagctcaccagcataacagagagtgtcattgtttgacctcataattctattacaaactcatttgatgtgaataataagagacatcaaacaagttaagctgaaataaagaaaagaaaaaaaaaagtccttt

SEQ ID NO: 83591 - protein, 444 aa, Arabidopsis thaliana
  peptide (1)..(444): Ceres Seq. ID no. 12670865
  misc_feature (279)..(401): Pfam Name: DnaJ C terminal region Pfam Description: DnaJ C terminal region
  misc_feature (18)..(444): Homolog of NCBI NO: 15217871 NR Description: mitochondrial protein (AtJ1), putative; protein
  misc_feature (18)..(417): Homolog of NCBI NO: 30690263 NR Description: DnaJ protein AtJ1, putative [Arabidopsis thaliana]
  misc_feature (18)..(417): Homolog of NCBI NO: 26451496 NR Description: putative AtJ1 [Arabidopsis thaliana]
  misc_feature (18)..(371): Homolog of NCBI NO: 2129539 NR Description: heat shock protein dnaJ homolog - Arabidopsis
  misc_feature (51)..(416): Homolog of NCBI NO: 21429604 NR Description: GFA2 [Arabidopsis thaliana]
  misc_feature (51)..(416): Homolog of NCBI NO: 18422864 NR Description: DnaJ protein-like; protein id: At5g48030.1, by cDNA: 14006. [Arabidopsis thaliana]
  misc_feature (51)..(416): Homolog of NCBI NO: 21553367 NR Description: DnaJ protein-like [Arabidopsis thaliana]
  misc_feature (51)..(416): Homolog of NCBI NO: 10177754 NR Description: DnaJ protein-like [Arabidopsis thaliana]
  misc_feature (65)..(401): Homolog of NCBI NO: 33519590 NR Description: DnaJ protein [Candidatus Blochmannia floridanus]
  misc_feature (64)..(402): Homolog of NCBI NO: 39995145 NR Description: chaperone protein dnaJ [Geobacter sulfurreducens >gi|39981907|gb|AAR33369.1| chaperone protein dnaJ [Geobacter
KNLSVFSSLFSFEFTRVMRRFNWVLRHVQARRTFDSAIGLRQGSQKPLFERYIHATGINNSSARNYYDVLGVSPKATREEIKKSFHELAKKFHPDTNRNNPSAKRKFQEIREAYETLGNSERREEYDKLQYRNSDYVNNDGGDSERFRRAYQSNFSDTFHKIFSEIFENNQIKPDIRVELSLSLSEAAEGCTKRLSFDAYVFCDSCDGLGHPSDAAMSICPTCRGVGRVTIPPFTASCQTCKGTGHIIKEYCMSCRGSGIVEGTKTAELVIPGGVESEATITIVGAGNVSSRTSQPGNLYIKLKVANDSTFTRDGSDIYVDANISFTQAILGGKVVVPTLSGKIQLDIPKGTQPDQLLVLRGKGLPKQGFFVDHGDQYVRFRVNFPTEVNERQRAILEEFAKEEINNELSDSAEGSWWNLTGPQIIRDFSLMVLLALLLSRLMG

SEQ ID NO: 83592 - protein, 427 aa, Arabidopsis thaliana
  peptide (1)..(427): Ceres Seq. ID no. 12670866
  misc_feature (262)..(384): Pfam Name: DnaJ C terminal region Pfam Description: DnaJ C terminal region
  misc_feature (1)..(427): Homolog of NCBI NO: 15217871 NR Description: mitochondrial protein (AtJ1), putative; protein
  misc_feature (1)..(400): Homolog of NCBI NO: 30690263 NR Description: DnaJ protein AtJ1, putative [Arabidopsis thaliana]
  misc_feature (1)..(400): Homolog of NCBI NO: 26451496 NR Description: putative AtJ1 [Arabidopsis thaliana]
  misc_feature (1)..(354): Homolog of NCBI NO: 2129539 NR Description: heat shock protein dnaJ homolog - Arabidopsis
  misc_feature (34)..(399): Homolog of NCBI NO: 21429604 NR Description: GFA2 [Arabidopsis thaliana]
  misc_feature (34)..(399): Homolog of NCBI NO: 18422864 NR Description: DnaJ protein-like; protein id: At5g48030.1, by cDNA: 14006. [Arabidopsis thaliana]
  misc_feature (34)..(399): Homolog of NCBI NO: 21553367 NR Description: DnaJ protein-like [Arabidopsis thaliana]
  misc_feature (34)..(399): Homolog of NCBI NO: 10177754 NR Description: DnaJ protein-like [Arabidopsis thaliana]
  misc_feature (48)..(384): Homolog of NCBI NO: 33519590 NR Description: DnaJ protein [Candidatus Blochmannia floridanus]
  misc_feature (47)..(385): Homolog of NCBI NO: 39995145 NR Description: chaperone protein dnaJ [Geobacter sulfurreducens >gi|39981907|gb|AAR33369.1| chaperone protein dnaJ [Geobacter
MRRFNWVLRHVQARRTFDSAIGLRQGSQKPLFERYIHATGINNSSARNYYDVLGVSPKATREEIKKSFHELAKKFHPDTNRNNPSAKRKFQEIREAYETLGNSERREEYDKLQYRNSDYVNNDGGDSERFRRAYQSNFSDTFHKIFSEIFENNQIKPDIRVELSLSLSEAAEGCTKRLSFDAYVFCDSCDGLGHPSDAAMSICPTCRGVGRVTIPPFTASCQTCKGTGHIIKEYCMSCRGSGIVEGTKTAELVIPGGVESEATITIVGAGNVSSRTSQPGNLYIKLKVANDSTFTRDGSDIYVDANISFTQAILGGKVVVPTLSGKIQLDIPKGTQPDQLLVLRGKGLPKQGFFVDHGDQYVRFRVNFPTEVNERQRAILEEFAKEEINNELSDSAEGSWWNLTGPQIIRDFSLMVLLALLLSRLMG

SEQ ID NO: 83593 - protein, 228 aa, Arabidopsis thaliana
  peptide (1)..(228): Ceres Seq. ID no. 12670867
  misc_feature (63)..(185): Pfam Name: DnaJ C terminal region Pfam Description: DnaJ C terminal region
  misc_feature (1)..(228): Homolog of NCBI NO: 15217871 NR Description: mitochondrial protein (AtJ1), putative; protein
  misc_feature (1)..(201): Homolog of NCBI NO: 30690263 NR Description: DnaJ protein AtJ1, putative [Arabidopsis thaliana]
  misc_feature (1)..(201): Homolog of NCBI NO: 26451496 NR Description: putative AtJ1 [Arabidopsis thaliana]
  misc_feature (1)..(155): Homolog of NCBI NO: 2129539 NR Description: heat shock protein dnaJ homolog - Arabidopsis
  misc_feature (1)..(200): Homolog of NCBI NO: 21429604 NR Description: GFA2 [Arabidopsis thaliana]
  misc_feature (1)..(200): Homolog of NCBI NO: 18422864 NR Description: DnaJ protein-like; protein id: At5g48030.1, by cDNA: 14006. [Arabidopsis thaliana]
  misc_feature (1)..(200): Homolog of NCBI NO: 21553367 NR Description: DnaJ protein-like [Arabidopsis thaliana]
  misc_feature (1)..(200): Homolog of NCBI NO: 10177754 NR Description: DnaJ protein-like [Arabidopsis thaliana]
  misc_feature (1)..(185): Homolog of NCBI NO: 33519590 NR Description: DnaJ protein [Candidatus Blochmannia floridanus]
  misc_feature (1)..(186): Homolog of NCBI NO: 39995145 NR Description: chaperone protein dnaJ [Geobacter sulfurreducens >gi|39981907|gb|AAR33369.1| chaperone protein dnaJ [Geobacter
MSICPTCRGVGRVTIPPFTASCQTCKGTGHIIKEYCMSCRGSGIVEGTKTAELVIPGGVESEATITIVGAGNVSSRTSQPGNLYIKLKVANDSTFTRDGSDIYVDANISFTQAILGGKVVVPTLSGKIQLDIPKGTQPDQLLVLRGKGLPKQGFFVDHGDQYVRFRVNFPTEVNERQRAILEEFAKEEINNELSDSAEGSWWNLTGPQIIRDFSLMVLLALLLSRLMG

SEQ ID NO: 83594 - DNA, 519 bp, Arabidopsis thaliana
  misc_feature (1)..(519): Ceres Seq. ID no. 12670896
  misc_feature: MA Experiment ID: 20000227 Result: Down-regulated in Transcription
  misc_feature: MA Experiment 20000227 PARAMETER Experiment Name: At_Root-Tips-vs-Tops_P Parameter: Tissue Value: Root Tips vs. Root Tops
  misc_feature: MA Experiment ID: 20000267 Result: Down-regulated in Transcription
  misc_feature: MA Experiment 20000267 PARAMETER Experiment Name: At_Drought_P Parameter: Age (day) Value: 7
  misc_feature: MA Experiment 20000267 PARAMETER Experiment Name: At_Drought_P Parameter: Organism Value: A. thaliana
  misc_feature: MA Experiment 20000267 PARAMETER Experiment Name: At_Drought_P Parameter: Plant Line Value: WS
  misc_feature: MA Experiment 20000267 PARAMETER Experiment Name: At_Drought_P Parameter: Timepoint (hr) Value: 6
  misc_feature: MA Experiment 20000267 PARAMETER Experiment Name: At_Drought_P Parameter: Tissue Value: Whole Plant
  misc_feature: MA Experiment 20000267 PARAMETER Experiment Name: At_Drought_P Parameter: Treatment Value: Drought vs. No Drought
  misc_feature: MA Experiment ID: 20000436 Result: Down-regulated in Transcription
  misc_feature: MA Experiment 20000436 PARAMETER Experiment Name: At_Drought_P Parameter: Age (day) Value: 7
  misc_feature: MA Experiment 20000436 PARAMETER Experiment Name: At_Drought_P Parameter: Organism Value: A. thaliana
  misc_feature: MA Experiment 20000436 PARAMETER Experiment Name: At_Drought_P Parameter: Plant Line Value: WS
  misc_feature: MA Experiment 20000436 PARAMETER Experiment Name: At_Drought_P Parameter: Timepoint (hr) Value: 12
  misc_feature: MA Experiment 20000436 PARAMETER Experiment Name: At_Drought_P Parameter: Tissue Value: Whole Plant
  misc_feature: MA Experiment 20000436 PARAMETER Experiment Name: At_Drought_P Parameter: Treatment Value: Drought vs. No Drought
  misc_feature: MA Experiment ID: 20000437 Result: Down-regulated in Transcription
  misc_feature: MA Experiment 20000437 PARAMETER Experiment Name: At_Drought_P Parameter: Age (day) Value: 8
  misc_feature: MA Experiment 20000437 PARAMETER Experiment Name: At_Drought_P Parameter: Organism Value: A. thaliana
  misc_feature: MA Experiment 20000437 PARAMETER Experiment Name: At_Drought_P Parameter: Plant Line Value: WS
  misc_feature: MA Experiment 20000437 PARAMETER Experiment Name: At_Drought_P Parameter: Timepoint (hr) Value: 24
  misc_feature: MA Experiment 20000437 PARAMETER Experiment Name: At_Drought_P Parameter: Tissue Value: Whole Plant
  misc_feature: MA Experiment 20000437 PARAMETER Experiment Name: At_Drought_P Parameter: Treatment Value: Drought vs. No Drought
  misc_feature: MA Experiment ID: 20000439 Result: Up-regulated in Transcription
  misc_feature: MA Experiment 20000439 PARAMETER Experiment Name: At_Roots__P Parameter: Age (day) Value: 14 vs. 21
  misc_feature: MA Experiment 20000439 PARAMETER Experiment Name: At_Roots__P Parameter: Organism Value: A. thaliana
  misc_feature: MA Experiment 20000439 PARAMETER Experiment Name: At_Roots__P Parameter: Tissue Value: Roots vs. Whole Plant
  misc_feature: MA Experiment ID: 20000453 Result: Down-regulated in Transcription
  misc_feature: MA Experiment 20000453 PARAMETER Experiment Name: At_100uM_ABA_P Parameter: Age (day) Value: 15
  misc_feature: MA Experiment 20000453 PARAMETER Experiment Name: At_100uM_ABA_P Parameter: Organism Value: A. thaliana
  misc_feature: MA Experiment 20000453 PARAMETER Experiment Name: At_100uM_ABA_P Parameter: Plant Line Value: WS
  misc_feature: MA Experiment 20000453 PARAMETER Experiment Name: At_100uM_ABA_P Parameter: Timepoint (hr) Value: 24
  misc_feature: MA Experiment 20000453 PARAMETER Experiment Name: At_100uM_ABA_P Parameter: Tissue Value: Aerial
  misc_feature: MA Experiment 20000453 PARAMETER Experiment Name: At_100uM_ABA_P Parameter: Treatment Value: 100uM ABA vs. No Treatment
  misc_feature: MA Experiment ID: 20000495 Result: Up-regulated in Transcription
  misc_feature: MA Experiment 20000495 PARAMETER Experiment Name: At_Guard_Cells_P Parameter: Harvest Date Value: 8/2/2002
  misc_feature: MA Experiment 20000495 PARAMETER Experiment Name: At_Guard_Cells_P Parameter: Organism Value: A. thaliana
  misc_feature: MA Experiment 20000495 PARAMETER Experiment Name: At_Guard_Cells_P Parameter: Tissue Value: Guard Cells vs. Leaves
  misc_feature: MA Experiment ID: 20000794 Result: Down-regulated in Transcription
  misc_feature: MA Experiment 20000794 PARAMETER Experiment Name: At_Petals_P Parameter: Age (day) Value: 23-25 days
  misc_feature: MA Experiment 20000794 PARAMETER Experiment Name: At_Petals_P Parameter: Plant Line Value: WS
  misc_feature: MA Experiment 20000794 PARAMETER Experiment Name: At_Petals_P Parameter: Tissue Value: Petals vs. Whole plant
  misc_feature: MA Experiment ID: 20001248 Result: Down-regulated in Transcription
  misc_feature: MA Experiment 20001248 PARAMETER Experiment Name: At_Far-red-induction_P Parameter: Age (day) Value: 7
  misc_feature: MA Experiment 20001248 PARAMETER Experiment Name: At_Far-red-induction_P Parameter: Light Value: Far-red vs. White
  misc_feature: MA Experiment 20001248 PARAMETER Experiment Name: At_Far-red-induction_P Parameter: Organism Value: A. thaliana
  misc_feature: MA Experiment 20001248 PARAMETER Experiment Name: At_Far-red-induction_P Parameter: Plant Line Value: Columbia
  misc_feature: MA Experiment 20001248 PARAMETER Experiment Name: At_Far-red-induction_P Parameter: Timepoint (hr) Value: 4
  misc_feature: MA Experiment 20001248 PARAMETER Experiment Name: At_Far-red-induction_P Parameter: Tissue Value: Whole Plant
  misc_feature: MA Experiment ID: 20001451 Result: Down-regulated in Transcription
  misc_feature: MA Experiment 20001451 PARAMETER Experiment Name: At_Far-red-induction_P Parameter: Age (day) Value: 7
  misc_feature: MA Experiment 20001451 PARAMETER Experiment Name: At_Far-red-induction_P Parameter: Light Value: Far-red vs. White
  misc_feature: MA Experiment 20001451 PARAMETER Experiment Name: At_Far-red-induction_P Parameter: Organism Value: A. thaliana
  misc_feature: MA Experiment 20001451 PARAMETER Experiment Name: At_Far-red-induction_P Parameter: Plant Line Value: Columbia
  misc_feature: MA Experiment 20001451 PARAMETER Experiment Name: At_Far-red-induction_P Parameter: Timepoint (hr) Value: 24
  misc_feature: MA Experiment 20001451 PARAMETER Experiment Name: At_Far-red-induction_P Parameter: Tissue Value: Whole Plant
  misc_feature: MA Experiment ID: 20001556 Result: Down-regulated in Transcription
  misc_feature: MA Experiment 20001556 PARAMETER Experiment Name: At_Drought_Soil_Dry_P Parameter: Age (day) Value: 26
  misc_feature: MA Experiment 20001556 PARAMETER Experiment Name: At_Drought_Soil_Dry_P Parameter: Organism Value: A. thaliana
  misc_feature: MA Experiment 20001556 PARAMETER Experiment Name: At_Drought_Soil_Dry_P Parameter: Plant Line Value: WS
  misc_feature: MA Experiment 20001556 PARAMETER Experiment Name: At_Drought_Soil_Dry_P Parameter: Post Timepoint (hr) Value: None
  misc_feature: MA Experiment 20001556 PARAMETER Experiment Name: At_Drought_Soil_Dry_P Parameter: Post-Treatment Value: None
  misc_feature: MA Experiment 20001556 PARAMETER Experiment Name: At_Drought_Soil_Dry_P Parameter: Timepoint (day) Value: 12
  misc_feature: MA Experiment 20001556 PARAMETER Experiment Name: At_Drought_Soil_Dry_P Parameter: Treatment Value: Drought vs. No Drought
  misc_feature: MA Experiment ID: 20001755 Result: Up-regulated in Transcription
  misc_feature: MA Experiment 20001755 PARAMETER Experiment Name: At_50mM_NH4NO3_L-to-H_P Parameter: Timepoint (hr) Value: 2
  misc_feature: MA Experiment 20001755 PARAMETER Experiment Name: At_50mM_NH4NO3_L-to-H_P Parameter: Tissue Value: Leaf
  misc_feature: MA Experiment 20001755 PARAMETER Experiment Name: At_50mM_NH4NO3_L-to-H_P Parameter: Treatment Value: 50mM NH4NO3 vs 100mM Mannitol
  misc_feature: MA Experiment ID: 20001757 Result: Up-regulated in Transcription
  misc_feature: MA Experiment 20001757 PARAMETER Experiment Name: At_50mM_NH4NO3_L-to-H_P Parameter: Timepoint (hr) Value: 6
  misc_feature: MA Experiment 20001757 PARAMETER Experiment Name: At_50mM_NH4NO3_L-to-H_P Parameter: Tissue Value: Leaf
  misc_feature: MA Experiment 20001757 PARAMETER Experiment Name: At_50mM_NH4NO3_L-to-H_P Parameter: Treatment Value: 50mM NH4NO3 vs 100mM Mannitol
  misc_feature: MA Experiment ID: 20001911 Result: Down-regulated in Transcription
  misc_feature: MA Experiment 20001911 PARAMETER Experiment Name: At_Drought_Reproduction_P Parameter: Age (day) Value: 40
  misc_feature: MA Experiment 20001911 PARAMETER Experiment Name: At_Drought_Reproduction_P Parameter: Organism Value: A. thaliana
  misc_feature: MA Experiment 20001911 PARAMETER Experiment Name: At_Drought_Reproduction_P Parameter: Plant Line Value: WS
  misc_feature: MA Experiment 20001911 PARAMETER Experiment Name: At_Drought_Reproduction_P Parameter: Timepoint (day) Value: 10
  misc_feature: MA Experiment 20001911 PARAMETER Experiment Name: At_Drought_Reproduction_P Parameter: Tissue Value: Flowers
  misc_feature: MA Experiment 20001911 PARAMETER Experiment Name: At_Drought_Reproduction_P Parameter: Treatment Value: Drought vs. No Drought
atgaaagaaagtagccggaagcaaggagctgcgtcaccgtgtgctgcgtgtaagcttttgcggcggcggtgcgctcaagattgcgttttctcgccgtattttccggccgatgagcctcagaaatttgctaatgttcatagagtgttcggtgctagcaacgtcaacaagatgcttcaggaattaccaatccaccagcgaggggacgctgtgagcagcatggtttacgaggctaatgcaagagtgcgggatccggtttacggttgcgttggggcaatttcgtccctccagcaacagatagatgtgttgcaagctcagctagctctagctcaagctgaggtggtgcatctacgtgtacgccagtcgactaatttcccagggcacggactatgcccggatagtccgagtagcagcgggtcaccgtcttcgaagcaagtgagtccacaggacaacaagggcatgtttagccatatggacattgtggatgaagccagtttgggagagtctatgtggtcttgctag

SEQ ID NO: 83595 - protein, 172 aa, Arabidopsis thaliana
  peptide (1)..(172): Ceres Seq. ID no. 12670897
  misc_feature (13)..(113): Pfam Name: Protein of unknown function DUF260 Pfam Description: Protein of unknown function DUF260
  misc_feature (1)..(172): Homolog of NCBI NO: 15221679 NR Description: hypothetical protein; protein id: At1g31320.1
  misc_feature (11)..(127): Homolog of NCBI NO: 18402268 NR Description: expressed protein; protein id: At2g30130.1, by cDNA: 29970. [Arabidopsis thaliana]
  misc_feature (11)..(127): Homolog of NCBI NO: 21592574 NR Description: unknown [Arabidopsis thaliana]
  misc_feature (1)..(172): Homolog of NCBI NO: 15219279 NR Description: hypothetical protein; protein id: At1g16530.1 thaliana] >gi|29428034|sp|Q9SA51|LBD3_ARATH LOB domain protein 3
  misc_feature (12)..(121): Homolog of NCBI NO: 18405401 NR Description: expressed protein; protein id: At2g40470.1, by cDNA: 97343., supported by cDNA: gi_17227159 [Arabidopsis >gi|29427824|sp|Q8L5T5|LB15_ARATH LOB domain protein 15 DOMAIN 15
  misc_feature (12)..(121): Homolog of NCBI NO: 21618113 NR Description: LOB DOMAIN 13 [Arabidopsis thaliana]
  misc_feature (9)..(114): Homolog of NCBI NO: 34896184 NR Description: contains ESTs C98868(E3203),C98869(E3203)~similar Arabidopsis thaliana chromosome 5, MDC12.5~unknown protein [Oryza
  misc_feature (12)..(121): Homolog of NCBI NO: 15223050 NR Description: unknown protein; protein id: At1g07900.1
  misc_feature (12)..(127): Homolog of NCBI NO: 15242624 NR Description: putative protein; protein id: At5g63090.1, by cDNA: gi_17484099 [Arabidopsis thaliana] LATERAL ORGAN BOUNDARIES protein >gi|10177290|dbj|BAB10551.1|
  misc_feature (12)..(122): Homolog of NCBI NO: 15226404 NR Description: hypothetical protein; protein id: At2g28500.1 thaliana] >gi|29428040|sp|Q9SK08|LB11_ARATH LOB domain protein 11 hypothetical protein At2g28500 [imported] protein [Arabidopsis
MKESSRKQGAASPCAACKLLRRRCAQDCVFSPYFPADEPQKFANVHRVFGASNVNKMLQELPIHQRGDAVSSMVYEANARVRDPVYGCVGAISSLQQQIDVLQAQLALAQAEVVHLRVRQSTNFPGHGLCPDSPSSSGSPSSKQVSPQDNKGMFSHMDIVDEASLGESMWSC

SEQ ID NO: 83596 - protein, 116 aa, Arabidopsis thaliana
  peptide (1)..(116): Ceres Seq. ID no. 12670898
  misc_feature (1)..(57): Pfam Name: Protein of unknown function DUF260 Pfam Description: Protein of unknown function DUF260
  misc_feature (1)..(116): Homolog of NCBI NO: 15221679 NR Description: hypothetical protein; protein id: At1g31320.1
  misc_feature (1)..(71): Homolog of NCBI NO: 18402268 NR Description: expressed protein; protein id: At2g30130.1, by cDNA: 29970. [Arabidopsis thaliana]
  misc_feature (1)..(71): Homolog of NCBI NO: 21592574 NR Description: unknown [Arabidopsis thaliana]
  misc_feature (1)..(116): Homolog of NCBI NO: 15219279 NR Description: hypothetical protein; protein id: At1g16530.1 thaliana] >gi|29428034|sp|Q9SA51|LBD3_ARATH LOB domain protein 3
  misc_feature (1)..(65): Homolog of NCBI NO: 18405401 NR Description: expressed protein; protein id: At2g40470.1, by cDNA: 97343., supported by cDNA: gi_17227159 [Arabidopsis >gi|29427824|sp|Q8L5T5|LB15_ARATH LOB domain protein 15 DOMAIN 15
  misc_feature (1)..(65): Homolog of NCBI NO: 21618113 NR Description: LOB DOMAIN 13 [Arabidopsis thaliana]
  misc_feature (1)..(58): Homolog of NCBI NO: 34896184 NR Description: contains ESTs C98868(E3203),C98869(E3203)~similar Arabidopsis thaliana chromosome 5, MDC12.5~unknown protein [Oryza
  misc_feature (1)..(65): Homolog of NCBI NO: 15223050 NR Description: unknown protein; protein id: At1g07900.1
  misc_feature (1)..(71): Homolog of NCBI NO: 15242624 NR Description: putative protein; protein id: At5g63090.1, by cDNA: gi_17484099 [Arabidopsis thaliana] LATERAL ORGAN BOUNDARIES protein >gi|10177290|dbj|BAB10551.1|
  misc_feature (1)..(66): Homolog of NCBI NO: 15226404 NR Description: hypothetical protein; protein id: At2g28500.1 thaliana] >gi|29428040|sp|Q9SK08|LB11_ARATH LOB domain protein 11 hypothetical protein At2g28500 [imported] protein [Arabidopsis
MLQELPIHQRGDAVSSMVYEANARVRDPVYGCVGAISSLQQQIDVLQAQLALAQAEVVHLRVRQSTNFPGHGLCPDSPSSSGSPSSKQVSPQDNKGMFSHMDIVDEASLGESMWSC

SEQ ID NO: 83597 - protein, 100 aa, Arabidopsis thaliana
  peptide (1)..(100): Ceres Seq. ID no. 12670899
  misc_feature (1)..(100): Homolog of NCBI NO: 15221679 NR Description: hypothetical protein; protein id: At1g31320.1
  misc_feature (1)..(55): Homolog of NCBI NO: 18402268 NR Description: expressed protein; protein id: At2g30130.1, by cDNA: 29970. [Arabidopsis thaliana]
  misc_feature (1)..(55): Homolog of NCBI NO: 21592574 NR Description: unknown [Arabidopsis thaliana]
  misc_feature (1)..(100): Homolog of NCBI NO: 15219279 NR Description: hypothetical protein; protein id: At1g16530.1 thaliana] >gi|29428034|sp|Q9SA51|LBD3_ARATH LOB domain protein 3
  misc_feature (1)..(49): Homolog of NCBI NO: 18405401 NR Description: expressed protein; protein id: At2g40470.1, by cDNA: 97343., supported by cDNA: gi_17227159 [Arabidopsis >gi|29427824|sp|Q8L5T5|LB15_ARATH LOB domain protein 15 DOMAIN 15
  misc_feature (1)..(49): Homolog of NCBI NO: 21618113 NR Description: LOB DOMAIN 13 [Arabidopsis thaliana]
  misc_feature (1)..(42): Homolog of NCBI NO: 34896184 NR Description: contains ESTs C98868(E3203),C98869(E3203)~similar Arabidopsis thaliana chromosome 5, MDC12.5~unknown protein [Oryza
  misc_feature (1)..(49): Homolog of NCBI NO: 15223050 NR Description: unknown protein; protein id: At1g07900.1
  misc_feature (1)..(55): Homolog of NCBI NO: 15242624 NR Description: putative protein; protein id: At5g63090.1, by cDNA: gi_17484099 [Arabidopsis thaliana] LATERAL ORGAN BOUNDARIES protein >gi|10177290|dbj|BAB10551.1|
  misc_feature (1)..(50): Homolog of NCBI NO: 15226404 NR Description: hypothetical protein; protein id: At2g28500.1 thaliana] >gi|29428040|sp|Q9SK08|LB11_ARATH LOB domain protein 11 hypothetical protein At2g28500 [imported] protein [Arabidopsis
MVYEANARVRDPVYGCVGAISSLQQQIDVLQAQLALAQAEVVHLRVRQSTNFPGHGLCPDSPSSSGSPSSKQVSPQDNKGMFSHMDIVDEASLGESMWSC

SEQ ID NO: 83598 - DNA, 1564 bp, Arabidopsis thaliana
  misc_feature (1)..(1564): Ceres Seq. ID no. 12670956
  misc_feature: MA Experiment ID: 20000171 Result: Up-regulated in Transcription
  misc_feature: MA Experiment 20000171 PARAMETER Experiment Name: At_42deg_Heat_P Parameter: Age (day) Value: 14
  misc_feature: MA Experiment 20000171 PARAMETER Experiment Name: At_42deg_Heat_P Parameter: Organism Value: A. thaliana
  misc_feature: MA Experiment 20000171 PARAMETER Experiment Name: At_42deg_Heat_P Parameter: Plant Line Value: WS
  misc_feature: MA Experiment 20000171 PARAMETER Experiment Name: At_42deg_Heat_P Parameter: Temperature (deg C) Value: 42 vs. 22
  misc_feature: MA Experiment 20000171 PARAMETER Experiment Name: At_42deg_Heat_P Parameter: Timepoint (hr) Value: 1
  misc_feature: MA Experiment 20000171 PARAMETER Experiment Name: At_42deg_Heat_P Parameter: Tissue Value: Aerial
  misc_feature: MA Experiment ID: 20001911 Result: Up-regulated in Transcription
  misc_feature: MA Experiment 20001911 PARAMETER Experiment Name: At_Drought_Reproduction_P Parameter: Age (day) Value: 40
  misc_feature: MA Experiment 20001911 PARAMETER Experiment Name: At_Drought_Reproduction_P Parameter: Organism Value: A. thaliana
  misc_feature: MA Experiment 20001911 PARAMETER Experiment Name: At_Drought_Reproduction_P Parameter: Plant Line Value: WS
  misc_feature: MA Experiment 20001911 PARAMETER Experiment Name: At_Drought_Reproduction_P Parameter: Timepoint (day) Value: 10
  misc_feature: MA Experiment 20001911 PARAMETER Experiment Name: At_Drought_Reproduction_P Parameter: Tissue Value: Flowers
  misc_feature: MA Experiment 20001911 PARAMETER Experiment Name: At_Drought_Reproduction_P Parameter: Treatment Value: Drought vs. No Drought
gagaaaaaacagcaaagaaaatcagagagatcaaaaaaaagaaaaaaaagaacagagattcttttgaactaacgaagacatatcgtttctctaaagtagaatctttggtattcggaaaaatgtcgtttctgagtattgttcgtgatgttagagatactgtaggaagcttttcgagacgtagtttcgacgtgagagtatctaatgggacgactcatcagaggagtaaatctcacggtgttgaggcacatattgaagatcttattgtaatcaagaacactcgttgggctaatttaccggctgcgctattacgagatgtgatgaaaaagttggatgaaagcgagagtacttggcctgcacgtaaacaagtcgttgcttgtgctggtgtctgcaagacatggagactaatgtgcaaagatattgtgaaaagtcctgagttctcaggcaaactcacatttccagtttcgttgaaacagcccgggcctagggatggaatcatacaatgttatatcaaaagagacaagtctaacatgacttaccacctttacctttctcttagtcctgccatacttgttgaaagtgggaagtttcttctctcggcaaagcgctcacggagagctacatacacagagtatgtaatatcaatggatgcagacaacatttcaagatcaagcagcacttacattggcaaactgaagtctaactttctagggacaaaatttatagtatatgatacggctcctgcgtacaacagtagccagatattgtccccaccaaaccggagtcgtagtttcaactccaagaaagtgtctcccaaagtcccttctggaagttacaacattgctcaagttacatacgagctgaacttgcttggaacccgtggacctcgtagaatgaactgcattatgcactctatcccctccttagctctagaacccggaggtactgtccctagccaacctgagtttctacaacgttcccttgatgaatctttccgcagcatcggttcctcaaagatagtcaaccactcgggagatttcacccgaccgaaagaggaagaaggaaaggtgcgacctttggtactgaaaactaaaccgccaaggtggctccaaccgttgcgatgttggtgccttaacttcaaagggagagtgactgtagcttctgtcaagaacttccagttgatgtccgctgcaacggttcagcccggtagtggtagtgatggtggagcattggctacgaggccatcgttatcaccacagcagccagagcaatcaaaccatgataagataatactacactttgggaaagtgggtaaggatatgttcactatggactatcgttatcctctctctgcctttcaagcgtttgccatttccctgagcacctttgatactaaattggcatgtgaataaaagtagaaagatcataagagggacttaaaactaataggaaccgtttacgatatgcgagggtttgtttgtttttgtttatctgtctgatctggtgtgttagtgaatgtgaacttttgtggttgtttatcttcgaaaagaaaaaataagtgttggtg

SEQ ID NO: 83599 - protein, 468 aa, Arabidopsis thaliana
  peptide (1)..(468): Ceres Seq. ID no. 12670957
  misc_feature (158)..(468): Pfam Name: Tub family Pfam Description: Tub family
  misc_feature (40)..(468): Homolog of NCBI NO: 18400968 NR Description: expressed protein; protein id: At1g43640.1, by cDNA: gi_15983381, supported by cDNA: gi_18176057 [Arabidopsis >gi|15983382|gb|AAL11559.1|AF424565_1 At1g43640/T10P12_16
  misc_feature (40)..(468): Homolog of NCBI NO: 25405122 NR Description: hypothetical protein T10P12.9 [imported] - thaliana >gi|5080765|gb|AAD39275.1|AC007203_7 Hypothetical
  misc_feature (40)..(346): Homolog of NCBI NO: 15223772 NR Description: Tub family protein, putative; protein id: [Arabidopsis thaliana] >gi|25406477|pir||H96797 hypothetical
  misc_feature (351)..(468): Homolog of NCBI NO: 15223772 NR Description: Tub family protein, putative; protein id: [Arabidopsis thaliana] >gi|25406477|pir||H96797 hypothetical
  misc_feature (40)..(352): Homolog of NCBI NO: 5777631 NR Description: CAA303719.1 protein [Oryza sativa]
  misc_feature (321)..(468): Homolog of NCBI NO: 5777631 NR Description: CAA303719.1 protein [Oryza sativa]
  misc_feature (40)..(352): Homolog of NCBI NO: 38637048 NR Description: putative chain A, C-terminal domain of mouse
  misc_feature (317)..(468): Homolog of NCBI NO: 38637048 NR Description: putative chain A, C-terminal domain of mouse
  misc_feature (40)..(468): Homolog of NCBI NO: 15222543 NR Description: F-box containing tubby family protein; protein At1g25280.1 [Arabidopsis thaliana] >gi|25518577|pir||E86382
  misc_feature (57)..(352): Homolog of NCBI NO: 28188595 NR Description: unknown protein [Arabidopsis thaliana] unknown protein [Arabidopsis thaliana] unknown protein [Arabidopsis thaliana]
EKTAKKIREIKKKKKKNRDSFELTKTYRFSKVESLVFGKMSFLSIVRDVRDTVGSFSRRSFDVRVSNGTTHQRSKSHGVEAHIEDLIVIKNTRWANLPAALLRDVMKKLDESESTWPARKQVVACAGVCKTWRLMCKDIVKSPEFSGKLTFPVSLKQPGPRDGIIQCYIKRDKSNMTYHLYLSLSPAILVESGKFLLSAKRSRRATYTEYVISMDADNISRSSSTYIGKLKSNFLGTKFIVYDTAPAYNSSQILSPPNRSRSFNSKKVSPKVPSGSYNIAQVTYELNLLGTRGPRRMNCIMHSIPSLALEPGGTVPSQPEFLQRSLDESFRSIGSSKIVNHSGDFTRPKEEEGKVRPLVLKTKPPRWLQPLRCWCLNFKGRVTVASVKNFQLMSAATVQPGSGSDGGALATRPSLSPQQPEQSNHDKIILHFGKVGKDMFTMDYRYPLSAFQAFAISLSTFDTKLACE

SEQ ID NO: 83600 - protein, 429 aa, Arabidopsis thaliana
  peptide (1)..(429): Ceres Seq. ID no. 12670958
  misc_feature (119)..(429): Pfam Name: Tub family Pfam Description: Tub family
  misc_feature (1)..(429): Homolog of NCBI NO: 18400968 NR Description: expressed protein; protein id: At1g43640.1, by cDNA: gi_15983381, supported by cDNA: gi_18176057 [Arabidopsis >gi|15983382|gb|AAL11559.1|AF424565_1 At1g43640/T10P12_16
  misc_feature (1)..(429): Homolog of NCBI NO: 25405122 NR Description: hypothetical protein T10P12.9 [imported] - thaliana >gi|5080765|gb|AAD39275.1|AC007203_7 Hypothetical
  misc_feature (1)..(307): Homolog of NCBI NO: 15223772 NR Description: Tub family protein, putative; protein id: [Arabidopsis thaliana] >gi|25406477|pir||H96797 hypothetical
  misc_feature (312)..(429): Homolog of NCBI NO: 15223772 NR Description: Tub family protein, putative; protein id: [Arabidopsis thaliana] >gi|25406477|pir||H96797 hypothetical
  misc_feature (1)..(313): Homolog of NCBI NO: 5777631 NR Description: CAA303719.1 protein [Oryza sativa]
  misc_feature (282)..(429): Homolog of NCBI NO: 5777631 NR Description: CAA303719.1 protein [Oryza sativa]
  misc_feature (1)..(313): Homolog of NCBI NO: 38637048 NR Description: putative chain A, C-terminal domain of mouse
  misc_feature (278)..(429): Homolog of NCBI NO: 38637048 NR Description: putative chain A, C-terminal domain of mouse
  misc_feature (1)..(429): Homolog of NCBI NO: 15222543 NR Description: F-box containing tubby family protein; protein At1g25280.1 [Arabidopsis thaliana] >gi|25518577|pir||E86382
  misc_feature (18)..(313): Homolog of NCBI NO: 28188595 NR Description: unknown protein [Arabidopsis thaliana] unknown protein [Arabidopsis thaliana] unknown protein [Arabidopsis thaliana]
MSFLSIVRDVRDTVGSFSRRSFDVRVSNGTTHQRSKSHGVEAHIEDLIVIKNTRWANLPAALLRDVMKKLDESESTWPARKQVVACAGVCKTWRLMCKDIVKSPEFSGKLTFPVSLKQPGPRDGIIQCYIKRDKSNMTYHLYLSLSPAILVESGKFLLSAKRSRRATYTEYVISMDADNISRSSSTYIGKLKSNFLGTKFIVYDTAPAYNSSQILSPPNRSRSFNSKKVSPKVPSGSYNIAQVTYELNLLGTRGPRRMNCIMHSIPSLALEPGGTVPSQPEFLQRSLDESFRSIGSSKIVNHSGDFTRPKEEEGKVRPLVLKTKPPRWLQPLRCWCLNFKGRVTVASVKNFQLMSAATVQPGSGSDGGALATRPSLSPQQPEQSNHDKIILHFGKVGKDMFTMDYRYPLSAFQAFAISLSTFDTKLACE

SEQ ID NO: 83601 - protein, 363 aa, Arabidopsis thaliana
  peptide (1)..(363): Ceres Seq. ID no. 12670959
  misc_feature (53)..(363): Pfam Name: Tub family Pfam Description: Tub family
  misc_feature (1)..(363): Homolog of NCBI NO: 18400968 NR Description: expressed protein; protein id: At1g43640.1, by cDNA: gi_15983381, supported by cDNA: gi_18176057 [Arabidopsis >gi|15983382|gb|AAL11559.1|AF424565_1 At1g43640/T10P12_16
  misc_feature (1)..(363): Homolog of NCBI NO: 25405122 NR Description: hypothetical protein T10P12.9 [imported] - thaliana >gi|5080765|gb|AAD39275.1|AC007203_7 Hypothetical
  misc_feature (1)..(241): Homolog of NCBI NO: 15223772 NR Description: Tub family protein, putative; protein id: [Arabidopsis thaliana] >gi|25406477|pir||H96797 hypothetical
  misc_feature (246)..(363): Homolog of NCBI NO: 15223772 NR Description: Tub family protein, putative; protein id: [Arabidopsis thaliana] >gi|25406477|pir||H96797 hypothetical
  misc_feature (1)..(247): Homolog of NCBI NO: 5777631 NR Description: CAA303719.1 protein [Oryza sativa]
  misc_feature (216)..(363): Homolog of NCBI NO: 5777631 NR Description: CAA303719.1 protein [Oryza sativa]
  misc_feature (1)..(247): Homolog of NCBI NO: 38637048 NR Description: putative chain A, C-terminal domain of mouse
  misc_feature (212)..(363): Homolog of NCBI NO: 38637048 NR Description: putative chain A, C-terminal domain of mouse
  misc_feature (1)..(363): Homolog of NCBI NO: 15222543 NR Description: F-box containing tubby family protein; protein At1g25280.1 [Arabidopsis thaliana] >gi|25518577|pir||E86382
  misc_feature (1)..(247): Homolog of NCBI NO: 28188595 NR Description: unknown protein [Arabidopsis thaliana] unknown protein [Arabidopsis thaliana] unknown protein [Arabidopsis thaliana]
MKKLDESESTWPARKQVVACAGVCKTWRLMCKDIVKSPEFSGKLTFPVSLKQPGPRDGIIQCYIKRDKSNMTYHLYLSLSPAILVESGKFLLSAKRSRRATYTEYVISMDADNISRSSSTYIGKLKSNFLGTKFIVYDTAPAYNSSQILSPPNRSRSFNSKKVSPKVPSGSYNIAQVTYELNLLGTRGPRRMNCIMHSIPSLALEPGGTVPSQPEFLQRSLDESFRSIGSSKIVNHSGDFTRPKEEEGKVRPLVLKTKPPRWLQPLRCWCLNFKGRVTVASVKNFQLMSAATVQPGSGSDGGALATRPSLSPQQPEQSNHDKIILHFGKVGKDMFTMDYRYPLSAFQAFAISLSTFDTKLACE

SEQ ID NO: 83602 - DNA, 1383 bp, Arabidopsis thaliana
  misc_feature (1)..(1383): Ceres Seq. ID no. 12670978
  misc_feature: MA Experiment ID: 20000173 Result: Down-regulated in Transcription
  misc_feature: MA Experiment 20000173 PARAMETER Experiment Name: At_42deg_Heat_P Parameter: Age (day) Value: 14
  misc_feature: MA Experiment 20000173 PARAMETER Experiment Name: At_42deg_Heat_P Parameter: Organism Value: A. thaliana
  misc_feature: MA Experiment 20000173 PARAMETER Experiment Name: At_42deg_Heat_P Parameter: Plant Line Value: WS
  misc_feature: MA Experiment 20000173 PARAMETER Experiment Name: At_42deg_Heat_P Parameter: Temperature (deg C) Value: 42 vs. 22
  misc_feature: MA Experiment 20000173 PARAMETER Experiment Name: At_42deg_Heat_P Parameter: Timepoint (hr) Value: 6
  misc_feature: MA Experiment 20000173 PARAMETER Experiment Name: At_42deg_Heat_P Parameter: Tissue Value: Aerial
  misc_feature: MA Experiment ID: 20000180 Result: Up-regulated in Transcription
  misc_feature: MA Experiment 20000180 PARAMETER Experiment Name: At_Germinating_Seeds_P Parameter: Age (hr) Value: 24 vs. 0
  misc_feature: MA Experiment 20000180 PARAMETER Experiment Name: At_Germinating_Seeds_P Parameter: Tissue Value: Germinating Seeds
  misc_feature: MA Experiment ID: 20000185 Result: Up-regulated in Transcription
  misc_feature: MA Experiment 20000185 PARAMETER Experiment Name: At_Roots__P Parameter: Age (day) Value: 7 vs. 21
  misc_feature: MA Experiment 20000185 PARAMETER Experiment Name: At_Roots__P Parameter: Organism Value: A. thaliana
  misc_feature: MA Experiment 20000185 PARAMETER Experiment Name: At_Roots__P Parameter: Tissue Value: Roots vs. Whole Plant
  misc_feature: MA Experiment ID: 20000234 Result: Up-regulated in Transcription
  misc_feature: MA Experiment 20000234 PARAMETER Experiment Name: At_Siliques_P Parameter: Age (day) Value: 21
  misc_feature: MA Experiment 20000234 PARAMETER Experiment Name: At_Siliques_P Parameter: Organism Value: A. thaliana
  misc_feature: MA Experiment 20000234 PARAMETER Experiment Name: At_Siliques_P Parameter: Plant Line Value: WS
  misc_feature: MA Experiment 20000234 PARAMETER Experiment Name: At_Siliques_P Parameter: Tissue Value: Less Than 5mm Siliques vs. Whole Plant
  misc_feature: MA Experiment ID: 20000264 Result: Up-regulated in Transcription
  misc_feature: MA Experiment 20000264 PARAMETER Experiment Name: At_Open_Flower_P Parameter: Age (day) Value: 21
  misc_feature: MA Experiment 20000264 PARAMETER Experiment Name: At_Open_Flower_P Parameter: Plant Line Value: WS
  misc_feature: MA Experiment 20000264 PARAMETER Experiment Name: At_Open_Flower_P Parameter: Tissue Value: Open Flower vs. Whole Plant
  misc_feature: MA Experiment ID: 20000265 Result: Up-regulated in Transcription
  misc_feature: MA Experiment 20000265 PARAMETER Experiment Name: At_Open_Flower_P Parameter: Age (day) Value: 21
  misc_feature: MA Experiment 20000265 PARAMETER Experiment Name: At_Open_Flower_P Parameter: Plant Line Value: WS
  misc_feature: MA Experiment 20000265 PARAMETER Experiment Name: At_Open_Flower_P Parameter: Tissue Value: Closed Flower vs. Whole Plant
  misc_feature: MA Experiment ID: 20000286 Result: Up-regulated in Transcription
  misc_feature: MA Experiment 20000286 PARAMETER Experiment Name: At_Open_Flower_P Parameter: Age (day) Value: 21
  misc_feature: MA Experiment 20000286 PARAMETER Experiment Name: At_Open_Flower_P Parameter: Plant Line Value: WS
  misc_feature: MA Experiment 20000286 PARAMETER Experiment Name: At_Open_Flower_P Parameter: Tissue Value: Half Open vs. Whole Plant
  misc_feature: MA Experiment ID: 20000437 Result: Down-regulated in Transcription
  misc_feature: MA Experiment 20000437 PARAMETER Experiment Name: At_Drought_P Parameter: Age (day) Value: 8
  misc_feature: MA Experiment 20000437 PARAMETER Experiment Name: At_Drought_P Parameter: Organism Value: A. thaliana
  misc_feature: MA Experiment 20000437 PARAMETER Experiment Name: At_Drought_P Parameter: Plant Line Value: WS
  misc_feature: MA Experiment 20000437 PARAMETER Experiment Name: At_Drought_P Parameter: Timepoint (hr) Value: 24
  misc_feature: MA Experiment 20000437 PARAMETER Experiment Name: At_Drought_P Parameter: Tissue Value: Whole Plant
  misc_feature: MA Experiment 20000437 PARAMETER Experiment Name: At_Drought_P Parameter: Treatment Value: Drought vs. No Drought
  misc_feature: MA Experiment ID: 20000438 Result: Up-regulated in Transcription
  misc_feature: MA Experiment 20000438 PARAMETER Experiment Name: At_Shoots__P Parameter: Age (day) Value: 14
  misc_feature: MA Experiment 20000438 PARAMETER Experiment Name: At_Shoots__P Parameter: Tissue Value: Shoots vs. Whole Plant
  misc_feature: MA Experiment ID: 20000439 Result: Up-regulated in Transcription
  misc_feature: MA Experiment 20000439 PARAMETER Experiment Name: At_Roots__P Parameter: Age (day) Value: 14 vs. 21
  misc_feature: MA Experiment 20000439 PARAMETER Experiment Name: At_Roots__P Parameter: Organism Value: A. thaliana
  misc_feature: MA Experiment 20000439 PARAMETER Experiment Name: At_Roots__P Parameter: Tissue Value: Roots vs. Whole Plant
  misc_feature: MA Experiment ID: 20000495 Result: Up-regulated in Transcription
  misc_feature: MA Experiment 20000495 PARAMETER Experiment Name: At_Guard_Cells_P Parameter: Harvest Date Value: 8/2/2002
  misc_feature: MA Experiment 20000495 PARAMETER Experiment Name: At_Guard_Cells_P Parameter: Organism Value: A. thaliana
  misc_feature: MA Experiment 20000495 PARAMETER Experiment Name: At_Guard_Cells_P Parameter: Tissue Value: Guard Cells vs. Leaves
  misc_feature: MA Experiment ID: 20001450 Result: Down-regulated in Transcription
  misc_feature: MA Experiment 20001450 PARAMETER Experiment Name: At_Far-red-induction_P Parameter: Age (day) Value: 7
  misc_feature: MA Experiment 20001450 PARAMETER Experiment Name: At_Far-red-induction_P Parameter: Light Value: Far-red vs. White
  misc_feature: MA Experiment 20001450 PARAMETER Experiment Name: At_Far-red-induction_P Parameter: Organism Value: A. thaliana
  misc_feature: MA Experiment 20001450 PARAMETER Experiment Name: At_Far-red-induction_P Parameter: Plant Line Value: Columbia
  misc_feature: MA Experiment 20001450 PARAMETER Experiment Name: At_Far-red-induction_P Parameter: Timepoint (hr) Value: 8
  misc_feature: MA Experiment 20001450 PARAMETER Experiment Name: At_Far-red-induction_P Parameter: Tissue Value: Whole Plant
  misc_feature: MA Experiment ID: 20001555 Result: Down-regulated in Transcription
  misc_feature: MA Experiment 20001555 PARAMETER Experiment Name: At_Drought_Soil_Dry_P Parameter: Age (day) Value: 24
  misc_feature: MA Experiment 20001555 PARAMETER Experiment Name: At_Drought_Soil_Dry_P Parameter: Organism Value: A. thaliana
  misc_feature: MA Experiment 20001555 PARAMETER Experiment Name: At_Drought_Soil_Dry_P Parameter: Plant Line Value: WS
  misc_feature: MA Experiment 20001555 PARAMETER Experiment Name: At_Drought_Soil_Dry_P Parameter: Post Timepoint (hr) Value: None
  misc_feature: MA Experiment 20001555 PARAMETER Experiment Name: At_Drought_Soil_Dry_P Parameter: Post-Treatment Value: None
  misc_feature: MA Experiment 20001555 PARAMETER Experiment Name: At_Drought_Soil_Dry_P Parameter: Timepoint (day) Value: 10
  misc_feature: MA Experiment 20001555 PARAMETER Experiment Name: At_Drought_Soil_Dry_P Parameter: Treatment Value: Drought vs. No Drought
atgtcgaacattcttcagaatcggcgatcttcgttttcctcttcgacgaaatcttcattagcgaagcgtcaagcaccatcttcatcggagaattctgttaaacttatgccggcgatgacgaagaaacgagcaccgttaagtaacattaccaatcaaaaaatcgcctcacgattacaaaattctgattcggtacattgttcaaacaagtcagcgaaattgaagatagcaccaagtgtttgcgttaatgccagtttctctagcaatctgcaacaaagcatagttcctcacaaagttgcttcttcacctagcaaatctgatgatggctcagtatcaatggacgagactaggtcttcaagtgattcctacaagagtcctcaagttgagtatatcgaaaacgacgacgtttcggctgttgtttcgattgagaggaaagctttgagtaatctgttcataacgccgaattcagaaacaattgataattattgtagtagagatgtgttatctgatatgaagaaaatggataagaatcagattgttaacattgatagtaacaatggtgatcctcagctttgtgctacgtttgcttgtgacatttataagcatcttcgtgcttctgaggctaagaagcgacctgatgttgattacatggagagagttcagaaagatgtgaattcgagtatgcgtggaatcttagttgattggcttattgaggtgtctgaagagtataggcttgtaccggagacgttgtatttgactgtgaactatatagataggtatttatctgggaatgtgattagtagacagaaacttcagttgcttggtgtggcttgtatgatgatagcagcgaaatatgaagagatatgtgctccacaagttgaggagttttgttacattactgataatacatatctcaaagatgaagttcttgatatggaatctgatgttctgaattacttgaagtttgaaatgactgcaccaactacgaaatgttttctaagacgctttgttcgagctgctcatggtgttcatgaagctccattgatgcagctagaatgtatggctaactacattgcggaattatcgctactagagtacactatgctctctcattctccttcactagtagctgcttccgccattttcttggctaagtacattctagacccaacaagacgaccatggaactcgacgttgcaacactatacgcaatataaagcgatggagttgagaggatgtgtgaaggatcttcaacgattgtgtagtactgctcacggctctacactacctgctgttagagagaagtatagtcaacacaaatacaagtttgtggcgaagaagttttgtccatccgtaatcccacaagagttcttcaacaacagctaa

SEQ ID NO: 83603 - protein, 460 aa, Arabidopsis thaliana
  peptide (1)..(460): Ceres Seq. ID no. 12670979
  misc_feature (326)..(453): Pfam Name: Cyclin, C-terminal domain Pfam Description: Cyclin, C-terminal domain
  misc_feature (1)..(460): Homolog of NCBI NO: 15219350 NR Description: Cyclin A1;1; protein id: At1g44110.1 [Arabidopsis
  misc_feature (138)..(460): Homolog of NCBI NO: 1076445 NR Description: mitosis-specific cyclin CYC2 - rape
  misc_feature (6)..(134): Homolog of NCBI NO: 1076445 NR Description: mitosis-specific cyclin CYC2 - rape
MSNILQNRRSSFSSSTKSSLAKRQAPSSSENSVKLMPAMTKKRAPLSNITNQKIASRLQNSDSVHCSNKSAKLKIAPSVCVNASFSSNLQQSIVPHKVASSPSKSDDGSVSMDETRSSSDSYKSPQVEYIENDDVSAVVSIERKALSNLFITPNSETIDNYCSRDVLSDMKKMDKNQIVNIDSNNGDPQLCATFACDIYKHLRASEAKKRPDVDYMERVQKDVNSSMRGILVDWLIEVSEEYRLVPETLYLTVNYIDRYLSGNVISRQKLQLLGVACMMIAAKYEEICAPQVEEFCYITDNTYLKDEVLDMESDVLNYLKFEMTAPTTKCFLRRFVRAAHGVHEAPLMQLECMANYIAELSLLEYTMLSHSPSLVAASAIFLAKYILDPTRRPWNSTLQHYTQYKAMELRGCVKDLQRLCSTAHGSTLPAVREKYSQHKYKFVAKKFCPSVIPQEFFNNS

SEQ ID NO: 83604 - protein, 425 aa, Arabidopsis thaliana
  peptide (1)..(425): Ceres Seq. ID no. 12670980
  misc_feature (291)..(418): Pfam Name: Cyclin, C-terminal domain Pfam Description: Cyclin, C-terminal domain
  misc_feature (1)..(425): Homolog of NCBI NO: 15219350 NR Description: Cyclin A1;1; protein id: At1g44110.1 [Arabidopsis
  misc_feature (103)..(425): Homolog of NCBI NO: 1076445 NR Description: mitosis-specific cyclin CYC2 - rape
  misc_feature (1)..(99): Homolog of NCBI NO: 1076445 NR Description: mitosis-specific cyclin CYC2 - rape
MPAMTKKRAPLSNITNQKIASRLQNSDSVHCSNKSAKLKIAPSVCVNASFSSNLQQSIVPHKVASSPSKSDDGSVSMDETRSSSDSYKSPQVEYIENDDVSAVVSIERKALSNLFITPNSETIDNYCSRDVLSDMKKMDKNQIVNIDSNNGDPQLCATFACDIYKHLRASEAKKRPDVDYMERVQKDVNSSMRGILVDWLIEVSEEYRLVPETLYLTVNYIDRYLSGNVISRQKLQLLGVACMMIAAKYEEICAPQVEEFCYITDNTYLKDEVLDMESDVLNYLKFEMTAPTTKCFLRRFVRAAHGVHEAPLMQLECMANYIAELSLLEYTMLSHSPSLVAASAIFLAKYILDPTRRPWNSTLQHYTQYKAMELRGCVKDLQRLCSTAHGSTLPAVREKYSQHKYKFVAKKFCPSVIPQEFFNNS

SEQ ID NO: 83605 - protein, 422 aa, Arabidopsis thaliana
  peptide (1)..(422): Ceres Seq. ID no. 12670981
  misc_feature (288)..(415): Pfam Name: Cyclin, C-terminal domain Pfam Description: Cyclin, C-terminal domain
  misc_feature (1)..(422): Homolog of NCBI NO: 15219350 NR Description: Cyclin A1;1; protein id: At1g44110.1 [Arabidopsis
  misc_feature (100)..(422): Homolog of NCBI NO: 1076445 NR Description: mitosis-specific cyclin CYC2 - rape
  misc_feature (1)..(96): Homolog of NCBI NO: 1076445 NR Description: mitosis-specific cyclin CYC2 - rape
MTKKRAPLSNITNQKIASRLQNSDSVHCSNKSAKLKIAPSVCVNASFSSNLQQSIVPHKVASSPSKSDDGSVSMDETRSSSDSYKSPQVEYIENDDVSAVVSIERKALSNLFITPNSETIDNYCSRDVLSDMKKMDKNQIVNIDSNNGDPQLCATFACDIYKHLRASEAKKRPDVDYMERVQKDVNSSMRGILVDWLIEVSEEYRLVPETLYLTVNYIDRYLSGNVISRQKLQLLGVACMMIAAKYEEICAPQVEEFCYITDNTYLKDEVLDMESDVLNYLKFEMTAPTTKCFLRRFVRAAHGVHEAPLMQLECMANYIAELSLLEYTMLSHSPSLVAASAIFLAKYILDPTRRPWNSTLQHYTQYKAMELRGCVKDLQRLCSTAHGSTLPAVREKYSQHKYKFVAKKFCPSVIPQEFFNNS

SEQ ID NO: 83606 - DNA, 1372 bp, Arabidopsis thaliana
  misc_feature (1)..(1372): Ceres Seq. ID no. 12670982
  misc_feature: MA Experiment ID: 20000327 Result: Down-regulated in Transcription
  misc_feature: MA Experiment 20000327 PARAMETER Experiment Name: At_42deg_Heat_Sub_P Parameter: Age (day) Value: 14
  misc_feature: MA Experiment 20000327 PARAMETER Experiment Name: At_42deg_Heat_Sub_P Parameter: Organism Value: A. thaliana
  misc_feature: MA Experiment 20000327 PARAMETER Experiment Name: At_42deg_Heat_Sub_P Parameter: Plant Line Value: WS
  misc_feature: MA Experiment 20000327 PARAMETER Experiment Name: At_42deg_Heat_Sub_P Parameter: Temperature (deg C) Value: 42 vs. 22
  misc_feature: MA Experiment 20000327 PARAMETER Experiment Name: At_42deg_Heat_Sub_P Parameter: Timepoint (hr) Value: 1
  misc_feature: MA Experiment 20000327 PARAMETER Experiment Name: At_42deg_Heat_Sub_P Parameter: Tissue Value: Aerial
  misc_feature: MA Experiment ID: 20000328 Result: Down-regulated in Transcription
  misc_feature: MA Experiment 20000328 PARAMETER Experiment Name: At_42deg_Heat_Sub_P Parameter: Age (day) Value: 14
  misc_feature: MA Experiment 20000328 PARAMETER Experiment Name: At_42deg_Heat_Sub_P Parameter: Organism Value: A. thaliana
  misc_feature: MA Experiment 20000328 PARAMETER Experiment Name: At_42deg_Heat_Sub_P Parameter: Plant Line Value: WS
  misc_feature: MA Experiment 20000328 PARAMETER Experiment Name: At_42deg_Heat_Sub_P Parameter: Temperature (deg C) Value: 42 vs. 22
  misc_feature: MA Experiment 20000328 PARAMETER Experiment Name: At_42deg_Heat_Sub_P Parameter: Timepoint (hr) Value: 6
  misc_feature: MA Experiment 20000328 PARAMETER Experiment Name: At_42deg_Heat_Sub_P Parameter: Tissue Value: Aerial
aatctctctctttttacaccggcgataattttccgatcccgattataagatggcgaaggaaccagttcgtgttcttgttaccggagctgcaggtaatcaagaaccaatcttggtgaaagaagagagtgtggttggtataccaacaccactcttgaagcttaaaagttggcaatggtgggttcttgtatccgttaacatctttttccttattggtggtcaagctgcttcggttcttcttggtaggttttactatgatgaaggtggaaacagtaaatggatggcaactcttgttcaaacggctgcttttcctatactctatatcccgcttttgctacttccgtcttcggctagtgtagagtcttcggagagttcgtgttcactcaagtacattgttttgatctatgttttgctcggtgtgatcattgctggagataatatgttatactctgttggacttttgtacctctctgcatcgacgtattcgctcatttgcgctactcagttagctttcaacgcggtgttctcttatttcatcaatgctcagaagttcactgctttgattctcaactccgttgttctcttgtcgttctccgctgctttgatagctctcaatgatgatgcggatactccttctggtgtctccaggtctaagtatattgttgggtttgtgtgtacacttgctgcgtctgctctctattctctgttgctatctcttatgcagttctcgttcgagaagattctgaagagggagacgttttctgtggttcttgaaatgcaaatctacacttctttagtggcgacttgtgtttcggttatagggctttttgctagcggggaatggagaacgctgcatggggaaatggaaggttatcataaagggcaagcctcttatgtactgaccttggtctggacagcagttacttggcaagtgtgttctgttggagtcgtgggtttgatatttctggtgacgtcgctcttctcaaacgtcattagtacgctctctctagctgtgactccactagcagctttggttgtgttccgtgataaaatgagtggtgttaagattatggcaatgctgatcgctatttggggtttcgcttcttatgtttaccagaatcatattgatgacttgaaagtaagacaagcacgacaacaagctcaagccgggcgggtagaaccgccctgttgattctgcgatgattcaggcagaaacattaatttagaaggctatacgttctgtttagataagcaacaataattgtcactcgtaggacaagctactggtcttgccatattgtttctgaaatcaaatgtgtcgtacgaatgtatgatcaagtctaatatactggtaggtaaatggaacttcgtgaat

SEQ ID NO: 83607 - protein, 379 aa, Arabidopsis thaliana
  peptide (1)..(379): Ceres Seq. ID no. 12670983
  misc_feature (188)..(371): Pfam Name: Domain of unknown function, DUF250 Pfam Description: Domain of unknown function, DUF250
  misc_feature (1)..(379): Homolog of NCBI NO: 15219436 NR Description: hypothetical protein; protein id: At1g44750.1, by cDNA: gi_17065411 [Arabidopsis thaliana]
  misc_feature (20)..(372): Homolog of NCBI NO: 18413147 NR Description: putative protein; protein id: At4g08700.1, by cDNA: 38901., supported by cDNA: gi_20465910 [Arabidopsis >gi|18491201|gb|AAL69503.1| unknown protein [Arabidopsis
  misc_feature (20)..(372): Homolog of NCBI NO: 25407443 NR Description: hypothetical protein AT4g08700 [imported] - thaliana >gi|7267512|emb|CAB77995.1| putative protein thaliana] >gi|7321059|emb|CAB82106.1| putative protein
  misc_feature (20)..(372): Homolog of NCBI NO: 15237573 NR Description: purine permease-like protein; protein id:
  misc_feature (11)..(366): Homolog of NCBI NO: 38605752 NR Description: OSJNBb0016D16.5 [Oryza sativa (japonica
  misc_feature (11)..(366): Homolog of NCBI NO: 38344290 NR Description: OSJNBa0013K16.22 [Oryza sativa (japonica
  misc_feature (2)..(378): Homolog of NCBI NO: 30684325 NR Description: purine permease family [Arabidopsis thaliana]
  misc_feature (6)..(370): Homolog of NCBI NO: 38344291 NR Description: OSJNBa0013K16.23 [Oryza sativa (japonica
  misc_feature (31)..(370): Homolog of NCBI NO: 38605752 NR Description: OSJNBb0016D16.5 [Oryza sativa (japonica
  misc_feature (67)..(378): Homolog of NCBI NO: 7487849 NR Description: hypothetical protein T9A21.60 - Arabidopsis >gi|2832695|emb|CAA16793.1| putative protein [Arabidopsis >gi|7268614|emb|CAB78823.1| putative protein [Arabidopsis
MAKEPVRVLVTGAAGNQEPILVKEESVVGIPTPLLKLKSWQWWVLVSVNIFFLIGGQAASVLLGRFYYDEGGNSKWMATLVQTAAFPILYIPLLLLPSSASVESSESSCSLKYIVLIYVLLGVIIAGDNMLYSVGLLYLSASTYSLICATQLAFNAVFSYFINAQKFTALILNSVVLLSFSAALIALNDDADTPSGVSRSKYIVGFVCTLAASALYSLLLSLMQFSFEKILKRETFSVVLEMQIYTSLVATCVSVIGLFASGEWRTLHGEMEGYHKGQASYVLTLVWTAVTWQVCSVGVVGLIFLVTSLFSNVISTLSLAVTPLAALVVFRDKMSGVKIMAMLIAIWGFASYVYQNHIDDLKVRQARQQAQAGRVEPPC

SEQ ID NO: 83608 - protein, 303 aa, Arabidopsis thaliana
  peptide (1)..(303): Ceres Seq. ID no. 12670984
  misc_feature (112)..(295): Pfam Name: Domain of unknown function, DUF250 Pfam Description: Domain of unknown function, DUF250
  misc_feature (1)..(303): Homolog of NCBI NO: 15219436 NR Description: hypothetical protein; protein id: At1g44750.1, by cDNA: gi_17065411 [Arabidopsis thaliana]
  misc_feature (1)..(296): Homolog of NCBI NO: 18413147 NR Description: putative protein; protein id: At4g08700.1, by cDNA: 38901., supported by cDNA: gi_20465910 [Arabidopsis >gi|18491201|gb|AAL69503.1| unknown protein [Arabidopsis
  misc_feature (1)..(296): Homolog of NCBI NO: 25407443 NR Description: hypothetical protein AT4g08700 [imported] - thaliana >gi|7267512|emb|CAB77995.1| putative protein thaliana] >gi|7321059|emb|CAB82106.1| putative protein
  misc_feature (1)..(296): Homolog of NCBI NO: 15237573 NR Description: purine permease-like protein; protein id:
  misc_feature (1)..(290): Homolog of NCBI NO: 38605752 NR Description: OSJNBb0016D16.5 [Oryza sativa (japonica
  misc_feature (1)..(290): Homolog of NCBI NO: 38344290 NR Description: OSJNBa0013K16.22 [Oryza sativa (japonica
  misc_feature (1)..(302): Homolog of NCBI NO: 30684325 NR Description: purine permease family [Arabidopsis thaliana]
  misc_feature (1)..(294): Homolog of NCBI NO: 38344291 NR Description: OSJNBa0013K16.23 [Oryza sativa (japonica
  misc_feature (1)..(294): Homolog of NCBI NO: 38605752 NR Description: OSJNBb0016D16.5 [Oryza sativa (japonica
  misc_feature (1)..(302): Homolog of NCBI NO: 7487849 NR Description: hypothetical protein T9A21.60 - Arabidopsis >gi|2832695|emb|CAA16793.1| putative protein [Arabidopsis >gi|7268614|emb|CAB78823.1| putative protein [Arabidopsis
MATLVQTAAFPILYIPLLLLPSSASVESSESSCSLKYIVLIYVLLGVIIAGDNMLYSVGLLYLSASTYSLICATQLAFNAVFSYFINAQKFTALILNSVVLLSFSAALIALNDDADTPSGVSRSKYIVGFVCTLAASALYSLLLSLMQFSFEKILKRETFSVVLEMQIYTSLVATCVSVIGLFASGEWRTLHGEMEGYHKGQASYVLTLVWTAVTWQVCSVGVVGLIFLVTSLFSNVISTLSLAVTPLAALVVFRDKMSGVKIMAMLIAIWGFASYVYQNHIDDLKVRQARQQAQAGRVEPPC

SEQ ID NO: 83609 - protein, 250 aa, Arabidopsis thaliana
  peptide (1)..(250): Ceres Seq. ID no. 12670985
  misc_feature (59)..(242): Pfam Name: Domain of unknown function, DUF250 Pfam Description: Domain of unknown function, DUF250
  misc_feature (1)..(250): Homolog of NCBI NO: 15219436 NR Description: hypothetical protein; protein id: At1g44750.1, by cDNA: gi_17065411 [Arabidopsis thaliana]
  misc_feature (1)..(243): Homolog of NCBI NO: 18413147 NR Description: putative protein; protein id: At4g08700.1, by cDNA: 38901., supported by cDNA: gi_20465910 [Arabidopsis >gi|18491201|gb|AAL69503.1| unknown protein [Arabidopsis
  misc_feature (1)..(243): Homolog of NCBI NO: 25407443 NR Description: hypothetical protein AT4g08700 [imported] - thaliana >gi|7267512|emb|CAB77995.1| putative protein thaliana] >gi|7321059|emb|CAB82106.1| putative protein
  misc_feature (1)..(243): Homolog of NCBI NO: 15237573 NR Description: purine permease-like protein; protein id:
  misc_feature (1)..(237): Homolog of NCBI NO: 38605752 NR Description: OSJNBb0016D16.5 [Oryza sativa (japonica
  misc_feature (1)..(237): Homolog of NCBI NO: 38344290 NR Description: OSJNBa0013K16.22 [Oryza sativa (japonica
  misc_feature (1)..(249): Homolog of NCBI NO: 30684325 NR Description: purine permease family [Arabidopsis thaliana]
  misc_feature (1)..(241): Homolog of NCBI NO: 38344291 NR Description: OSJNBa0013K16.23 [Oryza sativa (japonica
  misc_feature (1)..(241): Homolog of NCBI NO: 38605752 NR Description: OSJNBb0016D16.5 [Oryza sativa (japonica
  misc_feature (1)..(249): Homolog of NCBI NO: 7487849 NR Description: hypothetical protein T9A21.60 - Arabidopsis >gi|2832695|emb|CAA16793.1| putative protein [Arabidopsis >gi|7268614|emb|CAB78823.1| putative protein [Arabidopsis
MLYSVGLLYLSASTYSLICATQLAFNAVFSYFINAQKFTALILNSVVLLSFSAALIALNDDADTPSGVSRSKYIVGFVCTLAASALYSLLLSLMQFSFEKILKRETFSVVLEMQIYTSLVATCVSVIGLFASGEWRTLHGEMEGYHKGQASYVLTLVWTAVTWQVCSVGVVGLIFLVTSLFSNVISTLSLAVTPLAALVVFRDKMSGVKIMAMLIAIWGFASYVYQNHIDDLKVRQARQQAQAGRVEPPC

SEQ ID NO: 83610 - DNA, 2239 bp, Arabidopsis thaliana
  misc_feature (1)..(2239): Ceres Seq. ID no. 12671015
  misc_feature: MA Experiment ID: 20000171 Result: Down-regulated in Transcription
  misc_feature: MA Experiment 20000171 PARAMETER Experiment Name: At_42deg_Heat_P Parameter: Age (day) Value: 14
  misc_feature: MA Experiment 20000171 PARAMETER Experiment Name: At_42deg_Heat_P Parameter: Organism Value: A. thaliana
  misc_feature: MA Experiment 20000171 PARAMETER Experiment Name: At_42deg_Heat_P Parameter: Plant Line Value: WS
  misc_feature: MA Experiment 20000171 PARAMETER Experiment Name: At_42deg_Heat_P Parameter: Temperature (deg C) Value: 42 vs. 22
  misc_feature: MA Experiment 20000171 PARAMETER Experiment Name: At_42deg_Heat_P Parameter: Timepoint (hr) Value: 1
  misc_feature: MA Experiment 20000171 PARAMETER Experiment Name: At_42deg_Heat_P Parameter: Tissue Value: Aerial
  misc_feature: MA Experiment ID: 20000213 Result: Up-regulated in Transcription
  misc_feature: MA Experiment 20000213 PARAMETER Experiment Name: At_4deg_Cold_P Parameter: Timepoint (hr) Value: 2
  misc_feature: MA Experiment ID: 20000227 Result: Down-regulated in Transcription
  misc_feature: MA Experiment 20000227 PARAMETER Experiment Name: At_Root-Tips-vs-Tops_P Parameter: Tissue Value: Root Tips vs. Root Tops
  misc_feature: MA Experiment ID: 20000234 Result: Down-regulated in Transcription
  misc_feature: MA Experiment 20000234 PARAMETER Experiment Name: At_Siliques_P Parameter: Age (day) Value: 21
  misc_feature: MA Experiment 20000234 PARAMETER Experiment Name: At_Siliques_P Parameter: Organism Value: A. thaliana
  misc_feature: MA Experiment 20000234 PARAMETER Experiment Name: At_Siliques_P Parameter: Plant Line Value: WS
  misc_feature: MA Experiment 20000234 PARAMETER Experiment Name: At_Siliques_P Parameter: Tissue Value: Less Than 5mm Siliques vs. Whole Plant
  misc_feature: MA Experiment ID: 20000235 Result: Down-regulated in Transcription
  misc_feature: MA Experiment 20000235 PARAMETER Experiment Name: At_Siliques_P Parameter: Age (day) Value: 21
  misc_feature: MA Experiment 20000235 PARAMETER Experiment Name: At_Siliques_P Parameter: Organism Value: A. thaliana
  misc_feature: MA Experiment 20000235 PARAMETER Experiment Name: At_Siliques_P Parameter: Plant Line Value: WS
  misc_feature: MA Experiment 20000235 PARAMETER Experiment Name: At_Siliques_P Parameter: Tissue Value: 5-10mm Siliques vs. Whole Plant
  misc_feature: MA Experiment ID: 20000265 Result: Down-regulated in Transcription
  misc_feature: MA Experiment 20000265 PARAMETER Experiment Name: At_Open_Flower_P Parameter: Age (day) Value: 21
  misc_feature: MA Experiment 20000265 PARAMETER Experiment Name: At_Open_Flower_P Parameter: Plant Line Value: WS
  misc_feature: MA Experiment 20000265 PARAMETER Experiment Name: At_Open_Flower_P Parameter: Tissue Value: Closed Flower vs. Whole Plant
  misc_feature: MA Experiment ID: 20000439 Result: Down-regulated in Transcription
  misc_feature: MA Experiment 20000439 PARAMETER Experiment Name: At_Roots__P Parameter: Age (day) Value: 14 vs. 21
  misc_feature: MA Experiment 20000439 PARAMETER Experiment Name: At_Roots__P Parameter: Organism Value: A. thaliana
  misc_feature: MA Experiment 20000439 PARAMETER Experiment Name: At_Roots__P Parameter: Tissue Value: Roots vs. Whole Plant
  misc_feature: MA Experiment ID: 20000441 Result: Up-regulated in Transcription
  misc_feature: MA Experiment 20000441 PARAMETER Experiment Name: At_1uM_BR-BRZ__P Parameter: Tissue Value: Shoot Apices
  misc_feature: MA Experiment 20000441 PARAMETER Experiment Name: At_1uM_BR-BRZ__P Parameter: Treatment Value: 1uM BR vs. No Treatment
  misc_feature: MA Experiment ID: 20000443 Result: Up-regulated in Transcription
  misc_feature: MA Experiment 20000443 PARAMETER Experiment Name: At_1uM_BR-BRZ__P Parameter: Tissue Value: Shoot Apices
  misc_feature: MA Experiment 20000443 PARAMETER Experiment Name: At_1uM_BR-BRZ__P Parameter: Treatment Value: 1uM BRZ vs. No Treatment
  misc_feature: MA Experiment ID: 20000495 Result: Down-regulated in Transcription
  misc_feature: MA Experiment 20000495 PARAMETER Experiment Name: At_Guard_Cells_P Parameter: Harvest Date Value: 8/2/2002
  misc_feature: MA Experiment 20000495 PARAMETER Experiment Name: At_Guard_Cells_P Parameter: Organism Value: A. thaliana
  misc_feature: MA Experiment 20000495 PARAMETER Experiment Name: At_Guard_Cells_P Parameter: Tissue Value: Guard Cells vs. Leaves
  misc_feature: MA Experiment ID: 20000573 Result: Down-regulated in Transcription
  misc_feature: MA Experiment 20000573 PARAMETER Experiment Name: At_100uM_ABA_Mutants__P Parameter: Organism Value: A. thaliana
  misc_feature: MA Experiment 20000573 PARAMETER Experiment Name: At_100uM_ABA_Mutants__P Parameter: Plant Line Value: CS22 vs. Ler wt
  misc_feature: MA Experiment 20000573 PARAMETER Experiment Name: At_100uM_ABA_Mutants__P Parameter: Timepoint (hr) Value: N/A
  misc_feature: MA Experiment 20000573 PARAMETER Experiment Name: At_100uM_ABA_Mutants__P Parameter: Tissue Value: Whole Plant
  misc_feature: MA Experiment 20000573 PARAMETER Experiment Name: At_100uM_ABA_Mutants__P Parameter: Treatment Value: None
  misc_feature: MA Experiment ID: 20000574 Result: Down-regulated in Transcription
  misc_feature: MA Experiment 20000574 PARAMETER Experiment Name: At_100uM_ABA_Mutants__P Parameter: Organism Value: A. thaliana
  misc_feature: MA Experiment 20000574 PARAMETER Experiment Name: At_100uM_ABA_Mutants__P Parameter: Plant Line Value: CS23 vs. Ler wt
  misc_feature: MA Experiment 20000574 PARAMETER Experiment Name: At_100uM_ABA_Mutants__P Parameter: Timepoint (hr) Value: N/A
  misc_feature: MA Experiment 20000574 PARAMETER Experiment Name: At_100uM_ABA_Mutants__P Parameter: Tissue Value: Whole Plant
  misc_feature: MA Experiment 20000574 PARAMETER Experiment Name: At_100uM_ABA_Mutants__P Parameter: Treatment Value: None
  misc_feature: MA Experiment ID: 20001905 Result: Up-regulated in Transcription
  misc_feature: MA Experiment 20001905 PARAMETER Experiment Name: At_Drought_Reproduction_P Parameter: Age (day) Value: 40
  misc_feature: MA Experiment 20001905 PARAMETER Experiment Name: At_Drought_Reproduction_P Parameter: Organism Value: A. thaliana
  misc_feature: MA Experiment 20001905 PARAMETER Experiment Name: At_Drought_Reproduction_P Parameter: Plant Line Value: WS
  misc_feature: MA Experiment 20001905 PARAMETER Experiment Name: At_Drought_Reproduction_P Parameter: Timepoint (day) Value: 10
  misc_feature: MA Experiment 20001905 PARAMETER Experiment Name: At_Drought_Reproduction_P Parameter: Tissue Value: Rosettes
  misc_feature: MA Experiment 20001905 PARAMETER Experiment Name: At_Drought_Reproduction_P Parameter: Treatment Value: Drought vs. No Drought
atcttatctacttcactttttgattacaaaaaccaaacaaacaaacaacaaaccagaagttttatttttgttaaagagtaaccaaaaaaaaaaaacagagtaccttcttcttcacacacataaaaagagacggtaccaaaaaataaaaacagagcaaaccacaaaaatggggaagcatttattccgatcatctcctccaccggagaaaccaacagctcatctctctctcgcggaatcagctgttcaagaatgtatgagcaacatcaacaccgtcatatcaaaatggacttctccggctgcttcttcctccgacgacttcctcttctccaccaacagtcgtcgtgaagcagaggagtttgttacagccgttagacatctacaaagcacgatgcatcgtttggtttccgttaacccttcctcggagaagctaatctacgcacagaatctaatgcaatcggcgatgaagcttctcgaatcagagtttcatcgtgttttaaaagcgaaccgtgagtatttagatcctgaatgtgtctctgtacgttcttacagatcatcgagattcagtacttcgactacgactagtgtctccgattccgaagacgaaagcagttacgaagaaaacgccgacgaagagcatagattctccggtggagattccgacgcaatggatgatctcaagatgattgctgattgtatgatctctaccggctacgctaaggaatgcgttagggtttataaaaccgtacggaaatcgattgttgatgagacgctgcataatctgcaaatggagagattcaatcttcatcaggttcagaaaatggattgggagattctcgaatcaaagatcaaaacatggctaaaagctgtgaaattagctgttagaaaattgttcttcggtgagaggattttagctgatcatgttttctcttcctctggtttaatcgttgaatcttctttcactgagattactcaagaaggagcattgattctcttcactttcccggaatatgcttccaagatcaaaaagttaactccggagaaaatgtttcggtttctggatatgtatgaagctcttgcgaatctctatgttgagattgaatcaatcttctacttcgaatcagctgctgcggttagatctcaggtgataaactcgttagctagactcggcgatgcgacgaggttgatgatgacggatttcgaatcggcgattcagaaagaaacctcgaagactccgatcatcggtggtggtgttcatcctctgactcgttacgttatgaattacctctccttcctcgctgattacagtgattccatcgctgcgatattcgaaaactggaagctgagtgtgccgacgccgttgccggattctttatacataagcggcggcgatgaagcgaatccggaggatctgtattcgtctccggtctctgtacgtatcgcttgggtgattttactcacgctttgtaaaatcgacggtaaagctcagccgtataaagacgttgctttgtcttatctcttcctcgctaacaatctccaatacgtcgtcgttaaagtccgatcgtcgactctgaaggttcttctcggagacgattgggtgtttaggcatgaagagaaggtgaagctgtatgctgataagtttgagaagcttgcgtgggggaaagtgctggatttactaccggagattccgacggatgagatttcgccggaggaagctaaggttttggtggcgagattcaacgatgagtttgagacgtcgtaccggaaacagacttcgtgggttatacccgacccgaaacttagggaccagattaaaatcacgttgagtcagaaacttatgctggtttgtaccgagttttaccggatgaaccggtttgcatatggtatggttggagataatgaggctatttccagatatacccctgaagatattgggaattacctctcggatctttactttgggtctagaggctcagggagtgtttcgacagctggtgggtctggatccggatccggatccggaactggttcgtcgagtacgggtaaagctcgtggcggacgtagtagtcattgaatgagaatctcgtgatattagttttttttttttcttttctttaatttgtgtggttataatgtaacctatagtgattgatgtgtcgaatatcttattcaattatgtgtgtacagatatatgttgaattattgagctcttcttttcttaaaagcaaatcattcgattact

SEQ ID NO: 83611 - protein, 689 aa, Arabidopsis thaliana
  peptide (1)..(689): Ceres Seq. ID no. 12671016
  misc_feature (73)..(652): Pfam Name: Exo70 exocyst complex subunit Pfam Description: Exo70 exocyst complex subunit
  misc_feature (56)..(614): Homolog of NCBI NO: 23397289 NR Description: unknown protein [Arabidopsis thaliana]
  misc_feature (70)..(661): Homolog of NCBI NO: 25308573 NR Description: hypothetical protein [imported] - Arabidopsis >gi|8439895|gb|AAF75081.1|AC007583_17 It contains a interferon domain PF|00143. EST gb|N96176 comes from this gene. [Arabidopsis
  misc_feature (65)..(668): Homolog of NCBI NO: 15232697 NR Description: hypothetical protein; protein id: At3g09520.1 thaliana] >gi|6682261|gb|AAF23313.1|AC016661_38 hypothetical
  misc_feature (70)..(612): Homolog of NCBI NO: 22329407 NR Description: similar to leucine zipper-containing protein;
  misc_feature (55)..(678): Homolog of NCBI NO: 22331801 NR Description: putative protein; protein id: At3g55150.1, by cDNA: gi_18377617, supported by cDNA: gi_20465378 [Arabidopsis >gi|18377618|gb|AAL66959.1| unknown protein [Arabidopsis
  misc_feature (67)..(670): Homolog of NCBI NO: 15225082 NR Description: hypothetical protein; protein id: At2g39380.1
  misc_feature (67)..(678): Homolog of NCBI NO: 11278980 NR Description: hypothetical protein T26I12.30 - Arabidopsis >gi|7019648|emb|CAB75749.1| putative protein [Arabidopsis
  misc_feature (54)..(653): Homolog of NCBI NO: 15232699 NR Description: hypothetical protein; protein id: At3g09530.1 thaliana] >gi|6682232|gb|AAF23284.1|AC016661_9 hypothetical
  misc_feature (146)..(655): Homolog of NCBI NO: 19386798 NR Description: putative leucine zipper protein [Oryza sativa
  misc_feature (183)..(653): Homolog of NCBI NO: 15218495 NR Description: unknown protein; protein id: At1g72470.1
SYLLHFLITKTKQTNNKPEVLFLLKSNQKKKTEYLLLHTHKKRRYQKIKTEQTTKMGKHLFRSSPPPEKPTAHLSLAESAVQECMSNINTVISKWTSPAASSSDDFLFSTNSRREAEEFVTAVRHLQSTMHRLVSVNPSSEKLIYAQNLMQSAMKLLESEFHRVLKANREYLDPECVSVRSYRSSRFSTSTTTSVSDSEDESSYEENADEEHRFSGGDSDAMDDLKMIADCMISTGYAKECVRVYKTVRKSIVDETLHNLQMERFNLHQVQKMDWEILESKIKTWLKAVKLAVRKLFFGERILADHVFSSSGLIVESSFTEITQEGALILFTFPEYASKIKKLTPEKMFRFLDMYEALANLYVEIESIFYFESAAAVRSQVINSLARLGDATRLMMTDFESAIQKETSKTPIIGGGVHPLTRYVMNYLSFLADYSDSIAAIFENWKLSVPTPLPDSLYISGGDEANPEDLYSSPVSVRIAWVILLTLCKIDGKAQPYKDVALSYLFLANNLQYVVVKVRSSTLKVLLGDDWVFRHEEKVKLYADKFEKLAWGKVLDLLPEIPTDEISPEEAKVLVARFNDEFETSYRKQTSWVIPDPKLRDQIKITLSQKLMLVCTEFYRMNRFAYGMVGDNEAISRYTPEDIGNYLSDLYFGSRGSGSVSTAGGSGSGSGSGTGSSSTGKARGGRSSH

SEQ ID NO: 83612 - protein, 634 aa, Arabidopsis thaliana
  peptide (1)..(634): Ceres Seq. ID no. 12671017
  misc_feature (18)..(597): Pfam Name: Exo70 exocyst complex subunit Pfam Description: Exo70 exocyst complex subunit
  misc_feature (1)..(559): Homolog of NCBI NO: 23397289 NR Description: unknown protein [Arabidopsis thaliana]
  misc_feature (15)..(606): Homolog of NCBI NO: 25308573 NR Description: hypothetical protein [imported] - Arabidopsis >gi|8439895|gb|AAF75081.1|AC007583_17 It contains a interferon domain PF|00143. EST gb|N96176 comes from this gene. [Arabidopsis
  misc_feature (10)..(613): Homolog of NCBI NO: 15232697 NR Description: hypothetical protein; protein id: At3g09520.1 thaliana] >gi|6682261|gb|AAF23313.1|AC016661_38 hypothetical
  misc_feature (15)..(557): Homolog of NCBI NO: 22329407 NR Description: similar to leucine zipper-containing protein;
  misc_feature (1)..(623): Homolog of NCBI NO: 22331801 NR Description: putative protein; protein id: At3g55150.1, by cDNA: gi_18377617, supported by cDNA: gi_20465378 [Arabidopsis >gi|18377618|gb|AAL66959.1| unknown protein [Arabidopsis
  misc_feature (12)..(615): Homolog of NCBI NO: 15225082 NR Description: hypothetical protein; protein id: At2g39380.1
  misc_feature (12)..(623): Homolog of NCBI NO: 11278980 NR Description: hypothetical protein T26I12.30 - Arabidopsis >gi|7019648|emb|CAB75749.1| putative protein [Arabidopsis
  misc_feature (1)..(598): Homolog of NCBI NO: 15232699 NR Description: hypothetical protein; protein id: At3g09530.1 thaliana] >gi|6682232|gb|AAF23284.1|AC016661_9 hypothetical
  misc_feature (91)..(600): Homolog of NCBI NO: 19386798 NR Description: putative leucine zipper protein [Oryza sativa
  misc_feature (128)..(598): Homolog of NCBI NO: 15218495 NR Description: unknown protein; protein id: At1g72470.1
MGKHLFRSSPPPEKPTAHLSLAESAVQECMSNINTVISKWTSPAASSSDDFLFSTNSRREAEEFVTAVRHLQSTMHRLVSVNPSSEKLIYAQNLMQSAMKLLESEFHRVLKANREYLDPECVSVRSYRSSRFSTSTTTSVSDSEDESSYEENADEEHRFSGGDSDAMDDLKMIADCMISTGYAKECVRVYKTVRKSIVDETLHNLQMERFNLHQVQKMDWEILESKIKTWLKAVKLAVRKLFFGERILADHVFSSSGLIVESSFTEITQEGALILFTFPEYASKIKKLTPEKMFRFLDMYEALANLYVEIESIFYFESAAAVRSQVINSLARLGDATRLMMTDFESAIQKETSKTPIIGGGVHPLTRYVMNYLSFLADYSDSIAAIFENWKLSVPTPLPDSLYISGGDEANPEDLYSSPVSVRIAWVILLTLCKIDGKAQPYKDVALSYLFLANNLQYVVVKVRSSTLKVLLGDDWVFRHEEKVKLYADKFEKLAWGKVLDLLPEIPTDEISPEEAKVLVARFNDEFETSYRKQTSWVIPDPKLRDQIKITLSQKLMLVCTEFYRMNRFAYGMVGDNEAISRYTPEDIGNYLSDLYFGSRGSGSVSTAGGSGSGSGSGTGSSSTGKARGGRSSH

SEQ ID NO: 83613 - protein, 605 aa, Arabidopsis thaliana
  peptide (1)..(605): Ceres Seq. ID no. 12671018
  misc_feature (1)..(568): Pfam Name: Exo70 exocyst complex subunit Pfam Description: Exo70 exocyst complex subunit
  misc_feature (1)..(530): Homolog of NCBI NO: 23397289 NR Description: unknown protein [Arabidopsis thaliana]
  misc_feature (1)..(577): Homolog of NCBI NO: 25308573 NR Description: hypothetical protein [imported] - Arabidopsis >gi|8439895|gb|AAF75081.1|AC007583_17 It contains a interferon domain PF|00143. EST gb|N96176 comes from this gene. [Arabidopsis
  misc_feature (1)..(584): Homolog of NCBI NO: 15232697 NR Description: hypothetical protein; protein id: At3g09520.1 thaliana] >gi|6682261|gb|AAF23313.1|AC016661_38 hypothetical
  misc_feature (1)..(528): Homolog of NCBI NO: 22329407 NR Description: similar to leucine zipper-containing protein;
  misc_feature (1)..(594): Homolog of NCBI NO: 22331801 NR Description: putative protein; protein id: At3g55150.1, by cDNA: gi_18377617, supported by cDNA: gi_20465378 [Arabidopsis >gi|18377618|gb|AAL66959.1| unknown protein [Arabidopsis
  misc_feature (1)..(586): Homolog of NCBI NO: 15225082 NR Description: hypothetical protein; protein id: At2g39380.1
  misc_feature (1)..(594): Homolog of NCBI NO: 11278980 NR Description: hypothetical protein T26I12.30 - Arabidopsis >gi|7019648|emb|CAB75749.1| putative protein [Arabidopsis
  misc_feature (1)..(569): Homolog of NCBI NO: 15232699 NR Description: hypothetical protein; protein id: At3g09530.1 thaliana] >gi|6682232|gb|AAF23284.1|AC016661_9 hypothetical
  misc_feature (62)..(571): Homolog of NCBI NO: 19386798 NR Description: putative leucine zipper protein [Oryza sativa
  misc_feature (99)..(569): Homolog of NCBI NO: 15218495 NR Description: unknown protein; protein id: At1g72470.1
MSNINTVISKWTSPAASSSDDFLFSTNSRREAEEFVTAVRHLQSTMHRLVSVNPSSEKLIYAQNLMQSAMKLLESEFHRVLKANREYLDPECVSVRSYRSSRFSTSTTTSVSDSEDESSYEENADEEHRFSGGDSDAMDDLKMIADCMISTGYAKECVRVYKTVRKSIVDETLHNLQMERFNLHQVQKMDWEILESKIKTWLKAVKLAVRKLFFGERILADHVFSSSGLIVESSFTEITQEGALILFTFPEYASKIKKLTPEKMFRFLDMYEALANLYVEIESIFYFESAAAVRSQVINSLARLGDATRLMMTDFESAIQKETSKTPIIGGGVHPLTRYVMNYLSFLADYSDSIAAIFENWKLSVPTPLPDSLYISGGDEANPEDLYSSPVSVRIAWVILLTLCKIDGKAQPYKDVALSYLFLANNLQYVVVKVRSSTLKVLLGDDWVFRHEEKVKLYADKFEKLAWGKVLDLLPEIPTDEISPEEAKVLVARFNDEFETSYRKQTSWVIPDPKLRDQIKITLSQKLMLVCTEFYRMNRFAYGMVGDNEAISRYTPEDIGNYLSDLYFGSRGSGSVSTAGGSGSGSGSGTGSSSTGKARGGRSSH

SEQ ID NO: 83614 - DNA, 1494 bp, Arabidopsis thaliana
  misc_feature (1)..(1494): Ceres Seq. ID no. 12671019
  misc_feature: MA Experiment ID: 20000179 Result: Down-regulated in Transcription
  misc_feature: MA Experiment 20000179 PARAMETER Experiment Name: At_Germinating_Seeds_P Parameter: Age (hr) Value: 6 vs. 0
  misc_feature: MA Experiment 20000179 PARAMETER Experiment Name: At_Germinating_Seeds_P Parameter: Tissue Value: Germinating Seeds
  misc_feature: MA Experiment ID: 20000180 Result: Down-regulated in Transcription
  misc_feature: MA Experiment 20000180 PARAMETER Experiment Name: At_Germinating_Seeds_P Parameter: Age (hr) Value: 24 vs. 0
  misc_feature: MA Experiment 20000180 PARAMETER Experiment Name: At_Germinating_Seeds_P Parameter: Tissue Value: Germinating Seeds
  misc_feature: MA Experiment ID: 20000184 Result: Up-regulated in Transcription
  misc_feature: MA Experiment 20000184 PARAMETER Experiment Name: At_Shoots__P Parameter: Age (day) Value: 7
  misc_feature: MA Experiment 20000184 PARAMETER Experiment Name: At_Shoots__P Parameter: Tissue Value: Shoots vs. Whole Plant
  misc_feature: MA Experiment ID: 20000227 Result: Up-regulated in Transcription
  misc_feature: MA Experiment 20000227 PARAMETER Experiment Name: At_Root-Tips-vs-Tops_P Parameter: Tissue Value: Root Tips vs. Root Tops
  misc_feature: MA Experiment ID: 20000438 Result: Up-regulated in Transcription
  misc_feature: MA Experiment 20000438 PARAMETER Experiment Name: At_Shoots__P Parameter: Age (day) Value: 14
  misc_feature: MA Experiment 20000438 PARAMETER Experiment Name: At_Shoots__P Parameter: Tissue Value: Shoots vs. Whole Plant
  misc_feature: MA Experiment ID: 20001248 Result: Down-regulated in Transcription
  misc_feature: MA Experiment 20001248 PARAMETER Experiment Name: At_Far-red-induction_P Parameter: Age (day) Value: 7
  misc_feature: MA Experiment 20001248 PARAMETER Experiment Name: At_Far-red-induction_P Parameter: Light Value: Far-red vs. White
  misc_feature: MA Experiment 20001248 PARAMETER Experiment Name: At_Far-red-induction_P Parameter: Organism Value: A. thaliana
  misc_feature: MA Experiment 20001248 PARAMETER Experiment Name: At_Far-red-induction_P Parameter: Plant Line Value: Columbia
  misc_feature: MA Experiment 20001248 PARAMETER Experiment Name: At_Far-red-induction_P Parameter: Timepoint (hr) Value: 4
  misc_feature: MA Experiment 20001248 PARAMETER Experiment Name: At_Far-red-induction_P Parameter: Tissue Value: Whole Plant
atggcgacatggtttcacatcttctgcgtctctttcacagtcaacttccttctatatctcttcttccgcagaactaacaacaatcttcctctacctccgaaccctaacttcttccccatgcctggtcccttccagtggctccgtcaaggcttcgatgatttctactcctatctccgctccatccaccaccgtctcggcccaatcatctctctccgcatcttttccgtccctgccatcttcgtctctgatcgttccttggctcacaaggctcttgttttaaacggcgccgtattctctgatcgtccaccggcgcttcctaccggaaagatcatcactagtaaccaacacaccatcagctcaggatcatacggagctacgtggcgacttctccgtcgtaatctcacctccgagattcttcatccatcccgtgtcaaatcttattccaacgctcgtcgctctgttcttgaaaacctctgttctcgaattcgtaatcacggggaagaagcaaaaccgatcgtcgtcgttgatcatctccgttatgcaatgttctcgcttcttgttctcatgtgtttcggagataagcttgacgaagaacagatcaaacaagtcgaattcgttcaaagaagagagctcatcacgttaccaagattcaacatcctcaatgtcttccctagtttcaccaagttgtttctgagaaagagatgggaagagtttcttacgttcaggagagaacacaagaacgtcttgcttccgttgattcgttcccggagaaagatcatgatcgaatctaaagattccggtaaagaatacatacaatcgtatgtagatactctgctcgatcttgagcttcctgatgagaagaggaaactaaacgaagacgagatcgtgagtttatgctctgagtttctcaacgccgggactgatacaacagcgacgacacttcaatggataatggcgaatcttgtaatcggtgaagaagaagagaaggagattgaagaagaagagatgaagaagatgccgtatcttaaagctgtcgtgttagaaggtctccggttacatccaccgggacatttgttgttaccacacagagtaagtgaagacactgagctaggaggatacagagttccaaagaaagggacgtttaatatcaatgtggcgatgatagggagagatccaacagtgtgggaggagccaatggagtttaagccggagagattcatcggagaagataaagaagttgatgttactggaagtagagggataaagatgatgccgtttggagcaggaaggaggatctgtccagggattggatcggccatgttgcatttggagtattttgtggtgaatttggttaaagagtttgagtggaaagaagttgaaggttatgaagttgacttgtctgagaaatgggagttcactgttgttatgaagtatcctcttaaagctcttgctgtgacaagaaggaaggagaagacacatatcgtcatggcttag

SEQ ID NO: 83615 - protein, 497 aa, Arabidopsis thaliana
  peptide (1)..(497): Ceres Seq. ID no. 12671020
  misc_feature (32)..(484): Pfam Name: Cytochrome P450 Pfam Description: Cytochrome P450
  misc_feature (1)..(497): Homolog of NCBI NO: 15240223 NR Description: cytochrome p450 family; protein id: At5g61320.1
  misc_feature (1)..(497): Homolog of NCBI NO: 9757853 NR Description: cytochrome P450-like protein [Arabidopsis
  misc_feature (7)..(337): Homolog of NCBI NO: 15228566 NR Description: cytochrome p450, putative; protein id: supported by cDNA: gi_15983413 [Arabidopsis thaliana]
  misc_feature (7)..(337): Homolog of NCBI NO: 15983414 NR Description: AT3g03470/T21P5_11 [Arabidopsis thaliana]
  misc_feature (318)..(489): Homolog of NCBI NO: 15228566 NR Description: cytochrome p450, putative; protein id: supported by cDNA: gi_15983413 [Arabidopsis thaliana]
  misc_feature (318)..(489): Homolog of NCBI NO: 15983414 NR Description: AT3g03470/T21P5_11 [Arabidopsis thaliana]
  misc_feature (1)..(334): Homolog of NCBI NO: 15217801 NR Description: cytochrome p450, putative; protein id: supported by cDNA: gi_14334809, supported by cDNA: gi_15293196, by cDNA: gi_15450600 [Arabidopsis thaliana]
  misc_feature (1)..(334): Homolog of NCBI NO: 15450601 NR Description: At1g64950/F13O11_25 [Arabidopsis thaliana]
  misc_feature (1)..(338): Homolog of NCBI NO: 37536044 NR Description: putative cytochrome P450 [Oryza sativa (japonica group)] >gi|10140669|gb|AAG13504.1| putative cytochrome P450
  misc_feature (1)..(334): Homolog of NCBI NO: 15224379 NR Description: cytochrome p450, putative; protein id: [Arabidopsis thaliana] >gi|25282595|pir||E84501 probable
MATWFHIFCVSFTVNFLLYLFFRRTNNNLPLPPNPNFFPMPGPFQWLRQGFDDFYSYLRSIHHRLGPIISLRIFSVPAIFVSDRSLAHKALVLNGAVFSDRPPALPTGKIITSNQHTISSGSYGATWRLLRRNLTSEILHPSRVKSYSNARRSVLENLCSRIRNHGEEAKPIVVVDHLRYAMFSLLVLMCFGDKLDEEQIKQVEFVQRRELITLPRFNILNVFPSFTKLFLRKRWEEFLTFRREHKNVLLPLIRSRRKIMIESKDSGKEYIQSYVDTLLDLELPDEKRKLNEDEIVSLCSEFLNAGTDTTATTLQWIMANLVIGEEEEKEIEEEEMKKMPYLKAVVLEGLRLHPPGHLLLPHRVSEDTELGGYRVPKKGTFNINVAMIGRDPTVWEEPMEFKPERFIGEDKEVDVTGSRGIKMMPFGAGRRICPGIGSAMLHLEYFVVNLVKEFEWKEVEGYEVDLSEKWEFTVVMKYPLKALAVTRRKEKTHIVMA

SEQ ID NO: 83616 - protein, 458 aa, Arabidopsis thaliana
  peptide (1)..(458): Ceres Seq. ID no. 12671021
  misc_feature (1)..(445): Pfam Name: Cytochrome P450 Pfam Description: Cytochrome P450
  misc_feature (1)..(458): Homolog of NCBI NO: 15240223 NR Description: cytochrome p450 family; protein id: At5g61320.1
  misc_feature (1)..(458): Homolog of NCBI NO: 9757853 NR Description: cytochrome P450-like protein [Arabidopsis
  misc_feature (1)..(298): Homolog of NCBI NO: 15228566 NR Description: cytochrome p450, putative; protein id: supported by cDNA: gi_15983413 [Arabidopsis thaliana]
  misc_feature (1)..(298): Homolog of NCBI NO: 15983414 NR Description: AT3g03470/T21P5_11 [Arabidopsis thaliana]
  misc_feature (279)..(450): Homolog of NCBI NO: 15228566 NR Description: cytochrome p450, putative; protein id: supported by cDNA: gi_15983413 [Arabidopsis thaliana]
  misc_feature (279)..(450): Homolog of NCBI NO: 15983414 NR Description: AT3g03470/T21P5_11 [Arabidopsis thaliana]
  misc_feature (1)..(295): Homolog of NCBI NO: 15217801 NR Description: cytochrome p450, putative; protein id: supported by cDNA: gi_14334809, supported by cDNA: gi_15293196, by cDNA: gi_15450600 [Arabidopsis thaliana]
  misc_feature (1)..(295): Homolog of NCBI NO: 15450601 NR Description: At1g64950/F13O11_25 [Arabidopsis thaliana]
  misc_feature (1)..(299): Homolog of NCBI NO: 37536044 NR Description: putative cytochrome P450 [Oryza sativa (japonica group)] >gi|10140669|gb|AAG13504.1| putative cytochrome P450
  misc_feature (1)..(295): Homolog of NCBI NO: 15224379 NR Description: cytochrome p450, putative; protein id: [Arabidopsis thaliana] >gi|25282595|pir||E84501 probable
MPGPFQWLRQGFDDFYSYLRSIHHRLGPIISLRIFSVPAIFVSDRSLAHKALVLNGAVFSDRPPALPTGKIITSNQHTISSGSYGATWRLLRRNLTSEILHPSRVKSYSNARRSVLENLCSRIRNHGEEAKPIVVVDHLRYAMFSLLVLMCFGDKLDEEQIKQVEFVQRRELITLPRFNILNVFPSFTKLFLRKRWEEFLTFRREHKNVLLPLIRSRRKIMIESKDSGKEYIQSYVDTLLDLELPDEKRKLNEDEIVSLCSEFLNAGTDTTATTLQWIMANLVIGEEEEKEIEEEEMKKMPYLKAVVLEGLRLHPPGHLLLPHRVSEDTELGGYRVPKKGTFNINVAMIGRDPTVWEEPMEFKPERFIGEDKEVDVTGSRGIKMMPFGAGRRICPGIGSAMLHLEYFVVNLVKEFEWKEVEGYEVDLSEKWEFTVVMKYPLKALAVTRRKEKTHIVMA

SEQ ID NO: 83617 - protein, 316 aa, Arabidopsis thaliana
  peptide (1)..(316): Ceres Seq. ID no. 12671022
  misc_feature (1)..(303): Pfam Name: Cytochrome P450 Pfam Description: Cytochrome P450
  misc_feature (1)..(316): Homolog of NCBI NO: 15240223 NR Description: cytochrome p450 family; protein id: At5g61320.1
  misc_feature (1)..(316): Homolog of NCBI NO: 9757853 NR Description: cytochrome P450-like protein [Arabidopsis
  misc_feature (1)..(156): Homolog of NCBI NO: 15228566 NR Description: cytochrome p450, putative; protein id: supported by cDNA: gi_15983413 [Arabidopsis thaliana]
  misc_feature (1)..(156): Homolog of NCBI NO: 15983414 NR Description: AT3g03470/T21P5_11 [Arabidopsis thaliana]
  misc_feature (137)..(308): Homolog of NCBI NO: 15228566 NR Description: cytochrome p450, putative; protein id: supported by cDNA: gi_15983413 [Arabidopsis thaliana]
  misc_feature (137)..(308): Homolog of NCBI NO: 15983414 NR Description: AT3g03470/T21P5_11 [Arabidopsis thaliana]
  misc_feature (1)..(153): Homolog of NCBI NO: 15217801 NR Description: cytochrome p450, putative; protein id: supported by cDNA: gi_14334809, supported by cDNA: gi_15293196, by cDNA: gi_15450600 [Arabidopsis thaliana]
  misc_feature (1)..(153): Homolog of NCBI NO: 15450601 NR Description: At1g64950/F13O11_25 [Arabidopsis thaliana]
  misc_feature (1)..(157): Homolog of NCBI NO: 37536044 NR Description: putative cytochrome P450 [Oryza sativa (japonica group)] >gi|10140669|gb|AAG13504.1| putative cytochrome P450
  misc_feature (1)..(153): Homolog of NCBI NO: 15224379 NR Description: cytochrome p450, putative; protein id: [Arabidopsis thaliana] >gi|25282595|pir||E84501 probable
MFSLLVLMCFGDKLDEEQIKQVEFVQRRELITLPRFNILNVFPSFTKLFLRKRWEEFLTFRREHKNVLLPLIRSRRKIMIESKDSGKEYIQSYVDTLLDLELPDEKRKLNEDEIVSLCSEFLNAGTDTTATTLQWIMANLVIGEEEEKEIEEEEMKKMPYLKAVVLEGLRLHPPGHLLLPHRVSEDTELGGYRVPKKGTFNINVAMIGRDPTVWEEPMEFKPERFIGEDKEVDVTGSRGIKMMPFGAGRRICPGIGSAMLHLEYFVVNLVKEFEWKEVEGYEVDLSEKWEFTVVMKYPLKALAVTRRKEKTHIVMA

SEQ ID NO: 83618 - DNA, 1965 bp, Arabidopsis thaliana
  misc_feature (1)..(1965): Ceres Seq. ID no. 12671023
  misc_feature: MA Experiment ID: 20000307 Result: Down-regulated in Transcription
  misc_feature: MA Experiment 20000307 PARAMETER Experiment Name: At_Germinating_Seeds_Sub_P Parameter: Age (hr) Value: 24 vs. 0
  misc_feature: MA Experiment 20000307 PARAMETER Experiment Name: At_Germinating_Seeds_Sub_P Parameter: Organism Value: A. thaliana
  misc_feature: MA Experiment 20000307 PARAMETER Experiment Name: At_Germinating_Seeds_Sub_P Parameter: Plant Line Value: WS
  misc_feature: MA Experiment 20000307 PARAMETER Experiment Name: At_Germinating_Seeds_Sub_P Parameter: Tissue Value: Germinating Seeds
  misc_feature: MA Experiment ID: 20000328 Result: Down-regulated in Transcription
  misc_feature: MA Experiment 20000328 PARAMETER Experiment Name: At_42deg_Heat_Sub_P Parameter: Age (day) Value: 14
  misc_feature: MA Experiment 20000328 PARAMETER Experiment Name: At_42deg_Heat_Sub_P Parameter: Organism Value: A. thaliana
  misc_feature: MA Experiment 20000328 PARAMETER Experiment Name: At_42deg_Heat_Sub_P Parameter: Plant Line Value: WS
  misc_feature: MA Experiment 20000328 PARAMETER Experiment Name: At_42deg_Heat_Sub_P Parameter: Temperature (deg C) Value: 42 vs. 22
  misc_feature: MA Experiment 20000328 PARAMETER Experiment Name: At_42deg_Heat_Sub_P Parameter: Timepoint (hr) Value: 6
  misc_feature: MA Experiment 20000328 PARAMETER Experiment Name: At_42deg_Heat_Sub_P Parameter: Tissue Value: Aerial
atgttgaagcttctgcttccccaacatagaacatcagtttacttgttcaagtttcaatttttcaactttagattcttatctcaatctccttctctgtcaaattcggcatcttctttctcttcttcgagtctggctgaagcaatactgaaatgcagatcagcggaagaagcgttcaagctgttcgaaacgtcttcgagatctcgagtctccaagtcaaacgatcttcaatctttttcggcagtgattcatgttttaaccggagctcacaagtatacgctcgccagatgtttgataaaaagcctcatagaacgtctgaaacgccacagtgagccgagtaacatgtctcatagacttttcaatgctctggaagatattcagagtccaaaattcagtatcggagtgtttagtctattgattatggagtttctggagatgggtttgtttgaagaagctctttgggtgagtcgagagatgaaatgttcaccggattcaaaagcttgtctttcgattttgaatggcttggttagaaggagacggtttgattcagtttgggttgattaccaacttatgatctctcgtgggttggtccctgatgtccacatttactttgttttgtttcaatgctgtttcaagcaaggtctttactccaagaaagagaaacttcttgatgaaatgacgtcgttagggatcaagccgaatgtttatatctataccatatatatccttgatctctgtagggataataagatggaggaagcggagaaaatgttcgagttgatgaagaaacatggtgttcttccaaacttgtatacttacagtgcaatgattgatggttactgcaagaccggtaacgtgagacaagcttacggattgtataaggagattcttgttgctgaattgctgccaaatgttgttgttttcggtacattggtcgatggattttgcaaagctcgcgaattggtaactgcgaggagccttttcgtgcatatggtgaagtttggggttgatcctaatttatatgtttataactgtttaattcatggacattgcaaatcagggaacatgttggaagcagtgggattactttctgagatggaaagtttgaatctttcgcctgatgtattcacttacactatacttatcaacgggctatgtattgaagatcaggtagcagaagcaaatcgattatttcagaagatgaagaatgagagaatttttccgagctctgcgacttacaactcgctgattcatgggtattgtaaagaatacaatatggagcaagctctggatttgtgctctgagatgacagcaagtggtgtagaacccaacatcataaccttttctactttgatcgatggttactgcaatgtgagagacataaaagctgcaatgggcttgtacttcgagatgaccatcaaaggtatagttcctgatgttgtgacctacacagctttgattgatgcacatttcaaggaggccaacatgaaagaagcactcaggctgtatagtgacatgctagaggcaggaatccaccccaatgatcacacgttcgcttgcctagtagatggattctggaaagaaggacgactctctgttgccatcgatttttatcaagaaaacaatcaacagaggagctgttggaatcatgtggggtttacatgcttgattgaagggttgtgtcagaacggctacattcttagagctagcagattcttctcagacatgagatcctgcgggataacccctgacatatgcagttacgtttcaatgttaaagggccacctccaagaaaagcgtattactgatacaatgatgttgcagtgtgacatgatcaaaactgggatattgccaaaccttttggtgaatcaattgctagccaggttttaccaagcgaatggatatgtaaaatcagcttgttttttgaccaattcaagtcgtttgaaaactgtcagcaattcctgttag

SEQ ID NO: 83619 - protein, 654 aa, Arabidopsis thaliana
  peptide (1)..(654): Ceres Seq. ID no. 12671024
  misc_feature (515)..(549): Pfam Name: PPR repeat Pfam Description: PPR repeat
  misc_feature (73)..(641): Homolog of NCBI NO: 25410964 NR Description: hypothetical protein At2g02150 [imported] - thaliana >gi|4038037|gb|AAC97219.1| hypothetical protein
  misc_feature (73)..(641): Homolog of NCBI NO: 30677982 NR Description: pentatricopeptide (PPR) repeat-containing protein
  misc_feature (150)..(641): Homolog of NCBI NO: 32527604 NR Description: pentatricopeptide repeat-containing protein
  misc_feature (59)..(618): Homolog of NCBI NO: 34902570 NR Description: Putative indole-3-acetate
  misc_feature (194)..(637): Homolog of NCBI NO: 30840327 NR Description: fertility restorer homologue [Raphanus sativus]
  misc_feature (194)..(637): Homolog of NCBI NO: 30840221 NR Description: fertility restorer [Raphanus sativus]
  misc_feature (77)..(615): Homolog of NCBI NO: 15238562 NR Description: putative protein; protein id: At5g59900.1 thaliana] >gi|9757911|dbj|BAB08358.1|
  misc_feature (140)..(635): Homolog of NCBI NO: 15242446 NR Description: putative protein; protein id: At5g39710.1
  misc_feature (125)..(618): Homolog of NCBI NO: 25404377 NR Description: hypothetical protein F16P17.5 [imported] - thaliana >gi|8493578|gb|AAF75801.1|AC011000_4 Contains a RepB protein domain and multiple PPR PF|01535 repeats. [Arabidopsis
  misc_feature (125)..(618): Homolog of NCBI NO: 15221621 NR Description: unknown protein; protein id: At1g62910.1
MLKLLLPQHRTSVYLFKFQFFNFRFLSQSPSLSNSASSFSSSSLAEAILKCRSAEEAFKLFETSSRSRVSKSNDLQSFSAVIHVLTGAHKYTLARCLIKSLIERLKRHSEPSNMSHRLFNALEDIQSPKFSIGVFSLLIMEFLEMGLFEEALWVSREMKCSPDSKACLSILNGLVRRRRFDSVWVDYQLMISRGLVPDVHIYFVLFQCCFKQGLYSKKEKLLDEMTSLGIKPNVYIYTIYILDLCRDNKMEEAEKMFELMKKHGVLPNLYTYSAMIDGYCKTGNVRQAYGLYKEILVAELLPNVVVFGTLVDGFCKARELVTARSLFVHMVKFGVDPNLYVYNCLIHGHCKSGNMLEAVGLLSEMESLNLSPDVFTYTILINGLCIEDQVAEANRLFQKMKNERIFPSSATYNSLIHGYCKEYNMEQALDLCSEMTASGVEPNIITFSTLIDGYCNVRDIKAAMGLYFEMTIKGIVPDVVTYTALIDAHFKEANMKEALRLYSDMLEAGIHPNDHTFACLVDGFWKEGRLSVAIDFYQENNQQRSCWNHVGFTCLIEGLCQNGYILRASRFFSDMRSCGITPDICSYVSMLKGHLQEKRITDTMMLQCDMIKTGILPNLLVNQLLARFYQANGYVKSACFLTNSSRLKTVSNSC

SEQ ID NO: 83620 - protein, 541 aa, Arabidopsis thaliana
  peptide (1)..(541): Ceres Seq. ID no. 12671025
  misc_feature (402)..(436): Pfam Name: PPR repeat Pfam Description: PPR repeat
  misc_feature (1)..(528): Homolog of NCBI NO: 25410964 NR Description: hypothetical protein At2g02150 [imported] - thaliana >gi|4038037|gb|AAC97219.1| hypothetical protein
  misc_feature (1)..(528): Homolog of NCBI NO: 30677982 NR Description: pentatricopeptide (PPR) repeat-containing protein
  misc_feature (37)..(528): Homolog of NCBI NO: 32527604 NR Description: pentatricopeptide repeat-containing protein
  misc_feature (1)..(505): Homolog of NCBI NO: 34902570 NR Description: Putative indole-3-acetate
  misc_feature (81)..(524): Homolog of NCBI NO: 30840327 NR Description: fertility restorer homologue [Raphanus sativus]
  misc_feature (81)..(524): Homolog of NCBI NO: 30840221 NR Description: fertility restorer [Raphanus sativus]
  misc_feature (1)..(502): Homolog of NCBI NO: 15238562 NR Description: putative protein; protein id: At5g59900.1 thaliana] >gi|9757911|dbj|BAB08358.1|
  misc_feature (27)..(522): Homolog of NCBI NO: 15242446 NR Description: putative protein; protein id: At5g39710.1
  misc_feature (12)..(505): Homolog of NCBI NO: 25404377 NR Description: hypothetical protein F16P17.5 [imported] - thaliana >gi|8493578|gb|AAF75801.1|AC011000_4 Contains a RepB protein domain and multiple PPR PF|01535 repeats. [Arabidopsis
  misc_feature (12)..(505): Homolog of NCBI NO: 15221621 NR Description: unknown protein; protein id: At1g62910.1
MSHRLFNALEDIQSPKFSIGVFSLLIMEFLEMGLFEEALWVSREMKCSPDSKACLSILNGLVRRRRFDSVWVDYQLMISRGLVPDVHIYFVLFQCCFKQGLYSKKEKLLDEMTSLGIKPNVYIYTIYILDLCRDNKMEEAEKMFELMKKHGVLPNLYTYSAMIDGYCKTGNVRQAYGLYKEILVAELLPNVVVFGTLVDGFCKARELVTARSLFVHMVKFGVDPNLYVYNCLIHGHCKSGNMLEAVGLLSEMESLNLSPDVFTYTILINGLCIEDQVAEANRLFQKMKNERIFPSSATYNSLIHGYCKEYNMEQALDLCSEMTASGVEPNIITFSTLIDGYCNVRDIKAAMGLYFEMTIKGIVPDVVTYTALIDAHFKEANMKEALRLYSDMLEAGIHPNDHTFACLVDGFWKEGRLSVAIDFYQENNQQRSCWNHVGFTCLIEGLCQNGYILRASRFFSDMRSCGITPDICSYVSMLKGHLQEKRITDTMMLQCDMIKTGILPNLLVNQLLARFYQANGYVKSACFLTNSSRLKTVSNSC

SEQ ID NO: 83621 - protein, 515 aa, Arabidopsis thaliana
  peptide (1)..(515): Ceres Seq. ID no. 12671026
  misc_feature (376)..(410): Pfam Name: PPR repeat Pfam Description: PPR repeat
  misc_feature (1)..(502): Homolog of NCBI NO: 25410964 NR Description: hypothetical protein At2g02150 [imported] - thaliana >gi|4038037|gb|AAC97219.1| hypothetical protein
  misc_feature (1)..(502): Homolog of NCBI NO: 30677982 NR Description: pentatricopeptide (PPR) repeat-containing protein
  misc_feature (11)..(502): Homolog of NCBI NO: 32527604 NR Description: pentatricopeptide repeat-containing protein
  misc_feature (1)..(479): Homolog of NCBI NO: 34902570 NR Description: Putative indole-3-acetate
  misc_feature (55)..(498): Homolog of NCBI NO: 30840327 NR Description: fertility restorer homologue [Raphanus sativus]
  misc_feature (55)..(498): Homolog of NCBI NO: 30840221 NR Description: fertility restorer [Raphanus sativus]
  misc_feature (1)..(476): Homolog of NCBI NO: 15238562 NR Description: putative protein; protein id: At5g59900.1 thaliana] >gi|9757911|dbj|BAB08358.1|
  misc_feature (1)..(496): Homolog of NCBI NO: 15242446 NR Description: putative protein; protein id: At5g39710.1
  misc_feature (1)..(479): Homolog of NCBI NO: 25404377 NR Description: hypothetical protein F16P17.5 [imported] - thaliana >gi|8493578|gb|AAF75801.1|AC011000_4 Contains a RepB protein domain and multiple PPR PF|01535 repeats. [Arabidopsis
  misc_feature (1)..(479): Homolog of NCBI NO: 15221621 NR Description: unknown protein; protein id: At1g62910.1
MEFLEMGLFEEALWVSREMKCSPDSKACLSILNGLVRRRRFDSVWVDYQLMISRGLVPDVHIYFVLFQCCFKQGLYSKKEKLLDEMTSLGIKPNVYIYTIYILDLCRDNKMEEAEKMFELMKKHGVLPNLYTYSAMIDGYCKTGNVRQAYGLYKEILVAELLPNVVVFGTLVDGFCKARELVTARSLFVHMVKFGVDPNLYVYNCLIHGHCKSGNMLEAVGLLSEMESLNLSPDVFTYTILINGLCIEDQVAEANRLFQKMKNERIFPSSATYNSLIHGYCKEYNMEQALDLCSEMTASGVEPNIITFSTLIDGYCNVRDIKAAMGLYFEMTIKGIVPDVVTYTALIDAHFKEANMKEALRLYSDMLEAGIHPNDHTFACLVDGFWKEGRLSVAIDFYQENNQQRSCWNHVGFTCLIEGLCQNGYILRASRFFSDMRSCGITPDICSYVSMLKGHLQEKRITDTMMLQCDMIKTGILPNLLVNQLLARFYQANGYVKSACFLTNSSRLKTVSNSC

SEQ ID NO: 83622 - DNA, 633 bp, Arabidopsis thaliana
  misc_feature (1)..(633): Ceres Seq. ID no. 12671043
  misc_feature: MA Experiment ID: 20000171 Result: Up-regulated in Transcription
  misc_feature: MA Experiment 20000171 PARAMETER Experiment Name: At_42deg_Heat_P Parameter: Age (day) Value: 14
  misc_feature: MA Experiment 20000171 PARAMETER Experiment Name: At_42deg_Heat_P Parameter: Organism Value: A. thaliana
  misc_feature: MA Experiment 20000171 PARAMETER Experiment Name: At_42deg_Heat_P Parameter: Plant Line Value: WS
  misc_feature: MA Experiment 20000171 PARAMETER Experiment Name: At_42deg_Heat_P Parameter: Temperature (deg C) Value: 42 vs. 22
  misc_feature: MA Experiment 20000171 PARAMETER Experiment Name: At_42deg_Heat_P Parameter: Timepoint (hr) Value: 1
  misc_feature: MA Experiment 20000171 PARAMETER Experiment Name: At_42deg_Heat_P Parameter: Tissue Value: Aerial
atgaagttcttcgtcgtgatcgtgttttgtgcaatcttcttatctgtctctggggattcggacaatatgcaggacacatgtcccacggctccgggagaacagagcatcttcttcatcaacggctatccttgcaagaacccgaccaagattaccgctcaggatttcaagtccaccaaacttacagaagctggagatacagacaattatctccagtcgaatgtcacattgctcactgcattagagtttccaggtctcaacactcttggcctctcggtctcacggactgatcttgaaagggacggatctgtgccgttccattcgcatccgaggtcatctgagatgctctttgtggtcaaaggagtcgtgtttgctggatttgtggatactaacaacaagatttttcaaacggttctgcaaaaaggcgatgtttttgtcttccctaaaggattgcttcatttctgcttgagcggtggctttgaaccagccaccgctttctcgttttacaatagccagaatcctggagtcgtgaatattggagaagtttttgggatcgatcaagagcatataaagatcatgacgaggtgtttagctactggctctggctgtagggtcactgacggtgatgagctttag

SEQ ID NO: 83623 - protein, 210 aa, Arabidopsis thaliana
  peptide (1)..(210): Ceres Seq. ID no. 12671044
  misc_feature (58)..(190): Pfam Name: Cupin Pfam Description: Cupin
  misc_feature (1)..(210): Homolog of NCBI NO: 15240338 NR Description: germin-like protein - like; protein id:
  misc_feature (5)..(178): Homolog of NCBI NO: 27529869 NR Description: germin-like protein [Barbula unguiculata]
  misc_feature (1)..(183): Homolog of NCBI NO: 15241653 NR Description: germin - like protein; protein id: At5g39150.1
  misc_feature (1)..(183): Homolog of NCBI NO: 15241660 NR Description: germin-like protein; protein id: At5g39180.1
  misc_feature (4)..(204): Homolog of NCBI NO: 1169942 NR Description: Germin-like protein precursor
  misc_feature (3)..(183): Homolog of NCBI NO: 15241579 NR Description: germin - like protein; protein id: At5g38910.1
  misc_feature (5)..(183): Homolog of NCBI NO: 15241638 NR Description: germin - like protein; protein id: At5g39120.1
  misc_feature (5)..(183): Homolog of NCBI NO: 15229247 NR Description: germin-like protein; protein id: At3g04200.1
  misc_feature (5)..(178): Homolog of NCBI NO: 18203442 NR Description: Rhicadhesin receptor precursor (Germin-like
  misc_feature (11)..(183): Homolog of NCBI NO: 4996622 NR Description: germin-like protein [Atriplex lentiformis]
MKFFVVIVFCAIFLSVSGDSDNMQDTCPTAPGEQSIFFINGYPCKNPTKITAQDFKSTKLTEAGDTDNYLQSNVTLLTALEFPGLNTLGLSVSRTDLERDGSVPFHSHPRSSEMLFVVKGVVFAGFVDTNNKIFQTVLQKGDVFVFPKGLLHFCLSGGFEPATAFSFYNSQNPGVVNIGEVFGIDQEHIKIMTRCLATGSGCRVTDGDEL

SEQ ID NO: 83624 - protein, 188 aa, Arabidopsis thaliana
  peptide (1)..(188): Ceres Seq. ID no. 12671045
  misc_feature (36)..(168): Pfam Name: Cupin Pfam Description: Cupin
  misc_feature (1)..(188): Homolog of NCBI NO: 15240338 NR Description: germin-like protein - like; protein id:
  misc_feature (1)..(156): Homolog of NCBI NO: 27529869 NR Description: germin-like protein [Barbula unguiculata]
  misc_feature (1)..(161): Homolog of NCBI NO: 15241653 NR Description: germin - like protein; protein id: At5g39150.1
  misc_feature (1)..(161): Homolog of NCBI NO: 15241660 NR Description: germin-like protein; protein id: At5g39180.1
  misc_feature (1)..(182): Homolog of NCBI NO: 1169942 NR Description: Germin-like protein precursor
  misc_feature (1)..(161): Homolog of NCBI NO: 15241579 NR Description: germin - like protein; protein id: At5g38910.1
  misc_feature (1)..(161): Homolog of NCBI NO: 15241638 NR Description: germin - like protein; protein id: At5g39120.1
  misc_feature (1)..(161): Homolog of NCBI NO: 15229247 NR Description: germin-like protein; protein id: At3g04200.1
  misc_feature (1)..(156): Homolog of NCBI NO: 18203442 NR Description: Rhicadhesin receptor precursor (Germin-like
  misc_feature (1)..(161): Homolog of NCBI NO: 4996622 NR Description: germin-like protein [Atriplex lentiformis]
MQDTCPTAPGEQSIFFINGYPCKNPTKITAQDFKSTKLTEAGDTDNYLQSNVTLLTALEFPGLNTLGLSVSRTDLERDGSVPFHSHPRSSEMLFVVKGVVFAGFVDTNNKIFQTVLQKGDVFVFPKGLLHFCLSGGFEPATAFSFYNSQNPGVVNIGEVFGIDQEHIKIMTRCLATGSGCRVTDGDEL

SEQ ID NO: 83625 - DNA, 945 bp, Arabidopsis thaliana
  misc_feature (1)..(945): Ceres Seq. ID no. 12671144
  misc_feature: MA Experiment ID: 20000179 Result: Up-regulated in Transcription
  misc_feature: MA Experiment 20000179 PARAMETER Experiment Name: At_Germinating_Seeds_P Parameter: Age (hr) Value: 6 vs. 0
  misc_feature: MA Experiment 20000179 PARAMETER Experiment Name: At_Germinating_Seeds_P Parameter: Tissue Value: Germinating Seeds
  misc_feature: MA Experiment ID: 20000495 Result: Down-regulated in Transcription
  misc_feature: MA Experiment 20000495 PARAMETER Experiment Name: At_Guard_Cells_P Parameter: Harvest Date Value: 8/2/2002
  misc_feature: MA Experiment 20000495 PARAMETER Experiment Name: At_Guard_Cells_P Parameter: Organism Value: A. thaliana
  misc_feature: MA Experiment 20000495 PARAMETER Experiment Name: At_Guard_Cells_P Parameter: Tissue Value: Guard Cells vs. Leaves
atggctgcgatcactgagatggccactgattcaaatgacgtaatcaacgatggtggaactggagacggaattgagaagagcacggattctaaaccggaaatcgaatcggatgacctcaaacccaaatccaaaccggaatatgatcaaatgaagaagcttgttgccatgttcaagaaactcaatcctgaagctaaggagtttttcccttcttacaagaggaatactaatcagtctgacgattttgtgattgctataaagccatctggtgaagacaacaaaaaggttgccattaaccggaggagaagaaacaactataaccaagggaggagagtgaggttacctggaagagcttctaaggctcaaagagaagatagtattagaagaacagtgtatgtctctgacattgatcagagtgtgactgaggaaggccttgctggcttgttcagcagctgtggacaagttgttgattgtcgaatctgcggggatccgaattcagttcttcgctttgcgtttgttgagttttctgatgaccaaggtgcacgatcggctttaagtcttggtggaacaatgatcggatattacccagttagagtcttaccttcaaaaactgctattcttccagtgaatcccacatttctccccaggtcagaagatgaaagagagatgtgttcaaggaccatctactgcacaaatgttgacaagaatgccactgaagatgatgtcaataccttctttcagtctgcctgcggtgaggttactcgcttaaggcttcttggtgaccaagtgcattctactcgcatagcttttgttgaatttgccatggcagagagtgcagttgcagcgctaaactgcagcggaatagtcttaggatctcagccgataagggtaagcccttcaaagacaccagtgagatcgcgaatcactcgatcaccatcgccaaactag

SEQ ID NO: 83626 - protein, 314 aa, Arabidopsis thaliana
  peptide (1)..(314): Ceres Seq. ID no. 12671145
  misc_feature (130)..(198): Pfam Name: RNA recognition motif. (a.k.a. RRM, RBD, or RNP domain) Pfam Description: RNA recognition motif. (a.k.a. RRM, RBD, or RNP
  misc_feature (1)..(314): Homolog of NCBI NO: 15220902 NR Description: RNA-binding protein, putative; protein id:
  misc_feature (56)..(296): Homolog of NCBI NO: 8671859 NR Description: Contains similarity to RNA-binding protein from thaliana gi|2129727 and contains RNA recognition PF|00076 domain.
  misc_feature (1)..(314): Homolog of NCBI NO: 15231858 NR Description: RNA-binding protein, putative; protein id:
  misc_feature (50)..(311): Homolog of NCBI NO: 15223304 NR Description: RNA-binding protein, putative; protein id: supported by cDNA: 40998., supported by cDNA: gi_14030686
  misc_feature (50)..(306): Homolog of NCBI NO: 15235177 NR Description: RNA-binding protein RBP37; protein id: supported by cDNA: 2343., supported by cDNA: gi_1174152,
  misc_feature (50)..(306): Homolog of NCBI NO: 1174153 NR Description: RNA-binding protein
  misc_feature (49)..(310): Homolog of NCBI NO: 15229132 NR Description: RNA-binding protein, putative; protein id:
  misc_feature (116)..(311): Homolog of NCBI NO: 14030687 NR Description: At1g32790 [Arabidopsis thaliana]
  misc_feature (7)..(304): Homolog of NCBI NO: 15238531 NR Description: RNA-binding protein, putative; protein id:
  misc_feature (46)..(294): Homolog of NCBI NO: 34903832 NR Description: ATT4F9_7(AL049523|pid:g4539439) Arabidopsis
MAAITEMATDSNDVINDGGTGDGIEKSTDSKPEIESDDLKPKSKPEYDQMKKLVAMFKKLNPEAKEFFPSYKRNTNQSDDFVIAIKPSGEDNKKVAINRRRRNNYNQGRRVRLPGRASKAQREDSIRRTVYVSDIDQSVTEEGLAGLFSSCGQVVDCRICGDPNSVLRFAFVEFSDDQGARSALSLGGTMIGYYPVRVLPSKTAILPVNPTFLPRSEDEREMCSRTIYCTNVDKNATEDDVNTFFQSACGEVTRLRLLGDQVHSTRIAFVEFAMAESAVAALNCSGIVLGSQPIRVSPSKTPVRSRITRSPSPN

SEQ ID NO: 83627 - protein, 308 aa, Arabidopsis thaliana
  peptide (1)..(308): Ceres Seq. ID no. 12671146
  misc_feature (124)..(192): Pfam Name: RNA recognition motif. (a.k.a. RRM, RBD, or RNP domain) Pfam Description: RNA recognition motif. (a.k.a. RRM, RBD, or RNP
  misc_feature (1)..(308): Homolog of NCBI NO: 15220902 NR Description: RNA-binding protein, putative; protein id:
  misc_feature (50)..(290): Homolog of NCBI NO: 8671859 NR Description: Contains similarity to RNA-binding protein from thaliana gi|2129727 and contains RNA recognition PF|00076 domain.
  misc_feature (1)..(308): Homolog of NCBI NO: 15231858 NR Description: RNA-binding protein, putative; protein id:
  misc_feature (44)..(305): Homolog of NCBI NO: 15223304 NR Description: RNA-binding protein, putative; protein id: supported by cDNA: 40998., supported by cDNA: gi_14030686
  misc_feature (44)..(300): Homolog of NCBI NO: 15235177 NR Description: RNA-binding protein RBP37; protein id: supported by cDNA: 2343., supported by cDNA: gi_1174152,
  misc_feature (44)..(300): Homolog of NCBI NO: 1174153 NR Description: RNA-binding protein
  misc_feature (43)..(304): Homolog of NCBI NO: 15229132 NR Description: RNA-binding protein, putative; protein id:
  misc_feature (110)..(305): Homolog of NCBI NO: 14030687 NR Description: At1g32790 [Arabidopsis thaliana]
  misc_feature (1)..(298): Homolog of NCBI NO: 15238531 NR Description: RNA-binding protein, putative; protein id:
  misc_feature (40)..(288): Homolog of NCBI NO: 34903832 NR Description: ATT4F9_7(AL049523|pid:g4539439) Arabidopsis
MATDSNDVINDGGTGDGIEKSTDSKPEIESDDLKPKSKPEYDQMKKLVAMFKKLNPEAKEFFPSYKRNTNQSDDFVIAIKPSGEDNKKVAINRRRRNNYNQGRRVRLPGRASKAQREDSIRRTVYVSDIDQSVTEEGLAGLFSSCGQVVDCRICGDPNSVLRFAFVEFSDDQGARSALSLGGTMIGYYPVRVLPSKTAILPVNPTFLPRSEDEREMCSRTIYCTNVDKNATEDDVNTFFQSACGEVTRLRLLGDQVHSTRIAFVEFAMAESAVAALNCSGIVLGSQPIRVSPSKTPVRSRITRSPSPN

SEQ ID NO: 83628 - protein, 265 aa, Arabidopsis thaliana
  peptide (1)..(265): Ceres Seq. ID no. 12671147
  misc_feature (81)..(149): Pfam Name: RNA recognition motif. (a.k.a. RRM, RBD, or RNP domain) Pfam Description: RNA recognition motif. (a.k.a. RRM, RBD, or RNP
  misc_feature (1)..(265): Homolog of NCBI NO: 15220902 NR Description: RNA-binding protein, putative; protein id:
  misc_feature (7)..(247): Homolog of NCBI NO: 8671859 NR Description: Contains similarity to RNA-binding protein from thaliana gi|2129727 and contains RNA recognition PF|00076 domain.
  misc_feature (1)..(265): Homolog of NCBI NO: 15231858 NR Description: RNA-binding protein, putative; protein id:
  misc_feature (1)..(262): Homolog of NCBI NO: 15223304 NR Description: RNA-binding protein, putative; protein id: supported by cDNA: 40998., supported by cDNA: gi_14030686
  misc_feature (1)..(257): Homolog of NCBI NO: 15235177 NR Description: RNA-binding protein RBP37; protein id: supported by cDNA: 2343., supported by cDNA: gi_1174152,
  misc_feature (1)..(257): Homolog of NCBI NO: 1174153 NR Description: RNA-binding protein
  misc_feature (1)..(261): Homolog of NCBI NO: 15229132 NR Description: RNA-binding protein, putative; protein id:
  misc_feature (67)..(262): Homolog of NCBI NO: 14030687 NR Description: At1g32790 [Arabidopsis thaliana]
  misc_feature (1)..(255): Homolog of NCBI NO: 15238531 NR Description: RNA-binding protein, putative; protein id:
  misc_feature (1)..(245): Homolog of NCBI NO: 34903832 NR Description: ATT4F9_7(AL049523|pid:g4539439) Arabidopsis
MKKLVAMFKKLNPEAKEFFPSYKRNTNQSDDFVIAIKPSGEDNKKVAINRRRRNNYNQGRRVRLPGRASKAQREDSIRRTVYVSDIDQSVTEEGLAGLFSSCGQVVDCRICGDPNSVLRFAFVEFSDDQGARSALSLGGTMIGYYPVRVLPSKTAILPVNPTFLPRSEDEREMCSRTIYCTNVDKNATEDDVNTFFQSACGEVTRLRLLGDQVHSTRIAFVEFAMAESAVAALNCSGIVLGSQPIRVSPSKTPVRSRITRSPSPN

SEQ ID NO: 83629 - DNA, 1915 bp, Arabidopsis thaliana
  misc_feature (1)..(1915): Ceres Seq. ID no. 12671165
  misc_feature: MA Experiment ID: 20000234 Result: Up-regulated in Transcription
  misc_feature: MA Experiment 20000234 PARAMETER Experiment Name: At_Siliques_P Parameter: Age (day) Value: 21
  misc_feature: MA Experiment 20000234 PARAMETER Experiment Name: At_Siliques_P Parameter: Organism Value: A. thaliana
  misc_feature: MA Experiment 20000234 PARAMETER Experiment Name: At_Siliques_P Parameter: Plant Line Value: WS
  misc_feature: MA Experiment 20000234 PARAMETER Experiment Name: At_Siliques_P Parameter: Tissue Value: Less Than 5mm Siliques vs. Whole Plant
  misc_feature: MA Experiment ID: 20000794 Result: Up-regulated in Transcription
  misc_feature: MA Experiment 20000794 PARAMETER Experiment Name: At_Petals_P Parameter: Age (day) Value: 23-25 days
  misc_feature: MA Experiment 20000794 PARAMETER Experiment Name: At_Petals_P Parameter: Plant Line Value: WS
  misc_feature: MA Experiment 20000794 PARAMETER Experiment Name: At_Petals_P Parameter: Tissue Value: Petals vs. Whole plant
caaaagaaacagaacaacaatggcgaaattaaatcgttccaacattggtctctcactgttactatctatgttcctcgcaaactttatcaccgatcttgaagcttcttctcatcaagatctcaaccaaccgtaccggaccggttatcactttcaacctctcaaaaattggatgaacgatcctaatggaccaatgatatacaaaggaatataccatcttttttaccaatataacccatacggtgccgtttgggatgtgagaatcgtgtggggacactccacgtcagttgacttagtcaactggatttcacaacctccagcttttaatccatctcagccgtcagatatcaacggttgttggtcaggctccgtcacgattctaccaaacggcaaacctgtgatcctctacaccggcattgaccaaaacaaaggtcaagtccaaaacgtcgccgttccggttaacatctctgatccttatctccgagaatggtcaaaaccgccgcaaaatcctctaatgacaactaacgcggttaacggaattaacccggaccggtttcgtgatccgaccaccgcgtggcttggacgtgacggagaatggcgagtaatcgtcggaagctcgacggacgatcgacgaggattagcgattctttacaaaagcagagatttcttcaactggacgcaatcaatgaagcctttacattacgaagacttaaccggaatgtgggaatgtcctgattttttcccggtttcgataaccggatcggacggtgtagaaacgtcgtcggttggtgagaatgggattaagcatgtgcttaaagtgagtttgattgagacattgcatgattattacacgattgggagttatgatcgtgagaaagatgtttacgtaccggatcttgggtttgtgcaaaacgaatcagctccgaggttagattacgggaaatattacgcgtcgaaaacgttttacgatgatgttaaaaaacgaaggatcttgtggggttgggttaatgaatcgtctccagctaaagatgatattgagaagggttggtctggtcttcagtcatttccgaggaaaatatggctcgatgaatcaggaaaggaattgctacagtggccgattgaagagattgagacattgcgtgggcaacaagtcaactggcaaaagaaagttctcaaagcaggatctactctccaagttcatggtgtcactgctgcgcaggcagatgttgaggtatcgttcaaggtgaaggaattggaaaaggcggatgtgattgaaccgagttggaccgatccacaaaagatatgtagtcagggagatttatcggttatgtcgggtttaggaccatttggtttgatggttttggcatccaatgacatggaagagtacacgtccgtttacttcagaattttcaagtcaaatgacgatactaacaagaagactaaatacgtggtgttgatgtgcagtgaccaaagcagatcatcgttaaatgatgaaaatgataaatcaacctttggtgcttttgttgcgatagacccttctcaccaaacaatttctcttaggactttgattgatcactcgatagtggagagttatggtggaggaggcagaacatgtataacctcaagagtgtatccaaaattggcaatcggagaaaatgcaaatctgtttgtcttcaacaaaggcactcaaagtgttgatatcttgaccctaagtgcttggagtttaaagtctgctcaaatcaatggcgacttaatgtcaccatttattgagcgtgaagagtcacgctcacctaatcatcagttttgaatgaaaaatattttacattgtacgggtaaaacgaaatatataagagattattacatattaagagatattaacattcttattttaccattcacttccaaatttgaagatttt

SEQ ID NO: 83630 - protein, 600 aa, Arabidopsis thaliana
  peptide (1)..(600): Ceres Seq. ID no. 12671166
  misc_feature (49)..(534): Pfam Name: Glycosyl hydrolases family 32 Pfam Description: Glycosyl hydrolases family 32
  misc_feature (7)..(580): Homolog of NCBI NO: 18400170 NR Description: glycosyl hydrolase family 32; protein id: supported by cDNA: gi_15027838, supported by cDNA: gi_19310844
  misc_feature (7)..(580): Homolog of NCBI NO: 9294027 NR Description: beta-fructofuranosidase (EC 3.2.1.26)
  misc_feature (7)..(577): Homolog of NCBI NO: 15231374 NR Description: glycosyl hydrolase family 32; protein id:
  misc_feature (26)..(580): Homolog of NCBI NO: 4205115 NR Description: cell wall invertase precursor [Fragaria x
  misc_feature (20)..(587): Homolog of NCBI NO: 7435485 NR Description: beta-fructofuranosidase (EC 3.2.1.26) - garden pea
  misc_feature (19)..(579): Homolog of NCBI NO: 21322514 NR Description: exocellular acid invertase 1 [Beta vulgaris]
  misc_feature (34)..(583): Homolog of NCBI NO: 7435477 NR Description: beta-fructofuranosidase (EC 3.2.1.26), cell wall
  misc_feature (44)..(580): Homolog of NCBI NO: 30024213 NR Description: fructan 1-exohydrolase w1 precursor [Triticum
  misc_feature (45)..(579): Homolog of NCBI NO: 480998 NR Description: beta-fructofuranosidase (EC 3.2.1.26) isozyme I
  misc_feature (45)..(579): Homolog of NCBI NO: 12644356 NR Description: Beta-fructofuranosidase, soluble isoenzyme I
KRNRTTMAKLNRSNIGLSLLLSMFLANFITDLEASSHQDLNQPYRTGYHFQPLKNWMNDPNGPMIYKGIYHLFYQYNPYGAVWDVRIVWGHSTSVDLVNWISQPPAFNPSQPSDINGCWSGSVTILPNGKPVILYTGIDQNKGQVQNVAVPVNISDPYLREWSKPPQNPLMTTNAVNGINPDRFRDPTTAWLGRDGEWRVIVGSSTDDRRGLAILYKSRDFFNWTQSMKPLHYEDLTGMWECPDFFPVSITGSDGVETSSVGENGIKHVLKVSLIETLHDYYTIGSYDREKDVYVPDLGFVQNESAPRLDYGKYYASKTFYDDVKKRRILWGWVNESSPAKDDIEKGWSGLQSFPRKIWLDESGKELLQWPIEEIETLRGQQVNWQKKVLKAGSTLQVHGVTAAQADVEVSFKVKELEKADVIEPSWTDPQKICSQGDLSVMSGLGPFGLMVLASNDMEEYTSVYFRIFKSNDDTNKKTKYVVLMCSDQSRSSLNDENDKSTFGAFVAIDPSHQTISLRTLIDHSIVESYGGGGRTCITSRVYPKLAIGENANLFVFNKGTQSVDILTLSAWSLKSAQINGDLMSPFIEREESRSPNHQF

SEQ ID NO: 83631 - protein, 594 aa, Arabidopsis thaliana
  peptide (1)..(594): Ceres Seq. ID no. 12671167
  misc_feature (43)..(528): Pfam Name: Glycosyl hydrolases family 32 Pfam Description: Glycosyl hydrolases family 32
  misc_feature (1)..(574): Homolog of NCBI NO: 18400170 NR Description: glycosyl hydrolase family 32; protein id: supported by cDNA: gi_15027838, supported by cDNA: gi_19310844
  misc_feature (1)..(574): Homolog of NCBI NO: 9294027 NR Description: beta-fructofuranosidase (EC 3.2.1.26)
  misc_feature (1)..(571): Homolog of NCBI NO: 15231374 NR Description: glycosyl hydrolase family 32; protein id:
  misc_feature (20)..(574): Homolog of NCBI NO: 4205115 NR Description: cell wall invertase precursor [Fragaria x
  misc_feature (14)..(581): Homolog of NCBI NO: 7435485 NR Description: beta-fructofuranosidase (EC 3.2.1.26) - garden pea
  misc_feature (13)..(573): Homolog of NCBI NO: 21322514 NR Description: exocellular acid invertase 1 [Beta vulgaris]
  misc_feature (28)..(577): Homolog of NCBI NO: 7435477 NR Description: beta-fructofuranosidase (EC 3.2.1.26), cell wall
  misc_feature (38)..(574): Homolog of NCBI NO: 30024213 NR Description: fructan 1-exohydrolase w1 precursor [Triticum
  misc_feature (39)..(573): Homolog of NCBI NO: 480998 NR Description: beta-fructofuranosidase (EC 3.2.1.26) isozyme I
  misc_feature (39)..(573): Homolog of NCBI NO: 12644356 NR Description: Beta-fructofuranosidase, soluble isoenzyme I
MAKLNRSNIGLSLLLSMFLANFITDLEASSHQDLNQPYRTGYHFQPLKNWMNDPNGPMIYKGIYHLFYQYNPYGAVWDVRIVWGHSTSVDLVNWISQPPAFNPSQPSDINGCWSGSVTILPNGKPVILYTGIDQNKGQVQNVAVPVNISDPYLREWSKPPQNPLMTTNAVNGINPDRFRDPTTAWLGRDGEWRVIVGSSTDDRRGLAILYKSRDFFNWTQSMKPLHYEDLTGMWECPDFFPVSITGSDGVETSSVGENGIKHVLKVSLIETLHDYYTIGSYDREKDVYVPDLGFVQNESAPRLDYGKYYASKTFYDDVKKRRILWGWVNESSPAKDDIEKGWSGLQSFPRKIWLDESGKELLQWPIEEIETLRGQQVNWQKKVLKAGSTLQVHGVTAAQADVEVSFKVKELEKADVIEPSWTDPQKICSQGDLSVMSGLGPFGLMVLASNDMEEYTSVYFRIFKSNDDTNKKTKYVVLMCSDQSRSSLNDENDKSTFGAFVAIDPSHQTISLRTLIDHSIVESYGGGGRTCITSRVYPKLAIGENANLFVFNKGTQSVDILTLSAWSLKSAQINGDLMSPFIEREESRSPNHQF

SEQ ID NO: 83632 - protein, 578 aa, Arabidopsis thaliana
  peptide (1)..(578): Ceres Seq. ID no. 12671168
  misc_feature (27)..(512): Pfam Name: Glycosyl hydrolases family 32 Pfam Description: Glycosyl hydrolases family 32
  misc_feature (1)..(558): Homolog of NCBI NO: 18400170 NR Description: glycosyl hydrolase family 32; protein id: supported by cDNA: gi_15027838, supported by cDNA: gi_19310844
  misc_feature (1)..(558): Homolog of NCBI NO: 9294027 NR Description: beta-fructofuranosidase (EC 3.2.1.26)
  misc_feature (1)..(555): Homolog of NCBI NO: 15231374 NR Description: glycosyl hydrolase family 32; protein id:
  misc_feature (4)..(558): Homolog of NCBI NO: 4205115 NR Description: cell wall invertase precursor [Fragaria x
  misc_feature (1)..(565): Homolog of NCBI NO: 7435485 NR Description: beta-fructofuranosidase (EC 3.2.1.26) - garden pea
  misc_feature (1)..(557): Homolog of NCBI NO: 21322514 NR Description: exocellular acid invertase 1 [Beta vulgaris]
  misc_feature (12)..(561): Homolog of NCBI NO: 7435477 NR Description: beta-fructofuranosidase (EC 3.2.1.26), cell wall
  misc_feature (22)..(558): Homolog of NCBI NO: 30024213 NR Description: fructan 1-exohydrolase w1 precursor [Triticum
  misc_feature (23)..(557): Homolog of NCBI NO: 480998 NR Description: beta-fructofuranosidase (EC 3.2.1.26) isozyme I
  misc_feature (23)..(557): Homolog of NCBI NO: 12644356 NR Description: Beta-fructofuranosidase, soluble isoenzyme I
MFLANFITDLEASSHQDLNQPYRTGYHFQPLKNWMNDPNGPMIYKGIYHLFYQYNPYGAVWDVRIVWGHSTSVDLVNWISQPPAFNPSQPSDINGCWSGSVTILPNGKPVILYTGIDQNKGQVQNVAVPVNISDPYLREWSKPPQNPLMTTNAVNGINPDRFRDPTTAWLGRDGEWRVIVGSSTDDRRGLAILYKSRDFFNWTQSMKPLHYEDLTGMWECPDFFPVSITGSDGVETSSVGENGIKHVLKVSLIETLHDYYTIGSYDREKDVYVPDLGFVQNESAPRLDYGKYYASKTFYDDVKKRRILWGWVNESSPAKDDIEKGWSGLQSFPRKIWLDESGKELLQWPIEEIETLRGQQVNWQKKVLKAGSTLQVHGVTAAQADVEVSFKVKELEKADVIEPSWTDPQKICSQGDLSVMSGLGPFGLMVLASNDMEEYTSVYFRIFKSNDDTNKKTKYVVLMCSDQSRSSLNDENDKSTFGAFVAIDPSHQTISLRTLIDHSIVESYGGGGRTCITSRVYPKLAIGENANLFVFNKGTQSVDILTLSAWSLKSAQINGDLMSPFIEREESRSPNHQF

SEQ ID NO: 83633 - DNA, 1254 bp, Arabidopsis thaliana
  misc_feature (1)..(1254): Ceres Seq. ID no. 12671197
  misc_feature: MA Experiment ID: 108462 Result: Up-regulated in Transcription
  misc_feature: MA Experiment 108462 PARAMETER Experiment Name: At_Germinating_Seeds_cDNA_P Parameter: Age (day) Value: 2 vs. 0
  misc_feature: MA Experiment 108462 PARAMETER Experiment Name: At_Germinating_Seeds_cDNA_P Parameter: Tissue Value: Germinating Seeds
  misc_feature: MA Experiment ID: 108463 Result: Up-regulated in Transcription
  misc_feature: MA Experiment 108463 PARAMETER Experiment Name: At_Germinating_Seeds_cDNA_P Parameter: Age (day) Value: 3 vs. 0
  misc_feature: MA Experiment 108463 PARAMETER Experiment Name: At_Germinating_Seeds_cDNA_P Parameter: Tissue Value: Germinating Seeds
  misc_feature: MA Experiment ID: 108488 Result: Down-regulated in Transcription
  misc_feature: MA Experiment ID: 108561 Result: Up-regulated in Transcription
  misc_feature: MA Experiment 108561 PARAMETER Experiment Name: At_100uM_ABA_cDNA_P Parameter: Timepoint (hr) Value: 6
  misc_feature: MA Experiment 108561 PARAMETER Experiment Name: At_100uM_ABA_cDNA_P Parameter: Tissue Value: Aerial
  misc_feature: MA Experiment 108561 PARAMETER Experiment Name: At_100uM_ABA_cDNA_P Parameter: Treatment Value: 100uM ABA vs. No Treatment
  misc_feature: MA Experiment ID: 108573 Result: Up-regulated in Transcription
  misc_feature: MA Experiment 108573 PARAMETER Experiment Name: At_Drought_cDNA_P Parameter: Timepoint (hr) Value: 6
  misc_feature: MA Experiment 108573 PARAMETER Experiment Name: At_Drought_cDNA_P Parameter: Tissue Value: Aerial
  misc_feature: MA Experiment 108573 PARAMETER Experiment Name: At_Drought_cDNA_P Parameter: Treatment Value: Drought vs. No Drought
  misc_feature: MA Experiment ID: 108577 Result: Down-regulated in Transcription
  misc_feature: MA Experiment 108577 PARAMETER Experiment Name: At_42deg_Heat_cDNA_P Parameter: Temperature (deg C) Value: 42 vs. 22
  misc_feature: MA Experiment 108577 PARAMETER Experiment Name: At_42deg_Heat_cDNA_P Parameter: Timepoint (hr) Value: 6
  misc_feature: MA Experiment 108577 PARAMETER Experiment Name: At_42deg_Heat_cDNA_P Parameter: Tissue Value: Aerial
  misc_feature: MA Experiment ID: 108605 Result: Up-regulated in Transcription
  misc_feature: MA Experiment 108605 PARAMETER Experiment Name: At_100uM_ABA_cDNA_P Parameter: Timepoint (hr) Value: 6
  misc_feature: MA Experiment 108605 PARAMETER Experiment Name: At_100uM_ABA_cDNA_P Parameter: Tissue Value: Aerial
  misc_feature: MA Experiment 108605 PARAMETER Experiment Name: At_100uM_ABA_cDNA_P Parameter: Treatment Value: 100uM ABA vs. No Treatment
  misc_feature: MA Experiment ID: 108607 Result: Up-regulated in Transcription
  misc_feature: MA Experiment 108607 PARAMETER Experiment Name: At_100uM_ABA_cDNA_P Parameter: Timepoint (hr) Value: 4
  misc_feature: MA Experiment 108607 PARAMETER Experiment Name: At_100uM_ABA_cDNA_P Parameter: Tissue Value: Aerial
  misc_feature: MA Experiment 108607 PARAMETER Experiment Name: At_100uM_ABA_cDNA_P Parameter: Treatment Value: 100uM ABA vs. No Treatment
  misc_feature: MA Experiment ID: 108609 Result: Up-regulated in Transcription
  misc_feature: MA Experiment 108609 PARAMETER Experiment Name: At_100uM_ABA_cDNA_P Parameter: Timepoint (hr) Value: 24
  misc_feature: MA Experiment 108609 PARAMETER Experiment Name: At_100uM_ABA_cDNA_P Parameter: Tissue Value: Aerial
  misc_feature: MA Experiment 108609 PARAMETER Experiment Name: At_100uM_ABA_cDNA_P Parameter: Treatment Value: 100uM ABA vs. No Treatment
  misc_feature: MA Experiment ID: 20000068 Result: Down-regulated in Transcription
  misc_feature: MA Experiment ID: 20000069 Result: Up-regulated in Transcription
  misc_feature: MA Experiment 20000069 PARAMETER Experiment Name: At_100uM_ABA_Mutants_cDNA_P Parameter: Plant Line Value: CS23
  misc_feature: MA Experiment 20000069 PARAMETER Experiment Name: At_100uM_ABA_Mutants_cDNA_P Parameter: Timepoint (hr) Value: 6
  misc_feature: MA Experiment 20000069 PARAMETER Experiment Name: At_100uM_ABA_Mutants_cDNA_P Parameter: Tissue Value: Aerial
  misc_feature: MA Experiment 20000069 PARAMETER Experiment Name: At_100uM_ABA_Mutants_cDNA_P Parameter: Treatment Value: 100uM ABA vs. No Treatment
  misc_feature: MA Experiment ID: 20000070 Result: Up-regulated in Transcription
  misc_feature: MA Experiment 20000070 PARAMETER Experiment Name: At_100uM_ABA_Mutants_cDNA_P Parameter: Plant Line Value: CS24
  misc_feature: MA Experiment 20000070 PARAMETER Experiment Name: At_100uM_ABA_Mutants_cDNA_P Parameter: Timepoint (hr) Value: 6
  misc_feature: MA Experiment 20000070 PARAMETER Experiment Name: At_100uM_ABA_Mutants_cDNA_P Parameter: Tissue Value: Aerial
  misc_feature: MA Experiment 20000070 PARAMETER Experiment Name: At_100uM_ABA_Mutants_cDNA_P Parameter: Treatment Value: 100uM ABA vs. No Treatment
  misc_feature: MA Experiment ID: 20000071 Result: Up-regulated in Transcription
  misc_feature: MA Experiment 20000071 PARAMETER Experiment Name: At_100uM_ABA_Mutants_cDNA_P Parameter: Plant Line Value: CS8104
  misc_feature: MA Experiment 20000071 PARAMETER Experiment Name: At_100uM_ABA_Mutants_cDNA_P Parameter: Timepoint (hr) Value: 6
  misc_feature: MA Experiment 20000071 PARAMETER Experiment Name: At_100uM_ABA_Mutants_cDNA_P Parameter: Tissue Value: Aerial
  misc_feature: MA Experiment 20000071 PARAMETER Experiment Name: At_100uM_ABA_Mutants_cDNA_P Parameter: Treatment Value: 100uM ABA vs. No Treatment
  misc_feature: MA Experiment ID: 20000072 Result: Up-regulated in Transcription
  misc_feature: MA Experiment 20000072 PARAMETER Experiment Name: At_100uM_ABA_Mutants_cDNA_P Parameter: Plant Line Value: CS8105
  misc_feature: MA Experiment 20000072 PARAMETER Experiment Name: At_100uM_ABA_Mutants_cDNA_P Parameter: Timepoint (hr) Value: 6
  misc_feature: MA Experiment 20000072 PARAMETER Experiment Name: At_100uM_ABA_Mutants_cDNA_P Parameter: Tissue Value: Aerial
  misc_feature: MA Experiment 20000072 PARAMETER Experiment Name: At_100uM_ABA_Mutants_cDNA_P Parameter: Treatment Value: 100uM ABA vs. No Treatment
  misc_feature: MA Experiment ID: 20000086 Result: Up-regulated in Transcription
  misc_feature: MA Experiment 20000086 PARAMETER Experiment Name: At_100uM_ABA_Mutants_cDNA_P Parameter: Plant Line Value: CS22
  misc_feature: MA Experiment 20000086 PARAMETER Experiment Name: At_100uM_ABA_Mutants_cDNA_P Parameter: Timepoint (hr) Value: 6
  misc_feature: MA Experiment 20000086 PARAMETER Experiment Name: At_100uM_ABA_Mutants_cDNA_P Parameter: Tissue Value: Aerial
  misc_feature: MA Experiment 20000086 PARAMETER Experiment Name: At_100uM_ABA_Mutants_cDNA_P Parameter: Treatment Value: 100uM ABA vs. No Treatment
  misc_feature: MA Experiment ID: 20000087 Result: Up-regulated in Transcription
  misc_feature: MA Experiment 20000087 PARAMETER Experiment Name: At_100uM_ABA_Mutants_cDNA_P Parameter: Plant Line Value: WS
  misc_feature: MA Experiment 20000087 PARAMETER Experiment Name: At_100uM_ABA_Mutants_cDNA_P Parameter: Timepoint (hr) Value: 6
  misc_feature: MA Experiment 20000087 PARAMETER Experiment Name: At_100uM_ABA_Mutants_cDNA_P Parameter: Tissue Value: Aerial
  misc_feature: MA Experiment 20000087 PARAMETER Experiment Name: At_100uM_ABA_Mutants_cDNA_P Parameter: Treatment Value: 100uM ABA vs. No Treatment
  misc_feature: MA Experiment ID: 20000088 Result: Up-regulated in Transcription
  misc_feature: MA Experiment 20000088 PARAMETER Experiment Name: At_100uM_ABA_Mutants_cDNA_P Parameter: Plant Line Value: Landsberg
  misc_feature: MA Experiment 20000088 PARAMETER Experiment Name: At_100uM_ABA_Mutants_cDNA_P Parameter: Timepoint (hr) Value: 6
  misc_feature: MA Experiment 20000088 PARAMETER Experiment Name: At_100uM_ABA_Mutants_cDNA_P Parameter: Tissue Value: Aerial
  misc_feature: MA Experiment 20000088 PARAMETER Experiment Name: At_100uM_ABA_Mutants_cDNA_P Parameter: Treatment Value: 100uM ABA vs. No Treatment
  misc_feature: MA Experiment ID: 20000089 Result: Up-regulated in Transcription
  misc_feature: MA Experiment ID: 20000113 Result: Down-regulated in Transcription
  misc_feature: MA Experiment 20000113 PARAMETER Experiment Name: At_42deg_Heat_cDNA_P Parameter: Temperature (deg C) Value: 42 vs. 22
  misc_feature: MA Experiment 20000113 PARAMETER Experiment Name: At_42deg_Heat_cDNA_P Parameter: Timepoint (hr) Value: 8
  misc_feature: MA Experiment 20000113 PARAMETER Experiment Name: At_42deg_Heat_cDNA_P Parameter: Tissue Value: Aerial
  misc_feature: MA Experiment ID: 20000117 Result: Up-regulated in Transcription
  misc_feature: MA Experiment 20000117 PARAMETER Experiment Name: At_100uM_ABA_Mutants_cDNA_P Parameter: Plant Line Value: Columbia
  misc_feature: MA Experiment 20000117 PARAMETER Experiment Name: At_100uM_ABA_Mutants_cDNA_P Parameter: Timepoint (hr) Value: 6
  misc_feature: MA Experiment 20000117 PARAMETER Experiment Name: At_100uM_ABA_Mutants_cDNA_P Parameter: Tissue Value: Aerial
  misc_feature: MA Experiment 20000117 PARAMETER Experiment Name: At_100uM_ABA_Mutants_cDNA_P Parameter: Treatment Value: 100uM ABA vs. No Treatment
  misc_feature: MA Experiment ID: 20000169 Result: Up-regulated in Transcription
  misc_feature: MA Experiment 20000169 PARAMETER Experiment Name: At_100uM_ABA_P Parameter: Age (day) Value: 14
  misc_feature: MA Experiment 20000169 PARAMETER Experiment Name: At_100uM_ABA_P Parameter: Organism Value: A. thaliana
  misc_feature: MA Experiment 20000169 PARAMETER Experiment Name: At_100uM_ABA_P Parameter: Plant Line Value: WS
  misc_feature: MA Experiment 20000169 PARAMETER Experiment Name: At_100uM_ABA_P Parameter: Timepoint (hr) Value: 6
  misc_feature: MA Experiment 20000169 PARAMETER Experiment Name: At_100uM_ABA_P Parameter: Tissue Value: Aerial
  misc_feature: MA Experiment 20000169 PARAMETER Experiment Name: At_100uM_ABA_P Parameter: Treatment Value: 100uM ABA vs. No Treatment
  misc_feature: MA Experiment ID: 20000173 Result: Down-regulated in Transcription
  misc_feature: MA Experiment 20000173 PARAMETER Experiment Name: At_42deg_Heat_P Parameter: Age (day) Value: 14
  misc_feature: MA Experiment 20000173 PARAMETER Experiment Name: At_42deg_Heat_P Parameter: Organism Value: A. thaliana
  misc_feature: MA Experiment 20000173 PARAMETER Experiment Name: At_42deg_Heat_P Parameter: Plant Line Value: WS
  misc_feature: MA Experiment 20000173 PARAMETER Experiment Name: At_42deg_Heat_P Parameter: Temperature (deg C) Value: 42 vs. 22
  misc_feature: MA Experiment 20000173 PARAMETER Experiment Name: At_42deg_Heat_P Parameter: Timepoint (hr) Value: 6
  misc_feature: MA Experiment 20000173 PARAMETER Experiment Name: At_42deg_Heat_P Parameter: Tissue Value: Aerial
  misc_feature: MA Experiment ID: 20000185 Result: Up-regulated in Transcription
  misc_feature: MA Experiment 20000185 PARAMETER Experiment Name: At_Roots__P Parameter: Age (day) Value: 7 vs. 21
  misc_feature: MA Experiment 20000185 PARAMETER Experiment Name: At_Roots__P Parameter: Organism Value: A. thaliana
  misc_feature: MA Experiment 20000185 PARAMETER Experiment Name: At_Roots__P Parameter: Tissue Value: Roots vs. Whole Plant
  misc_feature: MA Experiment ID: 20000227 Result: Up-regulated in Transcription
  misc_feature: MA Experiment 20000227 PARAMETER Experiment Name: At_Root-Tips-vs-Tops_P Parameter: Tissue Value: Root Tips vs. Root Tops
  misc_feature: MA Experiment ID: 20000264 Result: Up-regulated in Transcription
  misc_feature: MA Experiment 20000264 PARAMETER Experiment Name: At_Open_Flower_P Parameter: Age (day) Value: 21
  misc_feature: MA Experiment 20000264 PARAMETER Experiment Name: At_Open_Flower_P Parameter: Plant Line Value: WS
  misc_feature: MA Experiment 20000264 PARAMETER Experiment Name: At_Open_Flower_P Parameter: Tissue Value: Open Flower vs. Whole Plant
  misc_feature: MA Experiment ID: 20000267 Result: Up-regulated in Transcription
  misc_feature: MA Experiment 20000267 PARAMETER Experiment Name: At_Drought_P Parameter: Age (day) Value: 7
  misc_feature: MA Experiment 20000267 PARAMETER Experiment Name: At_Drought_P Parameter: Organism Value: A. thaliana
  misc_feature: MA Experiment 20000267 PARAMETER Experiment Name: At_Drought_P Parameter: Plant Line Value: WS
  misc_feature: MA Experiment 20000267 PARAMETER Experiment Name: At_Drought_P Parameter: Timepoint (hr) Value: 6
  misc_feature: MA Experiment 20000267 PARAMETER Experiment Name: At_Drought_P Parameter: Tissue Value: Whole Plant
  misc_feature: MA Experiment 20000267 PARAMETER Experiment Name: At_Drought_P Parameter: Treatment Value: Drought vs. No Drought
  misc_feature: MA Experiment ID: 20000268 Result: Up-regulated in Transcription
  misc_feature: MA Experiment 20000268 PARAMETER Experiment Name: At_100mM_NaCl__P Parameter: Age (day) Value: 14
  misc_feature: MA Experiment 20000268 PARAMETER Experiment Name: At_100mM_NaCl__P Parameter: Organism Value: A. thaliana
  misc_feature: MA Experiment 20000268 PARAMETER Experiment Name: At_100mM_NaCl__P Parameter: Plant Line Value: WS
  misc_feature: MA Experiment 20000268 PARAMETER Experiment Name: At_100mM_NaCl__P Parameter: Timepoint (hr) Value: 6
  misc_feature: MA Experiment 20000268 PARAMETER Experiment Name: At_100mM_NaCl__P Parameter: Tissue Value: Whole Plant
  misc_feature: MA Experiment 20000268 PARAMETER Experiment Name: At_100mM_NaCl__P Parameter: Treatment Value: 100mM NaCl vs. No Treatment
  misc_feature: MA Experiment ID: 20000286 Result: Up-regulated in Transcription
  misc_feature: MA Experiment 20000286 PARAMETER Experiment Name: At_Open_Flower_P Parameter: Age (day) Value: 21
  misc_feature: MA Experiment 20000286 PARAMETER Experiment Name: At_Open_Flower_P Parameter: Plant Line Value: WS
  misc_feature: MA Experiment 20000286 PARAMETER Experiment Name: At_Open_Flower_P Parameter: Tissue Value: Half Open vs. Whole Plant
  misc_feature: MA Experiment ID: 20000436 Result: Up-regulated in Transcription
  misc_feature: MA Experiment 20000436 PARAMETER Experiment Name: At_Drought_P Parameter: Age (day) Value: 7
  misc_feature: MA Experiment 20000436 PARAMETER Experiment Name: At_Drought_P Parameter: Organism Value: A. thaliana
  misc_feature: MA Experiment 20000436 PARAMETER Experiment Name: At_Drought_P Parameter: Plant Line Value: WS
  misc_feature: MA Experiment 20000436 PARAMETER Experiment Name: At_Drought_P Parameter: Timepoint (hr) Value: 12
  misc_feature: MA Experiment 20000436 PARAMETER Experiment Name: At_Drought_P Parameter: Tissue Value: Whole Plant
  misc_feature: MA Experiment 20000436 PARAMETER Experiment Name: At_Drought_P Parameter: Treatment Value: Drought vs. No Drought
  misc_feature: MA Experiment ID: 20000437 Result: Up-regulated in Transcription
  misc_feature: MA Experiment 20000437 PARAMETER Experiment Name: At_Drought_P Parameter: Age (day) Value: 8
  misc_feature: MA Experiment 20000437 PARAMETER Experiment Name: At_Drought_P Parameter: Organism Value: A. thaliana
  misc_feature: MA Experiment 20000437 PARAMETER Experiment Name: At_Drought_P Parameter: Plant Line Value: WS
  misc_feature: MA Experiment 20000437 PARAMETER Experiment Name: At_Drought_P Parameter: Timepoint (hr) Value: 24
  misc_feature: MA Experiment 20000437 PARAMETER Experiment Name: At_Drought_P Parameter: Tissue Value: Whole Plant
  misc_feature: MA Experiment 20000437 PARAMETER Experiment Name: At_Drought_P Parameter: Treatment Value: Drought vs. No Drought
  misc_feature: MA Experiment ID: 20000453 Result: Up-regulated in Transcription
  misc_feature: MA Experiment 20000453 PARAMETER Experiment Name: At_100uM_ABA_P Parameter: Age (day) Value: 15
  misc_feature: MA Experiment 20000453 PARAMETER Experiment Name: At_100uM_ABA_P Parameter: Organism Value: A. thaliana
  misc_feature: MA Experiment 20000453 PARAMETER Experiment Name: At_100uM_ABA_P Parameter: Plant Line Value: WS
  misc_feature: MA Experiment 20000453 PARAMETER Experiment Name: At_100uM_ABA_P Parameter: Timepoint (hr) Value: 24
  misc_feature: MA Experiment 20000453 PARAMETER Experiment Name: At_100uM_ABA_P Parameter: Tissue Value: Aerial
  misc_feature: MA Experiment 20000453 PARAMETER Experiment Name: At_100uM_ABA_P Parameter: Treatment Value: 100uM ABA vs. No Treatment
  misc_feature: MA Experiment ID: 20000709 Result: Down-regulated in Transcription
  misc_feature: MA Experiment 20000709 PARAMETER Experiment Name: At_15mM_NH4NO3_L-to-H_P Parameter: Age (hr) Value: 14
  misc_feature: MA Experiment 20000709 PARAMETER Experiment Name: At_15mM_NH4NO3_L-to-H_P Parameter: Organism Value: A. thaliana
  misc_feature: MA Experiment 20000709 PARAMETER Experiment Name: At_15mM_NH4NO3_L-to-H_P Parameter: Plant Line Value: WS
  misc_feature: MA Experiment 20000709 PARAMETER Experiment Name: At_15mM_NH4NO3_L-to-H_P Parameter: Timepoint (hr) Value: 4
  misc_feature: MA Experiment 20000709 PARAMETER Experiment Name: At_15mM_NH4NO3_L-to-H_P Parameter: Tissue Value: Aerial
  misc_feature: MA Experiment 20000709 PARAMETER Experiment Name: At_15mM_NH4NO3_L-to-H_P Parameter: Treatment Value: 15mM NH4NO3 vs. 30mM Mannitol
  misc_feature: MA Experiment ID: 20000794 Result: Up-regulated in Transcription
  misc_feature: MA Experiment 20000794 PARAMETER Experiment Name: At_Petals_P Parameter: Age (day) Value: 23-25 days
  misc_feature: MA Experiment 20000794 PARAMETER Experiment Name: At_Petals_P Parameter: Plant Line Value: WS
  misc_feature: MA Experiment 20000794 PARAMETER Experiment Name: At_Petals_P Parameter: Tissue Value: Petals vs. Whole plant
  misc_feature: MA Experiment ID: 20001247 Result: Down-regulated in Transcription
  misc_feature: MA Experiment 20001247 PARAMETER Experiment Name: At_Far-red-induction_P Parameter: Age (day) Value: 7
  misc_feature: MA Experiment 20001247 PARAMETER Experiment Name: At_Far-red-induction_P Parameter: Light Value: Far-red vs. White
  misc_feature: MA Experiment 20001247 PARAMETER Experiment Name: At_Far-red-induction_P Parameter: Organism Value: A. thaliana
  misc_feature: MA Experiment 20001247 PARAMETER Experiment Name: At_Far-red-induction_P Parameter: Plant Line Value: Columbia
  misc_feature: MA Experiment 20001247 PARAMETER Experiment Name: At_Far-red-induction_P Parameter: Timepoint (hr) Value: 1
  misc_feature: MA Experiment 20001247 PARAMETER Experiment Name: At_Far-red-induction_P Parameter: Tissue Value: Whole Plant
  misc_feature: MA Experiment ID: 20001248 Result: Down-regulated in Transcription
  misc_feature: MA Experiment 20001248 PARAMETER Experiment Name: At_Far-red-induction_P Parameter: Age (day) Value: 7
  misc_feature: MA Experiment 20001248 PARAMETER Experiment Name: At_Far-red-induction_P Parameter: Light Value: Far-red vs. White
  misc_feature: MA Experiment 20001248 PARAMETER Experiment Name: At_Far-red-induction_P Parameter: Organism Value: A. thaliana
  misc_feature: MA Experiment 20001248 PARAMETER Experiment Name: At_Far-red-induction_P Parameter: Plant Line Value: Columbia
  misc_feature: MA Experiment 20001248 PARAMETER Experiment Name: At_Far-red-induction_P Parameter: Timepoint (hr) Value: 4
  misc_feature: MA Experiment 20001248 PARAMETER Experiment Name: At_Far-red-induction_P Parameter: Tissue Value: Whole Plant
  misc_feature: MA Experiment ID: 20001450 Result: Down-regulated in Transcription
  misc_feature: MA Experiment 20001450 PARAMETER Experiment Name: At_Far-red-induction_P Parameter: Age (day) Value: 7
  misc_feature: MA Experiment 20001450 PARAMETER Experiment Name: At_Far-red-induction_P Parameter: Light Value: Far-red vs. White
  misc_feature: MA Experiment 20001450 PARAMETER Experiment Name: At_Far-red-induction_P Parameter: Organism Value: A. thaliana
  misc_feature: MA Experiment 20001450 PARAMETER Experiment Name: At_Far-red-induction_P Parameter: Plant Line Value: Columbia
  misc_feature: MA Experiment 20001450 PARAMETER Experiment Name: At_Far-red-induction_P Parameter: Timepoint (hr) Value: 8
  misc_feature: MA Experiment 20001450 PARAMETER Experiment Name: At_Far-red-induction_P Parameter: Tissue Value: Whole Plant
  misc_feature: MA Experiment ID: 20001451 Result: Down-regulated in Transcription
  misc_feature: MA Experiment 20001451 PARAMETER Experiment Name: At_Far-red-induction_P Parameter: Age (day) Value: 7
  misc_feature: MA Experiment 20001451 PARAMETER Experiment Name: At_Far-red-induction_P Parameter: Light Value: Far-red vs. White
  misc_feature: MA Experiment 20001451 PARAMETER Experiment Name: At_Far-red-induction_P Parameter: Organism Value: A. thaliana
  misc_feature: MA Experiment 20001451 PARAMETER Experiment Name: At_Far-red-induction_P Parameter: Plant Line Value: Columbia
  misc_feature: MA Experiment 20001451 PARAMETER Experiment Name: At_Far-red-induction_P Parameter: Timepoint (hr) Value: 24
  misc_feature: MA Experiment 20001451 PARAMETER Experiment Name: At_Far-red-induction_P Parameter: Tissue Value: Whole Plant
  misc_feature: MA Experiment ID: 20001504 Result: Up-regulated in Transcription
  misc_feature: MA Experiment 20001504 PARAMETER Experiment Name: At_Far-red-enriched_P Parameter: Age (day) Value: 10
  misc_feature: MA Experiment 20001504 PARAMETER Experiment Name: At_Far-red-enriched_P Parameter: Light Value: Far-red enriched vs. White
  misc_feature: MA Experiment 20001504 PARAMETER Experiment Name: At_Far-red-enriched_P Parameter: Organism Value: A. thaliana
  misc_feature: MA Experiment 20001504 PARAMETER Experiment Name: At_Far-red-enriched_P Parameter: Plant Line Value: Columbia
  misc_feature: MA Experiment 20001504 PARAMETER Experiment Name: At_Far-red-enriched_P Parameter: Timepoint (day) Value: 6
  misc_feature: MA Experiment 20001504 PARAMETER Experiment Name: At_Far-red-enriched_P Parameter: Tissue Value: Whole Plant
  misc_feature: MA Experiment ID: 20001554 Result: Up-regulated in Transcription
  misc_feature: MA Experiment 20001554 PARAMETER Experiment Name: At_Drought_Soil_Dry_P Parameter: Age (day) Value: 21
  misc_feature: MA Experiment 20001554 PARAMETER Experiment Name: At_Drought_Soil_Dry_P Parameter: Organism Value: A. thaliana
  misc_feature: MA Experiment 20001554 PARAMETER Experiment Name: At_Drought_Soil_Dry_P Parameter: Plant Line Value: WS
  misc_feature: MA Experiment 20001554 PARAMETER Experiment Name: At_Drought_Soil_Dry_P Parameter: Post Timepoint (hr) Value: None
  misc_feature: MA Experiment 20001554 PARAMETER Experiment Name: At_Drought_Soil_Dry_P Parameter: Post-Treatment Value: None
  misc_feature: MA Experiment 20001554 PARAMETER Experiment Name: At_Drought_Soil_Dry_P Parameter: Timepoint (day) Value: 7
  misc_feature: MA Experiment 20001554 PARAMETER Experiment Name: At_Drought_Soil_Dry_P Parameter: Treatment Value: Drought vs. No Drought
  misc_feature: MA Experiment ID: 20001555 Result: Up-regulated in Transcription
  misc_feature: MA Experiment 20001555 PARAMETER Experiment Name: At_Drought_Soil_Dry_P Parameter: Age (day) Value: 24
  misc_feature: MA Experiment 20001555 PARAMETER Experiment Name: At_Drought_Soil_Dry_P Parameter: Organism Value: A. thaliana
  misc_feature: MA Experiment 20001555 PARAMETER Experiment Name: At_Drought_Soil_Dry_P Parameter: Plant Line Value: WS
  misc_feature: MA Experiment 20001555 PARAMETER Experiment Name: At_Drought_Soil_Dry_P Parameter: Post Timepoint (hr) Value: None
  misc_feature: MA Experiment 20001555 PARAMETER Experiment Name: At_Drought_Soil_Dry_P Parameter: Post-Treatment Value: None
  misc_feature: MA Experiment 20001555 PARAMETER Experiment Name: At_Drought_Soil_Dry_P Parameter: Timepoint (day) Value: 10
  misc_feature: MA Experiment 20001555 PARAMETER Experiment Name: At_Drought_Soil_Dry_P Parameter: Treatment Value: Drought vs. No Drought
  misc_feature: MA Experiment ID: 20001556 Result: Up-regulated in Transcription
  misc_feature: MA Experiment 20001556 PARAMETER Experiment Name: At_Drought_Soil_Dry_P Parameter: Age (day) Value: 26
  misc_feature: MA Experiment 20001556 PARAMETER Experiment Name: At_Drought_Soil_Dry_P Parameter: Organism Value: A. thaliana
  misc_feature: MA Experiment 20001556 PARAMETER Experiment Name: At_Drought_Soil_Dry_P Parameter: Plant Line Value: WS
  misc_feature: MA Experiment 20001556 PARAMETER Experiment Name: At_Drought_Soil_Dry_P Parameter: Post Timepoint (hr) Value: None
  misc_feature: MA Experiment 20001556 PARAMETER Experiment Name: At_Drought_Soil_Dry_P Parameter: Post-Treatment Value: None
  misc_feature: MA Experiment 20001556 PARAMETER Experiment Name: At_Drought_Soil_Dry_P Parameter: Timepoint (day) Value: 12
  misc_feature: MA Experiment 20001556 PARAMETER Experiment Name: At_Drought_Soil_Dry_P Parameter: Treatment Value: Drought vs. No Drought
  misc_feature: MA Experiment ID: 20001559 Result: Up-regulated in Transcription
  misc_feature: MA Experiment 20001559 PARAMETER Experiment Name: At_Drought_Soil_Dry_P Parameter: Age (day) Value: 28
  misc_feature: MA Experiment 20001559 PARAMETER Experiment Name: At_Drought_Soil_Dry_P Parameter: Organism Value: A. thaliana
  misc_feature: MA Experiment 20001559 PARAMETER Experiment Name: At_Drought_Soil_Dry_P Parameter: Plant Line Value: WS
  misc_feature: MA Experiment 20001559 PARAMETER Experiment Name: At_Drought_Soil_Dry_P Parameter: Post Timepoint (hr) Value: 29
  misc_feature: MA Experiment 20001559 PARAMETER Experiment Name: At_Drought_Soil_Dry_P Parameter: Post-Treatment Value: Re-Water vs. No Drought
  misc_feature: MA Experiment 20001559 PARAMETER Experiment Name: At_Drought_Soil_Dry_P Parameter: Timepoint (day) Value: 14
  misc_feature: MA Experiment 20001559 PARAMETER Experiment Name: At_Drought_Soil_Dry_P Parameter: Treatment Value: Drought vs. No Drought
  misc_feature: MA Experiment ID: 20001560 Result: Up-regulated in Transcription
  misc_feature: MA Experiment 20001560 PARAMETER Experiment Name: At_Drought_Soil_Dry_P Parameter: Age (day) Value: 28
  misc_feature: MA Experiment 20001560 PARAMETER Experiment Name: At_Drought_Soil_Dry_P Parameter: Organism Value: A. thaliana
  misc_feature: MA Experiment 20001560 PARAMETER Experiment Name: At_Drought_Soil_Dry_P Parameter: Plant Line Value: WS
  misc_feature: MA Experiment 20001560 PARAMETER Experiment Name: At_Drought_Soil_Dry_P Parameter: Post Timepoint (hr) Value: None
  misc_feature: MA Experiment 20001560 PARAMETER Experiment Name: At_Drought_Soil_Dry_P Parameter: Post-Treatment Value: None
  misc_feature: MA Experiment 20001560 PARAMETER Experiment Name: At_Drought_Soil_Dry_P Parameter: Timepoint (day) Value: 14
  misc_feature: MA Experiment 20001560 PARAMETER Experiment Name: At_Drought_Soil_Dry_P Parameter: Treatment Value: Drought vs. No Drought
  misc_feature: MA Experiment ID: 20001757 Result: Down-regulated in Transcription
  misc_feature: MA Experiment 20001757 PARAMETER Experiment Name: At_50mM_NH4NO3_L-to-H_P Parameter: Timepoint (hr) Value: 6
  misc_feature: MA Experiment 20001757 PARAMETER Experiment Name: At_50mM_NH4NO3_L-to-H_P Parameter: Tissue Value: Leaf
  misc_feature: MA Experiment 20001757 PARAMETER Experiment Name: At_50mM_NH4NO3_L-to-H_P Parameter: Treatment Value: 50mM NH4NO3 vs 100mM Mannitol
  misc_feature: MA Experiment ID: 20001768 Result: Up-regulated in Transcription
  misc_feature: MA Experiment 20001768 PARAMETER Experiment Name: At_Far-red-enriched-adult_P Parameter: Age (day) Value: 28
  misc_feature: MA Experiment 20001768 PARAMETER Experiment Name: At_Far-red-enriched-adult_P Parameter: Light Value: Far-red enriched vs. White
  misc_feature: MA Experiment 20001768 PARAMETER Experiment Name: At_Far-red-enriched-adult_P Parameter: Organism Value: A. thaliana
  misc_feature: MA Experiment 20001768 PARAMETER Experiment Name: At_Far-red-enriched-adult_P Parameter: Plant Line Value: Columbia
  misc_feature: MA Experiment 20001768 PARAMETER Experiment Name: At_Far-red-enriched-adult_P Parameter: Timepoint (hr) Value: 1
  misc_feature: MA Experiment 20001768 PARAMETER Experiment Name: At_Far-red-enriched-adult_P Parameter: Tissue Value: Aerial
  misc_feature: MA Experiment ID: 20001770 Result: Up-regulated in Transcription
  misc_feature: MA Experiment 20001770 PARAMETER Experiment Name: At_Far-red-enriched-adult_P Parameter: Age (day) Value: 28
  misc_feature: MA Experiment 20001770 PARAMETER Experiment Name: At_Far-red-enriched-adult_P Parameter: Light Value: Far-red enriched vs. White
  misc_feature: MA Experiment 20001770 PARAMETER Experiment Name: At_Far-red-enriched-adult_P Parameter: Organism Value: A. thaliana
  misc_feature: MA Experiment 20001770 PARAMETER Experiment Name: At_Far-red-enriched-adult_P Parameter: Plant Line Value: Columbia
  misc_feature: MA Experiment 20001770 PARAMETER Experiment Name: At_Far-red-enriched-adult_P Parameter: Timepoint (hr) Value: 8
  misc_feature: MA Experiment 20001770 PARAMETER Experiment Name: At_Far-red-enriched-adult_P Parameter: Tissue Value: Aerial
  misc_feature: MA Experiment ID: 20001771 Result: Up-regulated in Transcription
  misc_feature: MA Experiment 20001771 PARAMETER Experiment Name: At_Far-red-enriched-adult_P Parameter: Age (day) Value: 28
  misc_feature: MA Experiment 20001771 PARAMETER Experiment Name: At_Far-red-enriched-adult_P Parameter: Light Value: Far-red enriched vs. White
  misc_feature: MA Experiment 20001771 PARAMETER Experiment Name: At_Far-red-enriched-adult_P Parameter: Organism Value: A. thaliana
  misc_feature: MA Experiment 20001771 PARAMETER Experiment Name: At_Far-red-enriched-adult_P Parameter: Plant Line Value: Columbia
  misc_feature: MA Experiment 20001771 PARAMETER Experiment Name: At_Far-red-enriched-adult_P Parameter: Timepoint (hr) Value: 16
  misc_feature: MA Experiment 20001771 PARAMETER Experiment Name: At_Far-red-enriched-adult_P Parameter: Tissue Value: Aerial
  misc_feature: MA Experiment ID: 20001773 Result: Up-regulated in Transcription
  misc_feature: MA Experiment 20001773 PARAMETER Experiment Name: At_Far-red-enriched-adult_P Parameter: Age (day) Value: 30
  misc_feature: MA Experiment 20001773 PARAMETER Experiment Name: At_Far-red-enriched-adult_P Parameter: Light Value: Far-red enriched vs. White
  misc_feature: MA Experiment 20001773 PARAMETER Experiment Name: At_Far-red-enriched-adult_P Parameter: Organism Value: A. thaliana
  misc_feature: MA Experiment 20001773 PARAMETER Experiment Name: At_Far-red-enriched-adult_P Parameter: Plant Line Value: Columbia
  misc_feature: MA Experiment 20001773 PARAMETER Experiment Name: At_Far-red-enriched-adult_P Parameter: Timepoint (hr) Value: 48
  misc_feature: MA Experiment 20001773 PARAMETER Experiment Name: At_Far-red-enriched-adult_P Parameter: Tissue Value: Aerial
  misc_feature: MA Experiment ID: 20001904 Result: Up-regulated in Transcription
  misc_feature: MA Experiment 20001904 PARAMETER Experiment Name: At_Drought_Reproduction_P Parameter: Age (day) Value: 37
  misc_feature: MA Experiment 20001904 PARAMETER Experiment Name: At_Drought_Reproduction_P Parameter: Organism Value: A. thaliana
  misc_feature: MA Experiment 20001904 PARAMETER Experiment Name: At_Drought_Reproduction_P Parameter: Plant Line Value: WS
  misc_feature: MA Experiment 20001904 PARAMETER Experiment Name: At_Drought_Reproduction_P Parameter: Timepoint (day) Value: 7
  misc_feature: MA Experiment 20001904 PARAMETER Experiment Name: At_Drought_Reproduction_P Parameter: Tissue Value: Rosettes
  misc_feature: MA Experiment 20001904 PARAMETER Experiment Name: At_Drought_Reproduction_P Parameter: Treatment Value: Drought vs. No Drought
  misc_feature: MA Experiment ID: 20001905 Result: Up-regulated in Transcription
  misc_feature: MA Experiment 20001905 PARAMETER Experiment Name: At_Drought_Reproduction_P Parameter: Age (day) Value: 40
  misc_feature: MA Experiment 20001905 PARAMETER Experiment Name: At_Drought_Reproduction_P Parameter: Organism Value: A. thaliana
  misc_feature: MA Experiment 20001905 PARAMETER Experiment Name: At_Drought_Reproduction_P Parameter: Plant Line Value: WS
  misc_feature: MA Experiment 20001905 PARAMETER Experiment Name: At_Drought_Reproduction_P Parameter: Timepoint (day) Value: 10
  misc_feature: MA Experiment 20001905 PARAMETER Experiment Name: At_Drought_Reproduction_P Parameter: Tissue Value: Rosettes
  misc_feature: MA Experiment 20001905 PARAMETER Experiment Name: At_Drought_Reproduction_P Parameter: Treatment Value: Drought vs. No Drought
  misc_feature: MA Experiment ID: 20001906 Result: Up-regulated in Transcription
  misc_feature: MA Experiment 20001906 PARAMETER Experiment Name: At_Drought_Reproduction_P Parameter: Age (day) Value: 35
  misc_feature: MA Experiment 20001906 PARAMETER Experiment Name: At_Drought_Reproduction_P Parameter: Organism Value: A. thaliana
  misc_feature: MA Experiment 20001906 PARAMETER Experiment Name: At_Drought_Reproduction_P Parameter: Plant Line Value: WS
  misc_feature: MA Experiment 20001906 PARAMETER Experiment Name: At_Drought_Reproduction_P Parameter: Timepoint (day) Value: 5
  misc_feature: MA Experiment 20001906 PARAMETER Experiment Name: At_Drought_Reproduction_P Parameter: Tissue Value: Siliques
  misc_feature: MA Experiment 20001906 PARAMETER Experiment Name: At_Drought_Reproduction_P Parameter: Treatment Value: Drought vs. No Drought
atgaagaagcttctatggagttggatcattctcttcaacatccatgtaaatggaatgatgatggagtttgatgaaatggagtggttcacagttttcaatggaacaaaagtgtttcagactcaaaatgatgttttttctgaagctaagtttcctatggttggactcactctgattcaatctgctgctgctaaaggagctgtgtgtttggatggaagtcttcccggataccatttgcatcgcgggtttggttccggagcgaacaattggctcgttcaattagagggaggtggatggtgtgataccattagaaattgtgtttaccgtaaaaccactcgtcgtggatcttcttcatatatggagaaagagataccatttaccggcattctaagtgataaagccgcggataatccagacttttataactggaatagagtaaaagttcggtattgtgacggtggatcgtttagcggggatagcgaaaataaggctgcacaacttcagtttagaggaaagagaatttggttagctgctatggaagatttgatggcaaaaggtatgcgtcaagctaagcaggctctgctctctggatgttctgcaggaggtcttgcggtgattttacgatgtgatgattttgggaaattgtttcctccttccaccagagtgaaatgtttgagtgatgctggtttcttccttgatgccatcgatgtgtctggaggtcgatctcttagacgattatacgccggtgtggtcagattacagaatctgcaaaccaaccttcctcagtattgtgtaaaccgtcttaatcccacttcgtgttttttcccacaaaacctaatcaaccaagtcaagactccactttttattcttaatgctgcatatgattcttggcagattcaagagagtttagctccaaaatctgcagatccaagtggaagttggaatgattgtagacttaactacgccaagtgtagtgcatctcagatccaattcttgcaaggttttaggacgcgtatggtgaatttggtaaaaggtttcgcgatgccaagtaagaacggtgtgttcctcaattcgtgctttgctcattgccaaacagagaggcatgacacttggttcgcccaaaactctccagctattaagaacaagggtattgcagtagctgtgggagattggtatttcgaaagaggaggagcaaagctcatagactgtgcttatccttgtgacaagacttgtcacaatttggtctttagaagataa

SEQ ID NO: 83634 - protein, 417 aa, Arabidopsis thaliana; identical to SEQ ID NO: 40655
  peptide (1)..(417): Ceres Seq. ID no. 12671198
  misc_feature (31)..(400): Pfam Name: Pectinacetylesterase Pfam Description: Pectinacetylesterase
  misc_feature (1)..(417): Homolog of NCBI NO: 25347293 NR Description: probable pectinacetylesterase precursor T8L23.6 - Arabidopsis thaliana >gi|12321351|gb|AAG50747.1|AC079733_15
  misc_feature (1)..(417): Homolog of NCBI NO: 30696158 NR Description: pectinacetylesterase, putative [Arabidopsis
  misc_feature (1)..(417): Homolog of NCBI NO: 21703105 NR Description: At1g57590/T8L23_6 [Arabidopsis thaliana]
  misc_feature (9)..(416): Homolog of NCBI NO: 18397406 NR Description: pectinacetylesterase, putative; protein id: supported by cDNA: gi_15292826, supported by cDNA: gi_16226324, by cDNA: gi_20465792 [Arabidopsis thaliana]
  misc_feature (9)..(416): Homolog of NCBI NO: 7487997 NR Description: pectin acetylesterase homolog F21E10.11 - thaliana >gi|3047082|gb|AAC13595.1| similar to Vigna radiata
  misc_feature (4)..(416): Homolog of NCBI NO: 15226462 NR Description: pectinacetylesterase, putative; protein id: supported by cDNA: gi_15450606 [Arabidopsis thaliana]
  misc_feature (51)..(415): Homolog of NCBI NO: 28392968 NR Description: putative pectinacetylesterase [Arabidopsis >gi|28827554|gb|AAO50621.1| putative pectinacetylesterase
  misc_feature (9)..(259): Homolog of NCBI NO: 6714404 NR Description: putative pectinacetylesterase [Arabidopsis
  misc_feature (297)..(416): Homolog of NCBI NO: 6714404 NR Description: putative pectinacetylesterase [Arabidopsis
  misc_feature (33)..(416): Homolog of NCBI NO: 34913332 NR Description: putative pectin acetylesterase precursor [Oryza

SEQ ID NO: 83635 - protein, 399 aa, Arabidopsis thaliana
  peptide (1)..(399): Ceres Seq. ID no. 12671199
  misc_feature (13)..(382): Pfam Name: Pectinacetylesterase Pfam Description: Pectinacetylesterase
  misc_feature (1)..(399): Homolog of NCBI NO: 25347293 NR Description: probable pectinacetylesterase precursor T8L23.6 - Arabidopsis thaliana >gi|12321351|gb|AAG50747.1|AC079733_15
  misc_feature (1)..(399): Homolog of NCBI NO: 30696158 NR Description: pectinacetylesterase, putative [Arabidopsis
  misc_feature (1)..(399): Homolog of NCBI NO: 21703105 NR Description: At1g57590/T8L23_6 [Arabidopsis thaliana]
  misc_feature (1)..(398): Homolog of NCBI NO: 18397406 NR Description: pectinacetylesterase, putative; protein id: supported by cDNA: gi_15292826, supported by cDNA: gi_16226324, by cDNA: gi_20465792 [Arabidopsis thaliana]
  misc_feature (1)..(398): Homolog of NCBI NO: 7487997 NR Description: pectin acetylesterase homolog F21E10.11 - thaliana >gi|3047082|gb|AAC13595.1| similar to Vigna radiata
  misc_feature (1)..(398): Homolog of NCBI NO: 15226462 NR Description: pectinacetylesterase, putative; protein id: supported by cDNA: gi_15450606 [Arabidopsis thaliana]
  misc_feature (33)..(397): Homolog of NCBI NO: 28392968 NR Description: putative pectinacetylesterase [Arabidopsis >gi|28827554|gb|AAO50621.1| putative pectinacetylesterase
  misc_feature (1)..(241): Homolog of NCBI NO: 6714404 NR Description: putative pectinacetylesterase [Arabidopsis
  misc_feature (279)..(398): Homolog of NCBI NO: 6714404 NR Description: putative pectinacetylesterase [Arabidopsis
  misc_feature (15)..(398): Homolog of NCBI NO: 34913332 NR Description: putative pectin acetylesterase precursor [Oryza
MMMEFDEMEWFTVFNGTKVFQTQNDVFSEAKFPMVGLTLIQSAAAKGAVCLDGSLPGYHLHRGFGSGANNWLVQLEGGGWCDTIRNCVYRKTTRRGSSSYMEKEIPFTGILSDKAADNPDFYNWNRVKVRYCDGGSFSGDSENKAAQLQFRGKRIWLAAMEDLMAKGMRQAKQALLSGCSAGGLAVILRCDDFGKLFPPSTRVKCLSDAGFFLDAIDVSGGRSLRRLYAGVVRLQNLQTNLPQYCVNRLNPTSCFFPQNLINQVKTPLFILNAAYDSWQIQESLAPKSADPSGSWNDCRLNYAKCSASQIQFLQGFRTRMVNLVKGFAMPSKNGVFLNSCFAHCQTERHDTWFAQNSPAIKNKGIAVAVGDWYFERGGAKLIDCAYPCDKTCHNLVFRR

SEQ ID NO: 83636 - protein, 398 aa, Arabidopsis thaliana
  peptide (1)..(398): Ceres Seq. ID no. 12671200
  misc_feature (12)..(381): Pfam Name: Pectinacetylesterase Pfam Description: Pectinacetylesterase
  misc_feature (1)..(398): Homolog of NCBI NO: 25347293 NR Description: probable pectinacetylesterase precursor T8L23.6 - Arabidopsis thaliana >gi|12321351|gb|AAG50747.1|AC079733_15
  misc_feature (1)..(398): Homolog of NCBI NO: 30696158 NR Description: pectinacetylesterase, putative [Arabidopsis
  misc_feature (1)..(398): Homolog of NCBI NO: 21703105 NR Description: At1g57590/T8L23_6 [Arabidopsis thaliana]
  misc_feature (1)..(397): Homolog of NCBI NO: 18397406 NR Description: pectinacetylesterase, putative; protein id: supported by cDNA: gi_15292826, supported by cDNA: gi_16226324, by cDNA: gi_20465792 [Arabidopsis thaliana]
  misc_feature (1)..(397): Homolog of NCBI NO: 7487997 NR Description: pectin acetylesterase homolog F21E10.11 - thaliana >gi|3047082|gb|AAC13595.1| similar to Vigna radiata
  misc_feature (1)..(397): Homolog of NCBI NO: 15226462 NR Description: pectinacetylesterase, putative; protein id: supported by cDNA: gi_15450606 [Arabidopsis thaliana]
  misc_feature (32)..(396): Homolog of NCBI NO: 28392968 NR Description: putative pectinacetylesterase [Arabidopsis >gi|28827554|gb|AAO50621.1| putative pectinacetylesterase
  misc_feature (1)..(240): Homolog of NCBI NO: 6714404 NR Description: putative pectinacetylesterase [Arabidopsis
  misc_feature (278)..(397): Homolog of NCBI NO: 6714404 NR Description: putative pectinacetylesterase [Arabidopsis
  misc_feature (14)..(397): Homolog of NCBI NO: 34913332 NR Description: putative pectin acetylesterase precursor [Oryza
MMEFDEMEWFTVFNGTKVFQTQNDVFSEAKFPMVGLTLIQSAAAKGAVCLDGSLPGYHLHRGFGSGANNWLVQLEGGGWCDTIRNCVYRKTTRRGSSSYMEKEIPFTGILSDKAADNPDFYNWNRVKVRYCDGGSFSGDSENKAAQLQFRGKRIWLAAMEDLMAKGMRQAKQALLSGCSAGGLAVILRCDDFGKLFPPSTRVKCLSDAGFFLDAIDVSGGRSLRRLYAGVVRLQNLQTNLPQYCVNRLNPTSCFFPQNLINQVKTPLFILNAAYDSWQIQESLAPKSADPSGSWNDCRLNYAKCSASQIQFLQGFRTRMVNLVKGFAMPSKNGVFLNSCFAHCQTERHDTWFAQNSPAIKNKGIAVAVGDWYFERGGAKLIDCAYPCDKTCHNLVFRR

SEQ ID NO: 83637 - DNA, 1400 bp, Arabidopsis thaliana
  misc_feature (1)..(1400): Ceres Seq. ID no. 12671213
  misc_feature: MA Experiment ID: 20000166 Result: Up-regulated in Transcription
  misc_feature: MA Experiment 20000166 PARAMETER Experiment Name: At_100uM_ABA_P Parameter: Age (day) Value: 14
  misc_feature: MA Experiment 20000166 PARAMETER Experiment Name: At_100uM_ABA_P Parameter: Organism Value: A. thaliana
  misc_feature: MA Experiment 20000166 PARAMETER Experiment Name: At_100uM_ABA_P Parameter: Plant Line Value: WS
  misc_feature: MA Experiment 20000166 PARAMETER Experiment Name: At_100uM_ABA_P Parameter: Timepoint (hr) Value: 1
  misc_feature: MA Experiment 20000166 PARAMETER Experiment Name: At_100uM_ABA_P Parameter: Tissue Value: Aerial
  misc_feature: MA Experiment 20000166 PARAMETER Experiment Name: At_100uM_ABA_P Parameter: Treatment Value: 100uM ABA vs. No Treatment
  misc_feature: MA Experiment ID: 20000169 Result: Up-regulated in Transcription
  misc_feature: MA Experiment 20000169 PARAMETER Experiment Name: At_100uM_ABA_P Parameter: Age (day) Value: 14
  misc_feature: MA Experiment 20000169 PARAMETER Experiment Name: At_100uM_ABA_P Parameter: Organism Value: A. thaliana
  misc_feature: MA Experiment 20000169 PARAMETER Experiment Name: At_100uM_ABA_P Parameter: Plant Line Value: WS
  misc_feature: MA Experiment 20000169 PARAMETER Experiment Name: At_100uM_ABA_P Parameter: Timepoint (hr) Value: 6
  misc_feature: MA Experiment 20000169 PARAMETER Experiment Name: At_100uM_ABA_P Parameter: Tissue Value: Aerial
  misc_feature: MA Experiment 20000169 PARAMETER Experiment Name: At_100uM_ABA_P Parameter: Treatment Value: 100uM ABA vs. No Treatment
  misc_feature: MA Experiment ID: 20000182 Result: Up-regulated in Transcription
  misc_feature: MA Experiment 20000182 PARAMETER Experiment Name: At_2mM_SA_P Parameter: Age (day) Value: 14
  misc_feature: MA Experiment 20000182 PARAMETER Experiment Name: At_2mM_SA_P Parameter: Organism Value: A. thaliana
  misc_feature: MA Experiment 20000182 PARAMETER Experiment Name: At_2mM_SA_P Parameter: Plant Line Value: WS
  misc_feature: MA Experiment 20000182 PARAMETER Experiment Name: At_2mM_SA_P Parameter: Timepoint (hr) Value: 6
  misc_feature: MA Experiment 20000182 PARAMETER Experiment Name: At_2mM_SA_P Parameter: Tissue Value: Aerial
  misc_feature: MA Experiment 20000182 PARAMETER Experiment Name: At_2mM_SA_P Parameter: Treatment Value: 2mM SA vs. No Treatment
  misc_feature: MA Experiment ID: 20000184 Result: Down-regulated in Transcription
  misc_feature: MA Experiment 20000184 PARAMETER Experiment Name: At_Shoots__P Parameter: Age (day) Value: 7
  misc_feature: MA Experiment 20000184 PARAMETER Experiment Name: At_Shoots__P Parameter: Tissue Value: Shoots vs. Whole Plant
  misc_feature: MA Experiment ID: 20000185 Result: Up-regulated in Transcription
  misc_feature: MA Experiment 20000185 PARAMETER Experiment Name: At_Roots__P Parameter: Age (day) Value: 7 vs. 21
  misc_feature: MA Experiment 20000185 PARAMETER Experiment Name: At_Roots__P Parameter: Organism Value: A. thaliana
  misc_feature: MA Experiment 20000185 PARAMETER Experiment Name: At_Roots__P Parameter: Tissue Value: Roots vs. Whole Plant
  misc_feature: MA Experiment ID: 20000227 Result: Down-regulated in Transcription
  misc_feature: MA Experiment 20000227 PARAMETER Experiment Name: At_Root-Tips-vs-Tops_P Parameter: Tissue Value: Root Tips vs. Root Tops
  misc_feature: MA Experiment ID: 20000234 Result: Down-regulated in Transcription
  misc_feature: MA Experiment 20000234 PARAMETER Experiment Name: At_Siliques_P Parameter: Age (day) Value: 21
  misc_feature: MA Experiment 20000234 PARAMETER Experiment Name: At_Siliques_P Parameter: Organism Value: A. thaliana
  misc_feature: MA Experiment 20000234 PARAMETER Experiment Name: At_Siliques_P Parameter: Plant Line Value: WS
  misc_feature: MA Experiment 20000234 PARAMETER Experiment Name: At_Siliques_P Parameter: Tissue Value: Less Than 5mm Siliques vs. Whole Plant
  misc_feature: MA Experiment ID: 20000265 Result: Down-regulated in Transcription
  misc_feature: MA Experiment 20000265 PARAMETER Experiment Name: At_Open_Flower_P Parameter: Age (day) Value: 21
  misc_feature: MA Experiment 20000265 PARAMETER Experiment Name: At_Open_Flower_P Parameter: Plant Line Value: WS
  misc_feature: MA Experiment 20000265 PARAMETER Experiment Name: At_Open_Flower_P Parameter: Tissue Value: Closed Flower vs. Whole Plant
  misc_feature: MA Experiment ID: 20000286 Result: Down-regulated in Transcription
  misc_feature: MA Experiment 20000286 PARAMETER Experiment Name: At_Open_Flower_P Parameter: Age (day) Value: 21
  misc_feature: MA Experiment 20000286 PARAMETER Experiment Name: At_Open_Flower_P Parameter: Plant Line Value: WS
  misc_feature: MA Experiment 20000286 PARAMETER Experiment Name: At_Open_Flower_P Parameter: Tissue Value: Half Open vs. Whole Plant
  misc_feature: MA Experiment ID: 20000436 Result: Up-regulated in Transcription
  misc_feature: MA Experiment 20000436 PARAMETER Experiment Name: At_Drought_P Parameter: Age (day) Value: 7
  misc_feature: MA Experiment 20000436 PARAMETER Experiment Name: At_Drought_P Parameter: Organism Value: A. thaliana
  misc_feature: MA Experiment 20000436 PARAMETER Experiment Name: At_Drought_P Parameter: Plant Line Value: WS
  misc_feature: MA Experiment 20000436 PARAMETER Experiment Name: At_Drought_P Parameter: Timepoint (hr) Value: 12
  misc_feature: MA Experiment 20000436 PARAMETER Experiment Name: At_Drought_P Parameter: Tissue Value: Whole Plant
  misc_feature: MA Experiment 20000436 PARAMETER Experiment Name: At_Drought_P Parameter: Treatment Value: Drought vs. No Drought
  misc_feature: MA Experiment ID: 20000437 Result: Up-regulated in Transcription
  misc_feature: MA Experiment 20000437 PARAMETER Experiment Name: At_Drought_P Parameter: Age (day) Value: 8
  misc_feature: MA Experiment 20000437 PARAMETER Experiment Name: At_Drought_P Parameter: Organism Value: A. thaliana
  misc_feature: MA Experiment 20000437 PARAMETER Experiment Name: At_Drought_P Parameter: Plant Line Value: WS
  misc_feature: MA Experiment 20000437 PARAMETER Experiment Name: At_Drought_P Parameter: Timepoint (hr) Value: 24
  misc_feature: MA Experiment 20000437 PARAMETER Experiment Name: At_Drought_P Parameter: Tissue Value: Whole Plant
  misc_feature: MA Experiment 20000437 PARAMETER Experiment Name: At_Drought_P Parameter: Treatment Value: Drought vs. No Drought
  misc_feature: MA Experiment ID: 20000438 Result: Down-regulated in Transcription
  misc_feature: MA Experiment 20000438 PARAMETER Experiment Name: At_Shoots__P Parameter: Age (day) Value: 14
  misc_feature: MA Experiment 20000438 PARAMETER Experiment Name: At_Shoots__P Parameter: Tissue Value: Shoots vs. Whole Plant
  misc_feature: MA Experiment ID: 20000439 Result: Up-regulated in Transcription
  misc_feature: MA Experiment 20000439 PARAMETER Experiment Name: At_Roots__P Parameter: Age (day) Value: 14 vs. 21
  misc_feature: MA Experiment 20000439 PARAMETER Experiment Name: At_Roots__P Parameter: Organism Value: A. thaliana
  misc_feature: MA Experiment 20000439 PARAMETER Experiment Name: At_Roots__P Parameter: Tissue Value: Roots vs. Whole Plant
  misc_feature: MA Experiment ID: 20000453 Result: Up-regulated in Transcription
  misc_feature: MA Experiment 20000453 PARAMETER Experiment Name: At_100uM_ABA_P Parameter: Age (day) Value: 15
  misc_feature: MA Experiment 20000453 PARAMETER Experiment Name: At_100uM_ABA_P Parameter: Organism Value: A. thaliana
  misc_feature: MA Experiment 20000453 PARAMETER Experiment Name: At_100uM_ABA_P Parameter: Plant Line Value: WS
  misc_feature: MA Experiment 20000453 PARAMETER Experiment Name: At_100uM_ABA_P Parameter: Timepoint (hr) Value: 24
  misc_feature: MA Experiment 20000453 PARAMETER Experiment Name: At_100uM_ABA_P Parameter: Tissue Value: Aerial
  misc_feature: MA Experiment 20000453 PARAMETER Experiment Name: At_100uM_ABA_P Parameter: Treatment Value: 100uM ABA vs. No Treatment
  misc_feature: MA Experiment ID: 20001554 Result: Up-regulated in Transcription
  misc_feature: MA Experiment 20001554 PARAMETER Experiment Name: At_Drought_Soil_Dry_P Parameter: Age (day) Value: 21
  misc_feature: MA Experiment 20001554 PARAMETER Experiment Name: At_Drought_Soil_Dry_P Parameter: Organism Value: A. thaliana
  misc_feature: MA Experiment 20001554 PARAMETER Experiment Name: At_Drought_Soil_Dry_P Parameter: Plant Line Value: WS
  misc_feature: MA Experiment 20001554 PARAMETER Experiment Name: At_Drought_Soil_Dry_P Parameter: Post Timepoint (hr) Value: None
  misc_feature: MA Experiment 20001554 PARAMETER Experiment Name: At_Drought_Soil_Dry_P Parameter: Post-Treatment Value: None
  misc_feature: MA Experiment 20001554 PARAMETER Experiment Name: At_Drought_Soil_Dry_P Parameter: Timepoint (day) Value: 7
  misc_feature: MA Experiment 20001554 PARAMETER Experiment Name: At_Drought_Soil_Dry_P Parameter: Treatment Value: Drought vs. No Drought
  misc_feature: MA Experiment ID: 20001560 Result: Down-regulated in Transcription
  misc_feature: MA Experiment 20001560 PARAMETER Experiment Name: At_Drought_Soil_Dry_P Parameter: Age (day) Value: 28
  misc_feature: MA Experiment 20001560 PARAMETER Experiment Name: At_Drought_Soil_Dry_P Parameter: Organism Value: A. thaliana
  misc_feature: MA Experiment 20001560 PARAMETER Experiment Name: At_Drought_Soil_Dry_P Parameter: Plant Line Value: WS
  misc_feature: MA Experiment 20001560 PARAMETER Experiment Name: At_Drought_Soil_Dry_P Parameter: Post Timepoint (hr) Value: None
  misc_feature: MA Experiment 20001560 PARAMETER Experiment Name: At_Drought_Soil_Dry_P Parameter: Post-Treatment Value: None
  misc_feature: MA Experiment 20001560 PARAMETER Experiment Name: At_Drought_Soil_Dry_P Parameter: Timepoint (day) Value: 14
  misc_feature: MA Experiment 20001560 PARAMETER Experiment Name: At_Drought_Soil_Dry_P Parameter: Treatment Value: Drought vs. No Drought
  misc_feature: MA Experiment ID: 20001757 Result: Down-regulated in Transcription
  misc_feature: MA Experiment 20001757 PARAMETER Experiment Name: At_50mM_NH4NO3_L-to-H_P Parameter: Timepoint (hr) Value: 6
  misc_feature: MA Experiment 20001757 PARAMETER Experiment Name: At_50mM_NH4NO3_L-to-H_P Parameter: Tissue Value: Leaf
  misc_feature: MA Experiment 20001757 PARAMETER Experiment Name: At_50mM_NH4NO3_L-to-H_P Parameter: Treatment Value: 50mM NH4NO3 vs 100mM Mannitol
  misc_feature: MA Experiment ID: 20001905 Result: Up-regulated in Transcription
  misc_feature: MA Experiment 20001905 PARAMETER Experiment Name: At_Drought_Reproduction_P Parameter: Age (day) Value: 40
  misc_feature: MA Experiment 20001905 PARAMETER Experiment Name: At_Drought_Reproduction_P Parameter: Organism Value: A. thaliana
  misc_feature: MA Experiment 20001905 PARAMETER Experiment Name: At_Drought_Reproduction_P Parameter: Plant Line Value: WS
  misc_feature: MA Experiment 20001905 PARAMETER Experiment Name: At_Drought_Reproduction_P Parameter: Timepoint (day) Value: 10
  misc_feature: MA Experiment 20001905 PARAMETER Experiment Name: At_Drought_Reproduction_P Parameter: Tissue Value: Rosettes
  misc_feature: MA Experiment 20001905 PARAMETER Experiment Name: At_Drought_Reproduction_P Parameter: Treatment Value: Drought vs. No Drought
aatgctctgttttgttctctcgagaaaattctcagactcagagaaaagtaaaaacagagaagaaagatgagaagcggtgctaatggaaacaacgttttcgatactataaacgcagctgcttctgctattgcttcttctgatgatcgtcttcatcaatcttctccgattcataagaagagaaaatggtggaatcgatggagtctgttgaaatgtttcggatcttcaagacaaagaaaacgaataggaaactcggttcttgttcctgaaccggtatcaatgtcttcttcaaattcaacaacatcaaattccggttatcgttcggttatcacaacacttccttttatagctccaccttcatctccagcttcatttttccaatcagagccaccttctgctacacaatcacctgttggaatcctctcttttagtcctttgccttgtaacaaccgtccttccatcttcgccattggaccttacgctcatgaaactcaattggtatctcctccggttttctcaacttacactactgaaccatcttcagctccaatcacacctcctcttgatgactcatctatctacttaaccaccacaacaccttcttcacctgaagtgccttttgctcagctctttaactcgaaccatcaaaccggtagctatggttataagttcccaatgtcttctagttatgagtttcagttttaccaacttcctcctggtagtccacttggtcagcttatttccccgagccctggttctggtccaacttctccttttcccgatggagaaacctcgctgttccctcactttcaagtctctgatcctccaaaactgttgagtccaaagactgctggtgttacaactccttgtaaagagcagaagattgtaagaccgcataaaccggtttcattcgatcttgatgctgatcatgtcattagatgcgtggatcagaagctaagaacaacgttccctgaagcatcatcagatcaagaatcaatgaatcattcgtctctcgggtccaataaggaattcaatttcggcacggatgagaaacatttgaccgttgatgaacatagatcagcttcgccgaagaacagcaatgattggtcttttttccctgtgatgcagtcaggtacactaagctaaccttcatcagaagaatagaaatctgaaatttagatatcgattcggacaaatatcttgttcaagattcaagaacaattatagaatttttagatgattctgttcaggatcttaaggatattttcttgtctctctttttggttttgtaataaatatttggcatcgttagttgttgtatatggctactctttatgtagttttttgtttttgtgaatacacatttgatcgcatttgtaaataaaatttaatcagtttcttcg

SEQ ID NO: 83638 - protein, 358 aa, Arabidopsis thaliana
  peptide (1)..(358): Ceres Seq. ID no. 12671214
  misc_feature (1)..(358): Homolog of NCBI NO: 18407879 NR Description: expressed protein; protein id: At1g63720.1, by cDNA: gi_13878144, supported by cDNA: gi_16226926, supported cDNA: gi_17104556 [Arabidopsis thaliana]
  misc_feature (71)..(358): Homolog of NCBI NO: 25404436 NR Description: hypothetical protein F24D7.9 [imported] -
  misc_feature (1)..(256): Homolog of NCBI NO: 30686949 NR Description: proline-rich protein family [Arabidopsis >gi|26449762|dbj|BAC42004.1| unknown protein [Arabidopsis
  misc_feature (8)..(256): Homolog of NCBI NO: 15237154 NR Description: unknown protein; protein id: At5g52430.1 thaliana] >gi|10177409|dbj|BAB10540.1| contains similarity to
  misc_feature (36)..(256): Homolog of NCBI NO: 7486810 NR Description: hypothetical protein M7J2.10 - Arabidopsis >gi|2980788|emb|CAA18164.1| putative protein [Arabidopsis >gi|7269412|emb|CAB81372.1| putative protein [Arabidopsis
  misc_feature (15)..(276): Homolog of NCBI NO: 34894046 NR Description: P0436E04.7 [Oryza sativa (japonica
  misc_feature (36)..(286): Homolog of NCBI NO: 15223134 NR Description: unknown protein; protein id: At1g76660.1
MRSGANGNNVFDTINAAASAIASSDDRLHQSSPIHKKRKWWNRWSLLKCFGSSRQRKRIGNSVLVPEPVSMSSSNSTTSNSGYRSVITTLPFIAPPSSPASFFQSEPPSATQSPVGILSFSPLPCNNRPSIFAIGPYAHETQLVSPPVFSTYTTEPSSAPITPPLDDSSIYLTTTTPSSPEVPFAQLFNSNHQTGSYGYKFPMSSSYEFQFYQLPPGSPLGQLISPSPGSGPTSPFPDGETSLFPHFQVSDPPKLLSPKTAGVTTPCKEQKIVRPHKPVSFDLDADHVIRCVDQKLRTTFPEASSDQESMNHSSLGSNKEFNFGTDEKHLTVDEHRSASPKNSNDWSFFPVMQSGTLS

SEQ ID NO: 83639 - protein, 288 aa, Arabidopsis thaliana
  peptide (1)..(288): Ceres Seq. ID no. 12671215
  misc_feature (1)..(288): Homolog of NCBI NO: 18407879 NR Description: expressed protein; protein id: At1g63720.1, by cDNA: gi_13878144, supported by cDNA: gi_16226926, supported cDNA: gi_17104556 [Arabidopsis thaliana]
  misc_feature (1)..(288): Homolog of NCBI NO: 25404436 NR Description: hypothetical protein F24D7.9 [imported] -
  misc_feature (1)..(186): Homolog of NCBI NO: 30686949 NR Description: proline-rich protein family [Arabidopsis >gi|26449762|dbj|BAC42004.1| unknown protein [Arabidopsis
  misc_feature (1)..(186): Homolog of NCBI NO: 15237154 NR Description: unknown protein; protein id: At5g52430.1 thaliana] >gi|10177409|dbj|BAB10540.1| contains similarity to
  misc_feature (1)..(186): Homolog of NCBI NO: 7486810 NR Description: hypothetical protein M7J2.10 - Arabidopsis >gi|2980788|emb|CAA18164.1| putative protein [Arabidopsis >gi|7269412|emb|CAB81372.1| putative protein [Arabidopsis
  misc_feature (1)..(206): Homolog of NCBI NO: 34894046 NR Description: P0436E04.7 [Oryza sativa (japonica
  misc_feature (1)..(216): Homolog of NCBI NO: 15223134 NR Description: unknown protein; protein id: At1g76660.1
MSSSNSTTSNSGYRSVITTLPFIAPPSSPASFFQSEPPSATQSPVGILSFSPLPCNNRPSIFAIGPYAHETQLVSPPVFSTYTTEPSSAPITPPLDDSSIYLTTTTPSSPEVPFAQLFNSNHQTGSYGYKFPMSSSYEFQFYQLPPGSPLGQLISPSPGSGPTSPFPDGETSLFPHFQVSDPPKLLSPKTAGVTTPCKEQKIVRPHKPVSFDLDADHVIRCVDQKLRTTFPEASSDQESMNHSSLGSNKEFNFGTDEKHLTVDEHRSASPKNSNDWSFFPVMQSGTLS

SEQ ID NO: 83640 - DNA, 1343 bp, Arabidopsis thaliana
  misc_feature (1)..(1343): Ceres Seq. ID no. 12671218
  misc_feature: MA Experiment ID: 20000185 Result: Down-regulated in Transcription
  misc_feature: MA Experiment 20000185 PARAMETER Experiment Name: At_Roots__P Parameter: Age (day) Value: 7 vs. 21
  misc_feature: MA Experiment 20000185 PARAMETER Experiment Name: At_Roots__P Parameter: Organism Value: A. thaliana
  misc_feature: MA Experiment 20000185 PARAMETER Experiment Name: At_Roots__P Parameter: Tissue Value: Roots vs. Whole Plant
  misc_feature: MA Experiment ID: 20000264 Result: Down-regulated in Transcription
  misc_feature: MA Experiment 20000264 PARAMETER Experiment Name: At_Open_Flower_P Parameter: Age (day) Value: 21
  misc_feature: MA Experiment 20000264 PARAMETER Experiment Name: At_Open_Flower_P Parameter: Plant Line Value: WS
  misc_feature: MA Experiment 20000264 PARAMETER Experiment Name: At_Open_Flower_P Parameter: Tissue Value: Open Flower vs. Whole Plant
  misc_feature: MA Experiment ID: 20000286 Result: Down-regulated in Transcription
  misc_feature: MA Experiment 20000286 PARAMETER Experiment Name: At_Open_Flower_P Parameter: Age (day) Value: 21
  misc_feature: MA Experiment 20000286 PARAMETER Experiment Name: At_Open_Flower_P Parameter: Plant Line Value: WS
  misc_feature: MA Experiment 20000286 PARAMETER Experiment Name: At_Open_Flower_P Parameter: Tissue Value: Half Open vs. Whole Plant
  misc_feature: MA Experiment ID: 20000438 Result: Down-regulated in Transcription
  misc_feature: MA Experiment 20000438 PARAMETER Experiment Name: At_Shoots__P Parameter: Age (day) Value: 14
  misc_feature: MA Experiment 20000438 PARAMETER Experiment Name: At_Shoots__P Parameter: Tissue Value: Shoots vs. Whole Plant
  misc_feature: MA Experiment ID: 20000439 Result: Down-regulated in Transcription
  misc_feature: MA Experiment 20000439 PARAMETER Experiment Name: At_Roots__P Parameter: Age (day) Value: 14 vs. 21
  misc_feature: MA Experiment 20000439 PARAMETER Experiment Name: At_Roots__P Parameter: Organism Value: A. thaliana
  misc_feature: MA Experiment 20000439 PARAMETER Experiment Name: At_Roots__P Parameter: Tissue Value: Roots vs. Whole Plant
  misc_feature: MA Experiment ID: 20001558 Result: Down-regulated in Transcription
  misc_feature: MA Experiment 20001558 PARAMETER Experiment Name: At_Drought_Soil_Dry_P Parameter: Age (day) Value: 27
  misc_feature: MA Experiment 20001558 PARAMETER Experiment Name: At_Drought_Soil_Dry_P Parameter: Organism Value: A. thaliana
  misc_feature: MA Experiment 20001558 PARAMETER Experiment Name: At_Drought_Soil_Dry_P Parameter: Plant Line Value: WS
  misc_feature: MA Experiment 20001558 PARAMETER Experiment Name: At_Drought_Soil_Dry_P Parameter: Post Timepoint (hr) Value: 6
  misc_feature: MA Experiment 20001558 PARAMETER Experiment Name: At_Drought_Soil_Dry_P Parameter: Post-Treatment Value: Re-Water vs. No Drought
  misc_feature: MA Experiment 20001558 PARAMETER Experiment Name: At_Drought_Soil_Dry_P Parameter: Timepoint (day) Value: 13
  misc_feature: MA Experiment 20001558 PARAMETER Experiment Name: At_Drought_Soil_Dry_P Parameter: Treatment Value: Drought vs. No Drought
  misc_feature: MA Experiment ID: 20001768 Result: Up-regulated in Transcription
  misc_feature: MA Experiment 20001768 PARAMETER Experiment Name: At_Far-red-enriched-adult_P Parameter: Age (day) Value: 28
  misc_feature: MA Experiment 20001768 PARAMETER Experiment Name: At_Far-red-enriched-adult_P Parameter: Light Value: Far-red enriched vs. White
  misc_feature: MA Experiment 20001768 PARAMETER Experiment Name: At_Far-red-enriched-adult_P Parameter: Organism Value: A. thaliana
  misc_feature: MA Experiment 20001768 PARAMETER Experiment Name: At_Far-red-enriched-adult_P Parameter: Plant Line Value: Columbia
  misc_feature: MA Experiment 20001768 PARAMETER Experiment Name: At_Far-red-enriched-adult_P Parameter: Timepoint (hr) Value: 1
  misc_feature: MA Experiment 20001768 PARAMETER Experiment Name: At_Far-red-enriched-adult_P Parameter: Tissue Value: Aerial
  misc_feature: MA Experiment ID: 20001773 Result: Up-regulated in Transcription
  misc_feature: MA Experiment 20001773 PARAMETER Experiment Name: At_Far-red-enriched-adult_P Parameter: Age (day) Value: 30
  misc_feature: MA Experiment 20001773 PARAMETER Experiment Name: At_Far-red-enriched-adult_P Parameter: Light Value: Far-red enriched vs. White
  misc_feature: MA Experiment 20001773 PARAMETER Experiment Name: At_Far-red-enriched-adult_P Parameter: Organism Value: A. thaliana
  misc_feature: MA Experiment 20001773 PARAMETER Experiment Name: At_Far-red-enriched-adult_P Parameter: Plant Line Value: Columbia
  misc_feature: MA Experiment 20001773 PARAMETER Experiment Name: At_Far-red-enriched-adult_P Parameter: Timepoint (hr) Value: 48
  misc_feature: MA Experiment 20001773 PARAMETER Experiment Name: At_Far-red-enriched-adult_P Parameter: Tissue Value: Aerial
  misc_feature: MA Experiment ID: 20001774 Result: Down-regulated in Transcription
  misc_feature: MA Experiment 20001774 PARAMETER Experiment Name: At_Far-red-enriched-adult_P Parameter: Age (day) Value: 31
  misc_feature: MA Experiment 20001774 PARAMETER Experiment Name: At_Far-red-enriched-adult_P Parameter: Light Value: Far-red enriched vs. White
  misc_feature: MA Experiment 20001774 PARAMETER Experiment Name: At_Far-red-enriched-adult_P Parameter: Organism Value: A. thaliana
  misc_feature: MA Experiment 20001774 PARAMETER Experiment Name: At_Far-red-enriched-adult_P Parameter: Plant Line Value: Columbia
  misc_feature: MA Experiment 20001774 PARAMETER Experiment Name: At_Far-red-enriched-adult_P Parameter: Timepoint (hr) Value: 72
  misc_feature: MA Experiment 20001774 PARAMETER Experiment Name: At_Far-red-enriched-adult_P Parameter: Tissue Value: Aerial
atgggtcatcactcatgctgcaaccagcaaaaggtgaagagagggctttggtcaccggaagaagatgagaagcttattagatatatcacaactcatggctatggatgttggagtgaagtccctgaaaaagcagggcttcaaagatgtggaaaaagttgtagattgcgatggataaactatcttcgacctgatatcaggagaggaaggttctctccagaagaagagaaattgatcataagccttcatggagttgtgggaaacaggtgggctcatatagctagtcatttaccgggaagaacagataacgagattaaaaactattggaattcatggattaagaaaaagatacgaaaaccgcaccatcattacagtcgtcatcaaccgtcagtaactactgtgacattgaatgcggacactacatcgattgccactaccatcgaggcctctaccaccacaacatcgactatcgataacttacattttgacggtttcactgattctcctaaccaattaaatttcaccaatgatcaagaaactaatataaagattcaagaaacttttttctcccataaacctcctctcttcatggtagacacaacacttcctatcctagaaggaatgttctctgaaaacatcatcacaaacaataacaagaacaatgatcatgatgacacgcaaagaggaggaagagaaaatgtttgtgaacaagcatttctaacaactaacacggaagaatgggatatgaatcttcgtcagcaagagccgtttcaagttcctacactggcgtcacatgtgttcaacaactcttccaattcaaatattgacacggttataagttataatctaccggcgctaatagagggaaatgtcgataacatcgtccataatgaaaacagcaatgtccaagatggagaaatggcgtccacattcgaatgtttaaagaggcaagaactaagctatgatcaatgggacgattcacaacaatgctctaactttttcttttgggacaaccttaatataaacgtggaaggttcatctcttgttggaaaccaagacccatcaatgaatttgggatcatctgccttatcttcttctttcccttcttcgttttaaattaatgtttaaatcacagcaaataaactccgctaatttgtttataagtttgtttattcaccttttttctcttagagtttgtaacgggattttcactttattatgtaatgagtgttctaaattgttgatgtttgtaacgggattttcactttattatgtaatgagtgttctaaattgttgataaagagatggtgtgaatgtatgtatataaaactcaaggtcttgtccgc

SEQ ID NO: 83641 - protein, 370 aa, Arabidopsis thaliana
  peptide (1)..(370): Ceres Seq. ID no. 12671219
  misc_feature (14)..(61): Pfam Name: Myb-like DNA-binding domain Pfam Description: Myb-like DNA-binding domain
  misc_feature (1)..(370): Homolog of NCBI NO: 15222565 NR Description: putative MYB family transcription factor; protein At1g63910.1, supported by cDNA: gi_15375284 [Arabidopsis
  misc_feature (1)..(185): Homolog of NCBI NO: 2129932 NR Description: myb-related protein 1 - tomato
  misc_feature (1)..(145): Homolog of NCBI NO: 28812131 NR Description: putative myb-related protein [Oryza sativa
  misc_feature (1)..(222): Homolog of NCBI NO: 11994360 NR Description: transcription factor-like protein [Arabidopsis
  misc_feature (1)..(222): Homolog of NCBI NO: 22331071 NR Description: myb family transcription factor; protein id: supported by cDNA: gi_5823326 [Arabidopsis thaliana]
  misc_feature (1)..(170): Homolog of NCBI NO: 2280530 NR Description: ATMYB4 [Arabidopsis thaliana]
  misc_feature (1)..(170): Homolog of NCBI NO: 30690317 NR Description: myb transcription factor (ATMYB4) [Arabidopsis >gi|20466622|gb|AAM20628.1| transcription factor ATMYB4 thaliana] >gi|30984580|gb|AAP42753.1| At5g26655 [Arabidopsis
  misc_feature (1)..(116): Homolog of NCBI NO: 34910458 NR Description: putative transcription factor [Oryza sativa
  misc_feature (39)..(170): Homolog of NCBI NO: 7446174 NR Description: transcription factor MYB4 - Arabidopsis thaliana
  misc_feature (1)..(44): Homolog of NCBI NO: 7446174 NR Description: transcription factor MYB4 - Arabidopsis thaliana
MGHHSCCNQQKVKRGLWSPEEDEKLIRYITTHGYGCWSEVPEKAGLQRCGKSCRLRWINYLRPDIRRGRFSPEEEKLIISLHGVVGNRWAHIASHLPGRTDNEIKNYWNSWIKKKIRKPHHHYSRHQPSVTTVTLNADTTSIATTIEASTTTTSTIDNLHFDGFTDSPNQLNFTNDQETNIKIQETFFSHKPPLFMVDTTLPILEGMFSENIITNNNKNNDHDDTQRGGRENVCEQAFLTTNTEEWDMNLRQQEPFQVPTLASHVFNNSSNSNIDTVISYNLPALIEGNVDNIVHNENSNVQDGEMASTFECLKRQELSYDQWDDSQQCSNFFFWDNLNINVEGSSLVGNQDPSMNLGSSALSSSFPSSF

SEQ ID NO: 83642 - DNA, 1158 bp, Arabidopsis thaliana
  misc_feature (1)..(1158): Ceres Seq. ID no. 12671224
atggatgtaagagaagctatgaagaaccaaacccacgttgccatgatcctttccgggcacgtcttatcttccgcgcccaaagactctaacgtcatcttctcaccggcgtcaataaactctgcgatcacgatgcacgccgctggtcccggaggtgatttagtctccggccaaatcctctccttcctaagatcatcttcaattgatgagctcaaaaccgtgttccgagaactagcctccgtcgtctatgccgacagaagcgccaccggcggcccaaagataacggcggcgaatggcctttggattgataaatcacttccgactgatcccaagttcaaggacctcttcgagaacttctttaaggctgtttatgttccagtagatttccgatcagaggctgaagaagtgcgtaaggaggtgaattcatgggttgaacatcacaccaataatctgatcaaggatcttcttcctgatggatccgtgacaagcctaaccaacaagatttacgcaaacgcattgtctttcaagggagcttggaaaagaccatttgaaaagtactatacaagagataatgacttctaccttgtcaatggcacatcagtctctgtgccattcatgtccagctatgagaaccaatacgtaagagcttatgacggtttcaaggtcctcaggcttccttaccaacgaggcagtgatgataccaatcgtaaattctcaatgtatttctatctcccagacaagaaagatggattggatgatctcttggagaaaatggcatctacacctggattcttggatagtcacattccgacatatagagatgaacttgagaaatttagaattccaaagtttaagatcgaattcggtttttctgttacaagcgttttggatcgattgggattgcgttcaatgtcaatgtaccataaagcttgtgtcgagattgatgaagaaggtgctgaagctgcggctgctactgctgatggagattgtggttgttctcttgattttgtggagcctcctaagaagatagattttgtggccgatcatccatttcttttcttgattcgagaagaaaaaactggaaccgttttgttcgttggtcagatctttgatccttcgggaccttgttcgggatctaattcggactcagatgactattaa

SEQ ID NO: 83643 - protein, 385 aa, Arabidopsis thaliana
  peptide (1)..(385): Ceres Seq. ID no. 12671225
  misc_feature (1)..(385): Homolog of NCBI NO: 15222606 NR Description: hypothetical protein; protein id: At1g64030.1
  misc_feature (1)..(365): Homolog of NCBI NO: 25404920 NR Description: protein F22C12.22 [imported] - Arabidopsis >gi|6692103|gb|AAF24568.1|AC007764_10 F22C12.22 [Arabidopsis
  misc_feature (4)..(372): Homolog of NCBI NO: 6692102 NR Description: F22C12.21 [Arabidopsis thaliana]
  misc_feature (1)..(372): Homolog of NCBI NO: 15225956 NR Description: putative serpin; protein id: At2g14540.1, by cDNA: gi_18175862 [Arabidopsis thaliana]
  misc_feature (1)..(372): Homolog of NCBI NO: 15220721 NR Description: phloem serpin-1, putative; protein id:
  misc_feature (1)..(372): Homolog of NCBI NO: 25404364 NR Description: hypothetical protein F19K23.10 [imported] - thaliana >gi|2160141|gb|AAB60763.1| Strong similarity to Triticum
  misc_feature (1)..(302): Homolog of NCBI NO: 15220298 NR Description: serpin, putative; protein id: At1g47710.1
  misc_feature (304)..(371): Homolog of NCBI NO: 15220298 NR Description: serpin, putative; protein id: At1g47710.1
  misc_feature (3)..(300): Homolog of NCBI NO: 26224736 NR Description: serpin-like protein [Citrus x paradisi]
  misc_feature (304)..(371): Homolog of NCBI NO: 26224736 NR Description: serpin-like protein [Citrus x paradisi]
MDVREAMKNQTHVAMILSGHVLSSAPKDSNVIFSPASINSAITMHAAGPGGDLVSGQILSFLRSSSIDELKTVFRELASVVYADRSATGGPKITAANGLWIDKSLPTDPKFKDLFENFFKAVYVPVDFRSEAEEVRKEVNSWVEHHTNNLIKDLLPDGSVTSLTNKIYANALSFKGAWKRPFEKYYTRDNDFYLVNGTSVSVPFMSSYENQYVRAYDGFKVLRLPYQRGSDDTNRKFSMYFYLPDKKDGLDDLLEKMASTPGFLDSHIPTYRDELEKFRIPKFKIEFGFSVTSVLDRLGLRSMSMYHKACVEIDEEGAEAAAATADGDCGCSLDFVEPPKKIDFVADHPFLFLIREEKTGTVLFVGQIFDPSGPCSGSNSDSDDY

SEQ ID NO: 83644 - protein, 379 aa, Arabidopsis thaliana
  peptide (1)..(379): Ceres Seq. ID no. 12671226
  misc_feature (1)..(379): Homolog of NCBI NO: 15222606 NR Description: hypothetical protein; protein id: At1g64030.1
  misc_feature (1)..(359): Homolog of NCBI NO: 25404920 NR Description: protein F22C12.22 [imported] - Arabidopsis >gi|6692103|gb|AAF24568.1|AC007764_10 F22C12.22 [Arabidopsis
  misc_feature (1)..(366): Homolog of NCBI NO: 6692102 NR Description: F22C12.21 [Arabidopsis thaliana]
  misc_feature (1)..(366): Homolog of NCBI NO: 15225956 NR Description: putative serpin; protein id: At2g14540.1, by cDNA: gi_18175862 [Arabidopsis thaliana]
  misc_feature (1)..(366): Homolog of NCBI NO: 15220721 NR Description: phloem serpin-1, putative; protein id:
  misc_feature (1)..(366): Homolog of NCBI NO: 25404364 NR Description: hypothetical protein F19K23.10 [imported] - thaliana >gi|2160141|gb|AAB60763.1| Strong similarity to Triticum
  misc_feature (1)..(296): Homolog of NCBI NO: 15220298 NR Description: serpin, putative; protein id: At1g47710.1
  misc_feature (298)..(365): Homolog of NCBI NO: 15220298 NR Description: serpin, putative; protein id: At1g47710.1
  misc_feature (1)..(294): Homolog of NCBI NO: 26224736 NR Description: serpin-like protein [Citrus x paradisi]
  misc_feature (298)..(365): Homolog of NCBI NO: 26224736 NR Description: serpin-like protein [Citrus x paradisi]
MKNQTHVAMILSGHVLSSAPKDSNVIFSPASINSAITMHAAGPGGDLVSGQILSFLRSSSIDELKTVFRELASVVYADRSATGGPKITAANGLWIDKSLPTDPKFKDLFENFFKAVYVPVDFRSEAEEVRKEVNSWVEHHTNNLIKDLLPDGSVTSLTNKIYANALSFKGAWKRPFEKYYTRDNDFYLVNGTSVSVPFMSSYENQYVRAYDGFKVLRLPYQRGSDDTNRKFSMYFYLPDKKDGLDDLLEKMASTPGFLDSHIPTYRDELEKFRIPKFKIEFGFSVTSVLDRLGLRSMSMYHKACVEIDEEGAEAAAATADGDCGCSLDFVEPPKKIDFVADHPFLFLIREEKTGTVLFVGQIFDPSGPCSGSNSDSDDY

SEQ ID NO: 83645 - protein, 371 aa, Arabidopsis thaliana
  peptide (1)..(371): Ceres Seq. ID no. 12671227
  misc_feature (1)..(371): Homolog of NCBI NO: 15222606 NR Description: hypothetical protein; protein id: At1g64030.1
  misc_feature (1)..(351): Homolog of NCBI NO: 25404920 NR Description: protein F22C12.22 [imported] - Arabidopsis >gi|6692103|gb|AAF24568.1|AC007764_10 F22C12.22 [Arabidopsis
  misc_feature (1)..(358): Homolog of NCBI NO: 6692102 NR Description: F22C12.21 [Arabidopsis thaliana]
  misc_feature (1)..(358): Homolog of NCBI NO: 15225956 NR Description: putative serpin; protein id: At2g14540.1, by cDNA: gi_18175862 [Arabidopsis thaliana]
  misc_feature (1)..(358): Homolog of NCBI NO: 15220721 NR Description: phloem serpin-1, putative; protein id:
  misc_feature (1)..(358): Homolog of NCBI NO: 25404364 NR Description: hypothetical protein F19K23.10 [imported] - thaliana >gi|2160141|gb|AAB60763.1| Strong similarity to Triticum
  misc_feature (1)..(288): Homolog of NCBI NO: 15220298 NR Description: serpin, putative; protein id: At1g47710.1
  misc_feature (290)..(357): Homolog of NCBI NO: 15220298 NR Description: serpin, putative; protein id: At1g47710.1
  misc_feature (1)..(286): Homolog of NCBI NO: 26224736 NR Description: serpin-like protein [Citrus x paradisi]
  misc_feature (290)..(357): Homolog of NCBI NO: 26224736 NR Description: serpin-like protein [Citrus x paradisi]
MILSGHVLSSAPKDSNVIFSPASINSAITMHAAGPGGDLVSGQILSFLRSSSIDELKTVFRELASVVYADRSATGGPKITAANGLWIDKSLPTDPKFKDLFENFFKAVYVPVDFRSEAEEVRKEVNSWVEHHTNNLIKDLLPDGSVTSLTNKIYANALSFKGAWKRPFEKYYTRDNDFYLVNGTSVSVPFMSSYENQYVRAYDGFKVLRLPYQRGSDDTNRKFSMYFYLPDKKDGLDDLLEKMASTPGFLDSHIPTYRDELEKFRIPKFKIEFGFSVTSVLDRLGLRSMSMYHKACVEIDEEGAEAAAATADGDCGCSLDFVEPPKKIDFVADHPFLFLIREEKTGTVLFVGQIFDPSGPCSGSNSDSDDY

SEQ ID NO: 83646 - DNA, 3941 bp, Arabidopsis thaliana
  misc_feature (1)..(3941): Ceres Seq. ID no. 12671228
  misc_feature: MA Experiment ID: 20000179 Result: Up-regulated in Transcription
  misc_feature: MA Experiment 20000179 PARAMETER Experiment Name: At_Germinating_Seeds_P Parameter: Age (hr) Value: 6 vs. 0
  misc_feature: MA Experiment 20000179 PARAMETER Experiment Name: At_Germinating_Seeds_P Parameter: Tissue Value: Germinating Seeds
  misc_feature: MA Experiment ID: 20000180 Result: Up-regulated in Transcription
  misc_feature: MA Experiment 20000180 PARAMETER Experiment Name: At_Germinating_Seeds_P Parameter: Age (hr) Value: 24 vs. 0
  misc_feature: MA Experiment 20000180 PARAMETER Experiment Name: At_Germinating_Seeds_P Parameter: Tissue Value: Germinating Seeds
  misc_feature: MA Experiment ID: 20000184 Result: Down-regulated in Transcription
  misc_feature: MA Experiment 20000184 PARAMETER Experiment Name: At_Shoots__P Parameter: Age (day) Value: 7
  misc_feature: MA Experiment 20000184 PARAMETER Experiment Name: At_Shoots__P Parameter: Tissue Value: Shoots vs. Whole Plant
  misc_feature: MA Experiment ID: 20000185 Result: Up-regulated in Transcription
  misc_feature: MA Experiment 20000185 PARAMETER Experiment Name: At_Roots__P Parameter: Age (day) Value: 7 vs. 21
  misc_feature: MA Experiment 20000185 PARAMETER Experiment Name: At_Roots__P Parameter: Organism Value: A. thaliana
  misc_feature: MA Experiment 20000185 PARAMETER Experiment Name: At_Roots__P Parameter: Tissue Value: Roots vs. Whole Plant
  misc_feature: MA Experiment ID: 20000439 Result: Up-regulated in Transcription
  misc_feature: MA Experiment 20000439 PARAMETER Experiment Name: At_Roots__P Parameter: Age (day) Value: 14 vs. 21
  misc_feature: MA Experiment 20000439 PARAMETER Experiment Name: At_Roots__P Parameter: Organism Value: A. thaliana
  misc_feature: MA Experiment 20000439 PARAMETER Experiment Name: At_Roots__P Parameter: Tissue Value: Roots vs. Whole Plant
  misc_feature: MA Experiment ID: 20000453 Result: Up-regulated in Transcription
  misc_feature: MA Experiment 20000453 PARAMETER Experiment Name: At_100uM_ABA_P Parameter: Age (day) Value: 15
  misc_feature: MA Experiment 20000453 PARAMETER Experiment Name: At_100uM_ABA_P Parameter: Organism Value: A. thaliana
  misc_feature: MA Experiment 20000453 PARAMETER Experiment Name: At_100uM_ABA_P Parameter: Plant Line Value: WS
  misc_feature: MA Experiment 20000453 PARAMETER Experiment Name: At_100uM_ABA_P Parameter: Timepoint (hr) Value: 24
  misc_feature: MA Experiment 20000453 PARAMETER Experiment Name: At_100uM_ABA_P Parameter: Tissue Value: Aerial
  misc_feature: MA Experiment 20000453 PARAMETER Experiment Name: At_100uM_ABA_P Parameter: Treatment Value: 100uM ABA vs. No Treatment
atgcataaactagaatgaccaacaaagatactctcaaagtctcacttgtctaaaaaacagataaaaatcatttccaattttgagaaaaggaaaaaaaacaactccaataatactttttgattttcttttcgttgcattaaaataaatgtggcaaaaatccaataatattactattataagttaaaaaaactcaaaaaaaaaaaaaagtatattccgtcaactttttctcagtccggttcaatcatctccatcatcgttgatctctctctctccgtcaacgttctctctataaagcagagagtttcacagcgcgtgaaaaatggcttttcccacttagccacaacgacgcgtttcaattctccatctctccctctctctctctctttcttcaaagattccaccaacctatacatatacttatatataatctatgctacgtgtatatacttccgatatccttcaaccaactctttgaattccgactttggatctatgaaaccgttctcaaagaacgatcggcgacggtggtcatttgattcagtttccgccggaaaaaccgccgtcggaagtgcatcaacttcaccgggaactgaatactccattaacggtgatcaagagttcgttgaagtcacaatcgatcttcaagacgatgacacaatcgttcttcgtagcgtcgagccagcaaccgccattaatgtcatcggagatatctccgacgacaacaccggaataatgactccggtttcgatttcgagatctccgacgatgaaacgaacttcatctaatcggttccgacaattctcacaagagcttaaagccgaagctgtggcgaaagcgaaacagttatctcaggagttgaaacgattctcatggtctcgttctttctcaggtaacttaaccactactagtaccgccgctaatcaaagcggcggtgctggtggtggtttggtgaactcggctttagaagcgcgagcgttgcgaaagcaacgtgctcagttagatcggactcggtctagtgctcaaagagctcttcgtggtttgagattcattagcaataagcaaaagaacgttgatggttggaacgatgttcaatcaaatttcgaaaaattcgaaaaaaatggttacatctatcgctccgatttcgctcaatgcataggaatgaaagattcgaaagaatttgcattggaactgttcgatgcattgagtagaagaagaagattaaaagtagagaaaatcaatcacgatgagctttatgagtattggtcacaaatcaacgacgagagttttgattctcgtctccagatcttcttcgacatagtggacaagaatgaagatgggagaattacagaagaggaagtaaaagagataataatgttgagtgcatctgcaaataagctatcaagattaaaggaacaagcagaggaatatgcagctttgattatggaagagttagatcctgaaagacttggctacatagagctatggcaactagagactttgcttctacaaaaagacacatacctcaattacagtcaagcattgagctatacgagccaagcattgagccaaaaccttcaagggttaaggggaaagagtcgaatacatagaatgagttcggatttcgtctacattatgcaagagaattggaaaaggatatgggttttatccttatggatcatgatcatgatcggattattcttgtggaaattcttccaatacaagcaaaaagatgcatttcatgtgatgggatattgtttactcacagccaaaggagcagctgaaacacttaaattcaacatggctctaatacttttcccagtttgcagaaacaccattacttggcttagatccacaagactctcttacttcgttccttttgatgataatatcaacttccacaagacaattgctggagccattgtagtagctgtgatccttcatattggagaccatcttgcttgtgatttccctagaattgttagagccaccgaatacgattacaatcggtatctgtttcattactttcaaacaaaacagccaacatacttcgacctcgttaagggacctgaaggaatcactgggattttaatggtcattttgatgattatttcattcacattagcaacaagatggtttaggcgtaacctagtcaagcttcctaagccatttgatcgactaaccggttttaacgccttttggtattcgcatcatttgttcgtcattgtttatatcttgcttattcttcatggtatcttcctctatttcgccaagccttggtatgttcgtacgacatggatgtatcttgcagtaccagttttactctatggtggagaaagaacacttaggtacttccgttctggttcttattcggttcgactgcttaaggttgctatatatcctggtaatgttctaacgctacaaatgtcgaaaccaactcaatttcgttacaaaagcggacaatacatgtttgtccaatgtcctgcggtttcgccattcgagtggcatccattctcaattacttccgcacctgaagatgattatatcagcattcacattagacaacttggtgattggactcaagaactcaaaagagtattctctgaagtttgtgagccaccggttggcggtaaaagcggacttctcagagccgacgaaacaacaaagaaaagtttgccaaagctattgatagatggaccgtacggtgcaccagcacaagattataggaaatatgatgttctcttattagttggtcttggcattggtgcaactccatttatcagtatcttgaaagatttgcttaacaacattgttaaaatggaagagcatgcggattcgatctcggatttcagtagatcatcagaatacagcacaggaagcaacggtgacacgccaagacgaaagagaatactaaaaaccacaaatgcttatttctactgggtcacaagagaacaaggctcttttgattggttcaaaggtgtcatgaacgaagttgcagaacttgaccaacggggtgtgatagagatgcataactatttaacaagtgtgtatgaagaaggtgatgctcgttctgctctcattacaatggttcaagctcttaatcatgccaaaaatggtgtcgacattgtctctggcactagggtcagaacacactttgcaagacctaattggaagaaggttctcacaaagctaagttccaagcattgcaatgcaagaataggagtgttttattgcggagtaccggttttagggaaggagcttagcaaactatgcaacacattcaatcaaaaaggttcaaccaagtttgaatttcacaaggagcatttctaaaagacaagaaggaagaagccaaaagccctctagattctttaatatctcaaatttagccacttatagtataaaggcaatctcttcactatttaattcaaagtgattaaacgttaacacactgtcaaaagtgagtgtgttaacgtttagctccacacgttctaggtttatatacaccgaggcatacgtgtaaatatacgagacagaagaaattcaagggggtttgatagaagcatatagtaaaattttaaaatttcttgtatagtaagcaaatgagatggagactctagaagagaggtgaggtttggtgagggatagcgacagtaatacgacgtcgtattcgattgtagaggaagtgcaatacagctgcagggaagataaatgatggaagcaaataatgcgttgataaggtccatgtgattaggaagatgacactctttttgggggatatttttttctattttttttttttagtggagtcggtgaaagagagactagagtttttagaatattggaagaatatttgggaataagggagttataatatttttgtatcattgtattatataactaatgtaaggtgtacaaagcataaaatttgatagttcctttcttct

SEQ ID NO: 83647 - protein, 944 aa, Arabidopsis thaliana
  peptide (1)..(944): Ceres Seq. ID no. 12671229
  misc_feature (418)..(943): Pfam Name: Ferric reductase like transmembrane component Pfam Description: Ferric reductase like transmembrane component
  misc_feature (208)..(944): Homolog of NCBI NO: 7489460 NR Description: cytochrome b245 beta chain homolog rbohA - rice
  misc_feature (72)..(944): Homolog of NCBI NO: 3242787 NR Description: respiratory burst oxidase protein E [Arabidopsis
  misc_feature (168)..(944): Homolog of NCBI NO: 28268680 NR Description: respiratory burst oxidase homolog [Nicotiana
  misc_feature (168)..(944): Homolog of NCBI NO: 20805911 NR Description: NADPH oxidase [Nicotiana tabacum]
  misc_feature (168)..(944): Homolog of NCBI NO: 8131846 NR Description: whitefly-induced gp91-phox [Lycopersicon
  misc_feature (153)..(944): Homolog of NCBI NO: 16549089 NR Description: respiratory burst oxidase homolog [Solanum
  misc_feature (168)..(944): Homolog of NCBI NO: 19715905 NR Description: NADPH oxidase [Nicotiana tabacum]
  misc_feature (137)..(944): Homolog of NCBI NO: 11358758 NR Description: respiratory burst oxidase protein D [imported] - thaliana >gi|3242789|gb|AAC39479.1| respiratory burst oxidase
  misc_feature (137)..(944): Homolog of NCBI NO: 15238842 NR Description: respiratory burst oxidase protein; protein id: supported by cDNA: gi_15983500, supported by cDNA: gi_3242788 thaliana] >gi|10177927|dbj|BAB11338.1| respiratory burst oxidase
  misc_feature (167)..(944): Homolog of NCBI NO: 26449420 NR Description: putative respiratory burst oxidase protein
MKPFSKNDRRRWSFDSVSAGKTAVGSASTSPGTEYSINGDQEFVEVTIDLQDDDTIVLRSVEPATAINVIGDISDDNTGIMTPVSISRSPTMKRTSSNRFRQFSQELKAEAVAKAKQLSQELKRFSWSRSFSGNLTTTSTAANQSGGAGGGLVNSALEARALRKQRAQLDRTRSSAQRALRGLRFISNKQKNVDGWNDVQSNFEKFEKNGYIYRSDFAQCIGMKDSKEFALELFDALSRRRRLKVEKINHDELYEYWSQINDESFDSRLQIFFDIVDKNEDGRITEEEVKEIIMLSASANKLSRLKEQAEEYAALIMEELDPERLGYIELWQLETLLLQKDTYLNYSQALSYTSQALSQNLQGLRGKSRIHRMSSDFVYIMQENWKRIWVLSLWIMIMIGLFLWKFFQYKQKDAFHVMGYCLLTAKGAAETLKFNMALILFPVCRNTITWLRSTRLSYFVPFDDNINFHKTIAGAIVVAVILHIGDHLACDFPRIVRATEYDYNRYLFHYFQTKQPTYFDLVKGPEGITGILMVILMIISFTLATRWFRRNLVKLPKPFDRLTGFNAFWYSHHLFVIVYILLILHGIFLYFAKPWYVRTTWMYLAVPVLLYGGERTLRYFRSGSYSVRLLKVAIYPGNVLTLQMSKPTQFRYKSGQYMFVQCPAVSPFEWHPFSITSAPEDDYISIHIRQLGDWTQELKRVFSEVCEPPVGGKSGLLRADETTKKSLPKLLIDGPYGAPAQDYRKYDVLLLVGLGIGATPFISILKDLLNNIVKMEEHADSISDFSRSSEYSTGSNGDTPRRKRILKTTNAYFYWVTREQGSFDWFKGVMNEVAELDQRGVIEMHNYLTSVYEEGDARSALITMVQALNHAKNGVDIVSGTRVRTHFARPNWKKVLTKLSSKHCNARIGVFYCGVPVLGKELSKLCNTFNQKGSTKFEFHKEHF

SEQ ID NO: 83648 - protein, 864 aa, Arabidopsis thaliana
  peptide (1)..(864): Ceres Seq. ID no. 12671230
  misc_feature (338)..(863): Pfam Name: Ferric reductase like transmembrane component Pfam Description: Ferric reductase like transmembrane component
  misc_feature (128)..(864): Homolog of NCBI NO: 7489460 NR Description: cytochrome b245 beta chain homolog rbohA - rice
  misc_feature (1)..(864): Homolog of NCBI NO: 3242787 NR Description: respiratory burst oxidase protein E [Arabidopsis
  misc_feature (88)..(864): Homolog of NCBI NO: 28268680 NR Description: respiratory burst oxidase homolog [Nicotiana
  misc_feature (88)..(864): Homolog of NCBI NO: 20805911 NR Description: NADPH oxidase [Nicotiana tabacum]
  misc_feature (88)..(864): Homolog of NCBI NO: 8131846 NR Description: whitefly-induced gp91-phox [Lycopersicon
  misc_feature (73)..(864): Homolog of NCBI NO: 16549089 NR Description: respiratory burst oxidase homolog [Solanum
  misc_feature (88)..(864): Homolog of NCBI NO: 19715905 NR Description: NADPH oxidase [Nicotiana tabacum]
  misc_feature (57)..(864): Homolog of NCBI NO: 11358758 NR Description: respiratory burst oxidase protein D [imported] - thaliana >gi|3242789|gb|AAC39479.1| respiratory burst oxidase
  misc_feature (57)..(864): Homolog of NCBI NO: 15238842 NR Description: respiratory burst oxidase protein; protein id: supported by cDNA: gi_15983500, supported by cDNA: gi_3242788 thaliana] >gi|10177927|dbj|BAB11338.1| respiratory burst oxidase
  misc_feature (87)..(864): Homolog of NCBI NO: 26449420 NR Description: putative respiratory burst oxidase protein
MTPVSISRSPTMKRTSSNRFRQFSQELKAEAVAKAKQLSQELKRFSWSRSFSGNLTTTSTAANQSGGAGGGLVNSALEARALRKQRAQLDRTRSSAQRALRGLRFISNKQKNVDGWNDVQSNFEKFEKNGYIYRSDFAQCIGMKDSKEFALELFDALSRRRRLKVEKINHDELYEYWSQINDESFDSRLQIFFDIVDKNEDGRITEEEVKEIIMLSASANKLSRLKEQAEEYAALIMEELDPERLGYIELWQLETLLLQKDTYLNYSQALSYTSQALSQNLQGLRGKSRIHRMSSDFVYIMQENWKRIWVLSLWIMIMIGLFLWKFFQYKQKDAFHVMGYCLLTAKGAAETLKFNMALILFPVCRNTITWLRSTRLSYFVPFDDNINFHKTIAGAIVVAVILHIGDHLACDFPRIVRATEYDYNRYLFHYFQTKQPTYFDLVKGPEGITGILMVILMIISFTLATRWFRRNLVKLPKPFDRLTGFNAFWYSHHLFVIVYILLILHGIFLYFAKPWYVRTTWMYLAVPVLLYGGERTLRYFRSGSYSVRLLKVAIYPGNVLTLQMSKPTQFRYKSGQYMFVQCPAVSPFEWHPFSITSAPEDDYISIHIRQLGDWTQELKRVFSEVCEPPVGGKSGLLRADETTKKSLPKLLIDGPYGAPAQDYRKYDVLLLVGLGIGATPFISILKDLLNNIVKMEEHADSISDFSRSSEYSTGSNGDTPRRKRILKTTNAYFYWVTREQGSFDWFKGVMNEVAELDQRGVIEMHNYLTSVYEEGDARSALITMVQALNHAKNGVDIVSGTRVRTHFARPNWKKVLTKLSSKHCNARIGVFYCGVPVLGKELSKLCNTFNQKGSTKFEFHKEHF

SEQ ID NO: 83649 - protein, 853 aa, Arabidopsis thaliana
  peptide (1)..(853): Ceres Seq. ID no. 12671231
  misc_feature (327)..(852): Pfam Name: Ferric reductase like transmembrane component Pfam Description: Ferric reductase like transmembrane component
  misc_feature (117)..(853): Homolog of NCBI NO: 7489460 NR Description: cytochrome b245 beta chain homolog rbohA - rice
  misc_feature (1)..(853): Homolog of NCBI NO: 3242787 NR Description: respiratory burst oxidase protein E [Arabidopsis
  misc_feature (77)..(853): Homolog of NCBI NO: 28268680 NR Description: respiratory burst oxidase homolog [Nicotiana
  misc_feature (77)..(853): Homolog of NCBI NO: 20805911 NR Description: NADPH oxidase [Nicotiana tabacum]
  misc_feature (77)..(853): Homolog of NCBI NO: 8131846 NR Description: whitefly-induced gp91-phox [Lycopersicon
  misc_feature (62)..(853): Homolog of NCBI NO: 16549089 NR Description: respiratory burst oxidase homolog [Solanum
  misc_feature (77)..(853): Homolog of NCBI NO: 19715905 NR Description: NADPH oxidase [Nicotiana tabacum]
  misc_feature (46)..(853): Homolog of NCBI NO: 11358758 NR Description: respiratory burst oxidase protein D [imported] - thaliana >gi|3242789|gb|AAC39479.1| respiratory burst oxidase
  misc_feature (46)..(853): Homolog of NCBI NO: 15238842 NR Description: respiratory burst oxidase protein; protein id: supported by cDNA: gi_15983500, supported by cDNA: gi_3242788 thaliana] >gi|10177927|dbj|BAB11338.1| respiratory burst oxidase
  misc_feature (76)..(853): Homolog of NCBI NO: 26449420 NR Description: putative respiratory burst oxidase protein
MKRTSSNRFRQFSQELKAEAVAKAKQLSQELKRFSWSRSFSGNLTTTSTAANQSGGAGGGLVNSALEARALRKQRAQLDRTRSSAQRALRGLRFISNKQKNVDGWNDVQSNFEKFEKNGYIYRSDFAQCIGMKDSKEFALELFDALSRRRRLKVEKINHDELYEYWSQINDESFDSRLQIFFDIVDKNEDGRITEEEVKEIIMLSASANKLSRLKEQAEEYAALIMEELDPERLGYIELWQLETLLLQKDTYLNYSQALSYTSQALSQNLQGLRGKSRIHRMSSDFVYIMQENWKRIWVLSLWIMIMIGLFLWKFFQYKQKDAFHVMGYCLLTAKGAAETLKFNMALILFPVCRNTITWLRSTRLSYFVPFDDNINFHKTIAGAIVVAVILHIGDHLACDFPRIVRATEYDYNRYLFHYFQTKQPTYFDLVKGPEGITGILMVILMIISFTLATRWFRRNLVKLPKPFDRLTGFNAFWYSHHLFVIVYILLILHGIFLYFAKPWYVRTTWMYLAVPVLLYGGERTLRYFRSGSYSVRLLKVAIYPGNVLTLQMSKPTQFRYKSGQYMFVQCPAVSPFEWHPFSITSAPEDDYISIHIRQLGDWTQELKRVFSEVCEPPVGGKSGLLRADETTKKSLPKLLIDGPYGAPAQDYRKYDVLLLVGLGIGATPFISILKDLLNNIVKMEEHADSISDFSRSSEYSTGSNGDTPRRKRILKTTNAYFYWVTREQGSFDWFKGVMNEVAELDQRGVIEMHNYLTSVYEEGDARSALITMVQALNHAKNGVDIVSGTRVRTHFARPNWKKVLTKLSSKHCNARIGVFYCGVPVLGKELSKLCNTFNQKGSTKFEFHKEHF

SEQ ID NO: 83650 - DNA, 1539 bp, Arabidopsis thaliana
  misc_feature (1)..(1539): Ceres Seq. ID no. 12671265
  misc_feature: MA Experiment ID: 20000227 Result: Down-regulated in Transcription
  misc_feature: MA Experiment 20000227 PARAMETER Experiment Name: At_Root-Tips-vs-Tops_P Parameter: Tissue Value: Root Tips vs. Root Tops
  misc_feature: MA Experiment ID: 20000265 Result: Up-regulated in Transcription
  misc_feature: MA Experiment 20000265 PARAMETER Experiment Name: At_Open_Flower_P Parameter: Age (day) Value: 21
  misc_feature: MA Experiment 20000265 PARAMETER Experiment Name: At_Open_Flower_P Parameter: Plant Line Value: WS
  misc_feature: MA Experiment 20000265 PARAMETER Experiment Name: At_Open_Flower_P Parameter: Tissue Value: Closed Flower vs. Whole Plant
  misc_feature: MA Experiment ID: 20000451 Result: Down-regulated in Transcription
  misc_feature: MA Experiment 20000451 PARAMETER Experiment Name: At_CS6879_Shoots-Roots_P Parameter: Age (day) Value: 14
  misc_feature: MA Experiment 20000451 PARAMETER Experiment Name: At_CS6879_Shoots-Roots_P Parameter: Organism Value: A. thaliana
  misc_feature: MA Experiment 20000451 PARAMETER Experiment Name: At_CS6879_Shoots-Roots_P Parameter: Plant Line Value: CS6879 vs. WS
  misc_feature: MA Experiment 20000451 PARAMETER Experiment Name: At_CS6879_Shoots-Roots_P Parameter: Tissue Value: Roots
  misc_feature: MA Experiment ID: 20000460 Result: Up-regulated in Transcription
  misc_feature: MA Experiment 20000460 PARAMETER Experiment Name: At_10percent_PEG_P Parameter: Age (day) Value: 12
  misc_feature: MA Experiment 20000460 PARAMETER Experiment Name: At_10percent_PEG_P Parameter: Organism Value: A. thaliana
  misc_feature: MA Experiment 20000460 PARAMETER Experiment Name: At_10percent_PEG_P Parameter: Plant Line Value: WS
  misc_feature: MA Experiment 20000460 PARAMETER Experiment Name: At_10percent_PEG_P Parameter: Timepoint (day) Value: 12
  misc_feature: MA Experiment 20000460 PARAMETER Experiment Name: At_10percent_PEG_P Parameter: Tissue Value: Whole Plant
  misc_feature: MA Experiment 20000460 PARAMETER Experiment Name: At_10percent_PEG_P Parameter: Treatment Value: 10percent PEG vs. No Treatment
  misc_feature: MA Experiment ID: 20000527 Result: Up-regulated in Transcription
  misc_feature: MA Experiment 20000527 PARAMETER Experiment Name: At_10percent_PEG_P Parameter: Age (day) Value: 20
  misc_feature: MA Experiment 20000527 PARAMETER Experiment Name: At_10percent_PEG_P Parameter: Organism Value: A. thaliana
  misc_feature: MA Experiment 20000527 PARAMETER Experiment Name: At_10percent_PEG_P Parameter: Plant Line Value: WS
  misc_feature: MA Experiment 20000527 PARAMETER Experiment Name: At_10percent_PEG_P Parameter: Timepoint (day) Value: 20
  misc_feature: MA Experiment 20000527 PARAMETER Experiment Name: At_10percent_PEG_P Parameter: Tissue Value: Whole Plant
  misc_feature: MA Experiment 20000527 PARAMETER Experiment Name: At_10percent_PEG_P Parameter: Treatment Value: 10percent PEG vs. No Treatment
  misc_feature: MA Experiment ID: 20000573 Result: Up-regulated in Transcription
  misc_feature: MA Experiment 20000573 PARAMETER Experiment Name: At_100uM_ABA_Mutants__P Parameter: Organism Value: A. thaliana
  misc_feature: MA Experiment 20000573 PARAMETER Experiment Name: At_100uM_ABA_Mutants__P Parameter: Plant Line Value: CS22 vs. Ler wt
  misc_feature: MA Experiment 20000573 PARAMETER Experiment Name: At_100uM_ABA_Mutants__P Parameter: Timepoint (hr) Value: N/A
  misc_feature: MA Experiment 20000573 PARAMETER Experiment Name: At_100uM_ABA_Mutants__P Parameter: Tissue Value: Whole Plant
  misc_feature: MA Experiment 20000573 PARAMETER Experiment Name: At_100uM_ABA_Mutants__P Parameter: Treatment Value: None
atgatggttacattagtactaaagtacgtcctcgtgatagtcatgaccttgatattaagagtcctatacgactccatttgttgctacttcctcacaccaagacgaatcaagaagtttatggaacgtcaaggcatcacggggcctaaaccccgtctcctcaccggaaacatcattgatatctccaaaatgctctctcactccgcttctaacgactgctcttccatccaccacaacatcgtcccacgccttcttcctcattacgtctcttggtccaaacaatatgggaagagatttataatgtggaacgggacagaaccgagactatgcctaacggagaccgagatgattaaagaattgctaacgaagcacaatccggtcaccgggaaatcatggctgcaacaacaaggaactaaagggtttatagggcgtgggcttctcatggccaacggcgaggcttggcaccaccaacgtcacatggcagctccggctttcacacgtgataggctcaaaggatacgctaagcatatggtggaatgcacgaagatgatggctgagaggctgagaaaggaggttggagaagaggtggaaattggtgaggagatgcggcggctcacggcggatataatatcgaggacggaatttggaagtagttgtgataaaggaaaggagctttttagtctactcactgtacttcaacgtctttgtgctcaagccactcgccacctctgttttcccggtagccggtttctacctagcaaatacaatagagaaataaagtctctgaaaacggaagtggaacgtcttttgatggagattatagacagccgaaaagacagtgtagagatcggtcggagtagctcatacggggatgacctcttagggcttcttttgaaccagatggatagcaacaagaacaaccttaatgttcaaatgataatggatgagtgcaagactttcttctttaccggtcatgagacaacctctcttctcctcacgtggactctcatgctccttgctcataatcccacttggcaggacaatgtccgcgatgaggtccggcaagtttgtggccaagatggtgtcccttccgttgaacagctctcaagtcttacttcgttaaacaaagtgataaacgagtcattaagactttaccctcctgccacacttttaccaagaatggcatttgaagacataaaactaggtgacctaatcatccctaaaggtttatctatttggatccctgtccttgcgatccatcatagtaatgaattatggggcgaagatgcgaacgagttcaaccctgaacgatttactactagaagttttgcatctagtcgccattttatgccttttgcggctggacctaggaactgcattggccagacttttgccatgatggaggcgaagataatattagcaatgcttgtttccaaattcagttttgcaatatcggagaactatagacatgctcctatagttgtgcttactataaaacctaagtatggagttcaattagttttgaagccacttgatctatga

SEQ ID NO: 83651 - protein, 512 aa, Arabidopsis thaliana
  peptide (1)..(512): Ceres Seq. ID no. 12671266
  misc_feature (1)..(512): Homolog of NCBI NO: 15219831 NR Description: cytochrome P450, putative; protein id: [Arabidopsis thaliana] >gi|25282618|pir||A96695 hypothetical
  misc_feature (2)..(510): Homolog of NCBI NO: 15240917 NR Description: cytochrome p450, putative; protein id: At5g38450.1
  misc_feature (1)..(437): Homolog of NCBI NO: 25553701 NR Description: putative cytochrome P450 [Oryza sativa (japonica
  misc_feature (119)..(510): Homolog of NCBI NO: 25553701 NR Description: putative cytochrome P450 [Oryza sativa (japonica
  misc_feature (1)..(511): Homolog of NCBI NO: 15226472 NR Description: cytochrome p450, putative; protein id: [Arabidopsis thaliana] >gi|7430708|pir||T02192 probable
  misc_feature (5)..(511): Homolog of NCBI NO: 18407219 NR Description: cytochrome P450, putative; protein id: supported by cDNA: gi_13605860, supported by cDNA: gi_20147140 thaliana] >gi|13605861|gb|AAK32916.1|AF367329_1
  misc_feature (5)..(511): Homolog of NCBI NO: 7484896 NR Description: cytochrome P450 homolog F14M4.21 - Arabidopsis
  misc_feature (10)..(512): Homolog of NCBI NO: 38112707 NR Description: cytochrome P450 [Triticum aestivum]
  misc_feature (33)..(512): Homolog of NCBI NO: 22324446 NR Description: putative cytochrome P450 [Oryza sativa (japonica
  misc_feature (10)..(510): Homolog of NCBI NO: 34895168 NR Description: putative cytochrome P450 [Oryza sativa (japonica group)] >gi|21104826|dbj|BAB93411.1| putative cytochrome P450
MMVTLVLKYVLVIVMTLILRVLYDSICCYFLTPRRIKKFMERQGITGPKPRLLTGNIIDISKMLSHSASNDCSSIHHNIVPRLLPHYVSWSKQYGKRFIMWNGTEPRLCLTETEMIKELLTKHNPVTGKSWLQQQGTKGFIGRGLLMANGEAWHHQRHMAAPAFTRDRLKGYAKHMVECTKMMAERLRKEVGEEVEIGEEMRRLTADIISRTEFGSSCDKGKELFSLLTVLQRLCAQATRHLCFPGSRFLPSKYNREIKSLKTEVERLLMEIIDSRKDSVEIGRSSSYGDDLLGLLLNQMDSNKNNLNVQMIMDECKTFFFTGHETTSLLLTWTLMLLAHNPTWQDNVRDEVRQVCGQDGVPSVEQLSSLTSLNKVINESLRLYPPATLLPRMAFEDIKLGDLIIPKGLSIWIPVLAIHHSNELWGEDANEFNPERFTTRSFASSRHFMPFAAGPRNCIGQTFAMMEAKIILAMLVSKFSFAISENYRHAPIVVLTIKPKYGVQLVLKPLDL

SEQ ID NO: 83652 - protein, 511 aa, Arabidopsis thaliana
  peptide (1)..(511): Ceres Seq. ID no. 12671267
  misc_feature (1)..(511): Homolog of NCBI NO: 15219831 NR Description: cytochrome P450, putative; protein id: [Arabidopsis thaliana] >gi|25282618|pir||A96695 hypothetical
  misc_feature (1)..(509): Homolog of NCBI NO: 15240917 NR Description: cytochrome p450, putative; protein id: At5g38450.1
  misc_feature (1)..(436): Homolog of NCBI NO: 25553701 NR Description: putative cytochrome P450 [Oryza sativa (japonica
  misc_feature (118)..(509): Homolog of NCBI NO: 25553701 NR Description: putative cytochrome P450 [Oryza sativa (japonica
  misc_feature (1)..(510): Homolog of NCBI NO: 15226472 NR Description: cytochrome p450, putative; protein id: [Arabidopsis thaliana] >gi|7430708|pir||T02192 probable
  misc_feature (4)..(510): Homolog of NCBI NO: 18407219 NR Description: cytochrome P450, putative; protein id: supported by cDNA: gi_13605860, supported by cDNA: gi_20147140 thaliana] >gi|13605861|gb|AAK32916.1|AF367329_1
  misc_feature (4)..(510): Homolog of NCBI NO: 7484896 NR Description: cytochrome P450 homolog F14M4.21 - Arabidopsis
  misc_feature (9)..(511): Homolog of NCBI NO: 38112707 NR Description: cytochrome P450 [Triticum aestivum]
  misc_feature (32)..(511): Homolog of NCBI NO: 22324446 NR Description: putative cytochrome P450 [Oryza sativa (japonica
  misc_feature (9)..(509): Homolog of NCBI NO: 34895168 NR Description: putative cytochrome P450 [Oryza sativa (japonica group)] >gi|21104826|dbj|BAB93411.1| putative cytochrome P450
MVTLVLKYVLVIVMTLILRVLYDSICCYFLTPRRIKKFMERQGITGPKPRLLTGNIIDISKMLSHSASNDCSSIHHNIVPRLLPHYVSWSKQYGKRFIMWNGTEPRLCLTETEMIKELLTKHNPVTGKSWLQQQGTKGFIGRGLLMANGEAWHHQRHMAAPAFTRDRLKGYAKHMVECTKMMAERLRKEVGEEVEIGEEMRRLTADIISRTEFGSSCDKGKELFSLLTVLQRLCAQATRHLCFPGSRFLPSKYNREIKSLKTEVERLLMEIIDSRKDSVEIGRSSSYGDDLLGLLLNQMDSNKNNLNVQMIMDECKTFFFTGHETTSLLLTWTLMLLAHNPTWQDNVRDEVRQVCGQDGVPSVEQLSSLTSLNKVINESLRLYPPATLLPRMAFEDIKLGDLIIPKGLSIWIPVLAIHHSNELWGEDANEFNPERFTTRSFASSRHFMPFAAGPRNCIGQTFAMMEAKIILAMLVSKFSFAISENYRHAPIVVLTIKPKYGVQLVLKPLDL

SEQ ID NO: 83653 - protein, 498 aa, Arabidopsis thaliana
  peptide (1)..(498): Ceres Seq. ID no. 12671268
  misc_feature (1)..(498): Homolog of NCBI NO: 15219831 NR Description: cytochrome P450, putative; protein id: [Arabidopsis thaliana] >gi|25282618|pir||A96695 hypothetical
  misc_feature (1)..(496): Homolog of NCBI NO: 15240917 NR Description: cytochrome p450, putative; protein id: At5g38450.1
  misc_feature (1)..(423): Homolog of NCBI NO: 25553701 NR Description: putative cytochrome P450 [Oryza sativa (japonica
  misc_feature (105)..(496): Homolog of NCBI NO: 25553701 NR Description: putative cytochrome P450 [Oryza sativa (japonica
  misc_feature (1)..(497): Homolog of NCBI NO: 15226472 NR Description: cytochrome p450, putative; protein id: [Arabidopsis thaliana] >gi|7430708|pir||T02192 probable
  misc_feature (1)..(497): Homolog of NCBI NO: 18407219 NR Description: cytochrome P450, putative; protein id: supported by cDNA: gi_13605860, supported by cDNA: gi_20147140 thaliana] >gi|13605861|gb|AAK32916.1|AF367329_1
  misc_feature (1)..(497): Homolog of NCBI NO: 7484896 NR Description: cytochrome P450 homolog F14M4.21 - Arabidopsis
  misc_feature (1)..(498): Homolog of NCBI NO: 38112707 NR Description: cytochrome P450 [Triticum aestivum]
  misc_feature (19)..(498): Homolog of NCBI NO: 22324446 NR Description: putative cytochrome P450 [Oryza sativa (japonica
  misc_feature (1)..(496): Homolog of NCBI NO: 34895168 NR Description: putative cytochrome P450 [Oryza sativa (japonica group)] >gi|21104826|dbj|BAB93411.1| putative cytochrome P450
MTLILRVLYDSICCYFLTPRRIKKFMERQGITGPKPRLLTGNIIDISKMLSHSASNDCSSIHHNIVPRLLPHYVSWSKQYGKRFIMWNGTEPRLCLTETEMIKELLTKHNPVTGKSWLQQQGTKGFIGRGLLMANGEAWHHQRHMAAPAFTRDRLKGYAKHMVECTKMMAERLRKEVGEEVEIGEEMRRLTADIISRTEFGSSCDKGKELFSLLTVLQRLCAQATRHLCFPGSRFLPSKYNREIKSLKTEVERLLMEIIDSRKDSVEIGRSSSYGDDLLGLLLNQMDSNKNNLNVQMIMDECKTFFFTGHETTSLLLTWTLMLLAHNPTWQDNVRDEVRQVCGQDGVPSVEQLSSLTSLNKVINESLRLYPPATLLPRMAFEDIKLGDLIIPKGLSIWIPVLAIHHSNELWGEDANEFNPERFTTRSFASSRHFMPFAAGPRNCIGQTFAMMEAKIILAMLVSKFSFAISENYRHAPIVVLTIKPKYGVQLVLKPLDL

SEQ ID NO: 83654 - DNA, 3108 bp, Arabidopsis thaliana
  misc_feature (1)..(3108): Ceres Seq. ID no. 12671277
  misc_feature: MA Experiment ID: 20000184 Result: Down-regulated in Transcription
  misc_feature: MA Experiment 20000184 PARAMETER Experiment Name: At_Shoots__P Parameter: Age (day) Value: 7
  misc_feature: MA Experiment 20000184 PARAMETER Experiment Name: At_Shoots__P Parameter: Tissue Value: Shoots vs. Whole Plant
  misc_feature: MA Experiment ID: 20001911 Result: Up-regulated in Transcription
  misc_feature: MA Experiment 20001911 PARAMETER Experiment Name: At_Drought_Reproduction_P Parameter: Age (day) Value: 40
  misc_feature: MA Experiment 20001911 PARAMETER Experiment Name: At_Drought_Reproduction_P Parameter: Organism Value: A. thaliana
  misc_feature: MA Experiment 20001911 PARAMETER Experiment Name: At_Drought_Reproduction_P Parameter: Plant Line Value: WS
  misc_feature: MA Experiment 20001911 PARAMETER Experiment Name: At_Drought_Reproduction_P Parameter: Timepoint (day) Value: 10
  misc_feature: MA Experiment 20001911 PARAMETER Experiment Name: At_Drought_Reproduction_P Parameter: Tissue Value: Flowers
  misc_feature: MA Experiment 20001911 PARAMETER Experiment Name: At_Drought_Reproduction_P Parameter: Treatment Value: Drought vs. No Drought
atgagtagcgtcgcagaggataattcctttacctgtgacatagcaaccatcttcgtggctatctgtcggaaccctcctgctaatccttcagattctttatttcgtcagtccataattgacttactctacttcaattcgtcaccagtcgttatgcaatctgaatatgaaattagtactctgtatcaagaagctcatagccgttggttgaaacctcctgaggtactcttcatattgcagaatcatgaaagcttgacgcttactaatacagctcctcaaagacctacaagtgggtctttgttgcttttcaataaaagggttcttaaattctttcgtaaagatggtcatcaatggcggagaaaaagagatggtagagctattgctgaagcacatgaacgacttaaggtgggtaacgctgaggcattgaattgttattatgctcatggagagcaagaccctacttttcggaggcgtatctactggatgttagatccggaatacgagcatattgtccttgttcattacagggatgtaagcgaacgagaagagggacaacaaactggtggacaagtttatcagtttgcaccaattctttccactcaaaatgtaagctacaatcagtacattggtgattcttcggacatatatcagcagtcttctacttcgccgggcgttgcagaggttaactctaacttggaaggcagtgcaagttcttctgagtttggacaggctttaaagatgcttaaggaacaactgagtatcggagatgaacatgttaattctgttgatccacactacattcaaccagaaagtcttgatagtctccagtttttagagtacagtgacatagatcaccttgctcaaccaacaactgtatatcagagaccagagaataacaaactagagagatgttatggaggcaattttggagcccaatacagtgccaagaatgattctaacaaactagagagatgctatggagggtatgttggtggagccgaataccattctagcaatctcatgctcgtaaagaatggttcaggaccttcaggtggtacaggagggagtggagatcaagggtctgaatcttggaaagatgtgttggaggcatgtgaggcttctatacctcttaactctgagggaagcacaccaagttctgcaaaaggattgctagctggattgcaggaagactcaaattggagttacagcaatcaggttgaccaatctacatttttgttgcctcaagatcttggttctttccaacttcctgcttcttattctgcactggtagctcctgagaataatggtgaatactgtggaatgatggaggacggaatgaaaatcggtctgcctttcgagcaagaaatgagagttacaggtgctcataatcaaaagtttactatccaggacatatcaccagactggggttacgcgaatgaaactacaaaggtgataatcattggatcatttctctgtgatccaacagaatctacatggtcttgcatgtttgggaatgctcaagttccttttgagatcattaaagaaggtgttatacggtgtgaagcccctcaatgtggtcctggaaaagtcaatttatgcattacttctggagatggactcttgtgtagtgaaataagggaatttgagtatcgtgagaagcctgacacatgttgccctaaatgcagtgagccacagacctctgatatgtccacaagtccaaatgagcttatattacttgtaaggtttgtgcaaacacttctatcagaccgatcgtcggaaagaaaaagtaacttagagtctggcaatgataagctgttgacgaaactgaaagctgatgatgatcaatggagacatgtcataggaacgatcatagatggcagtgcatcatcaacaagtacagttgattggcttctacaggaactgcttaaagacaagctggatacatggctgtcttcaagatcatgtgatgaagattacataacgtgttctttgtcaaagcaggaacaaggtattatccatatggttgcaggccttggcttcgagtgggcattttatccaatccttgctcatggagtcaatgtagattttcgtgatattaagggatggagcgctcttcattgggctgcacaatttggaagtgaaaaaatggtggctgcccttatagcttcaggggcatcggctggagcagtgactgatccaagtcggcaagatccaaatggcaaaactgcagcttcaatagctgcctctaatggccacaagggtcttgcaggttatctgtcagaggtggcgttaacaaaccatctctcatcgctcacacttgaagaaaccgagaattcaaaagacactgctcaagtgcaaactgagaaaactttgaattccatctcagaacaaagtccttccggtaacgaggatcaagtgtcattgaaagacacactggctgcagtacgaaatgcagctcaagcagctgcaagaatccaagcagcttttcgcgcacattcattcagaaagcgaaaacaaagagaagcagctttggttgcttgcttacaagagtatgggatgtattgtgaagatatagaagggatctcggccatgtcaaagctaacgtttggaaagggcaggaactacaattcagcagctttatctattcagaagaattttcgtggctataaagatcgtaaatgttttctagagcttcgccagaaagttgtaaagattcaggctcatgtgcgaggttaccaaataaggaaaaattacaaagtaatctgttgggcagtaagaattttagataaggttgtactcaggtggagaagaaaaggagttggactaagagggttcagacaagacgtagagagtacagaggacagtgaagacgaagacattctcaaggtgttccgcaaacagaaagtagatgttgcagtgaacgaggctttctctcgtgttctatcgatgtctaactctccagaggctcgccagcaataccaccgagtgctcaagagatattgtcagacaaaggctgagcttggaaaaacagagacattagttggagaggacgatgatgggttgttcgacatagctgatatggaatatgacactttgttttcattgccttga

SEQ ID NO: 83655 - protein, 1035 aa, Arabidopsis thaliana
  peptide (1)..(1035): Ceres Seq. ID no. 12671278
  misc_feature (699)..(731): Pfam Name: Ankyrin repeat Pfam Description: Ankyrin repeat
  misc_feature (440)..(1005): Homolog of NCBI NO: 38344575 NR Description: OSJNBa0053B21.7 [Oryza sativa (japonica
  misc_feature (51)..(240): Homolog of NCBI NO: 38344575 NR Description: OSJNBa0053B21.7 [Oryza sativa (japonica
  misc_feature (460)..(995): Homolog of NCBI NO: 37991923 NR Description: putative calmodulin-binding transcription factor
  misc_feature (56)..(243): Homolog of NCBI NO: 37991923 NR Description: putative calmodulin-binding transcription factor
  misc_feature (460)..(996): Homolog of NCBI NO: 30697970 NR Description: calmodulin-binding protein [Arabidopsis thaliana]
  misc_feature (56)..(238): Homolog of NCBI NO: 30697970 NR Description: calmodulin-binding protein [Arabidopsis thaliana]
  misc_feature (460)..(952): Homolog of NCBI NO: 33146619 NR Description: putative anther ethylene-upregulated protein ER1
  misc_feature (56)..(190): Homolog of NCBI NO: 33146619 NR Description: putative anther ethylene-upregulated protein ER1
  misc_feature (460)..(996): Homolog of NCBI NO: 15242417 NR Description: calmodulin-binding protein; protein id: [Arabidopsis thaliana] >gi|9955528|emb|CAC05467.1| putative
  misc_feature (38)..(177): Homolog of NCBI NO: 15242417 NR Description: calmodulin-binding protein; protein id: [Arabidopsis thaliana] >gi|9955528|emb|CAC05467.1| putative
MSSVAEDNSFTCDIATIFVAICRNPPANPSDSLFRQSIIDLLYFNSSPVVMQSEYEISTLYQEAHSRWLKPPEVLFILQNHESLTLTNTAPQRPTSGSLLLFNKRVLKFFRKDGHQWRRKRDGRAIAEAHERLKVGNAEALNCYYAHGEQDPTFRRRIYWMLDPEYEHIVLVHYRDVSEREEGQQTGGQVYQFAPILSTQNVSYNQYIGDSSDIYQQSSTSPGVAEVNSNLEGSASSSEFGQALKMLKEQLSIGDEHVNSVDPHYIQPESLDSLQFLEYSDIDHLAQPTTVYQRPENNKLERCYGGNFGAQYSAKNDSNKLERCYGGYVGGAEYHSSNLMLVKNGSGPSGGTGGSGDQGSESWKDVLEACEASIPLNSEGSTPSSAKGLLAGLQEDSNWSYSNQVDQSTFLLPQDLGSFQLPASYSALVAPENNGEYCGMMEDGMKIGLPFEQEMRVTGAHNQKFTIQDISPDWGYANETTKVIIIGSFLCDPTESTWSCMFGNAQVPFEIIKEGVIRCEAPQCGPGKVNLCITSGDGLLCSEIREFEYREKPDTCCPKCSEPQTSDMSTSPNELILLVRFVQTLLSDRSSERKSNLESGNDKLLTKLKADDDQWRHVIGTIIDGSASSTSTVDWLLQELLKDKLDTWLSSRSCDEDYITCSLSKQEQGIIHMVAGLGFEWAFYPILAHGVNVDFRDIKGWSALHWAAQFGSEKMVAALIASGASAGAVTDPSRQDPNGKTAASIAASNGHKGLAGYLSEVALTNHLSSLTLEETENSKDTAQVQTEKTLNSISEQSPSGNEDQVSLKDTLAAVRNAAQAAARIQAAFRAHSFRKRKQREAALVACLQEYGMYCEDIEGISAMSKLTFGKGRNYNSAALSIQKNFRGYKDRKCFLELRQKVVKIQAHVRGYQIRKNYKVICWAVRILDKVVLRWRRKGVGLRGFRQDVESTEDSEDEDILKVFRKQKVDVAVNEAFSRVLSMSNSPEARQQYHRVLKRYCQTKAELGKTETLVGEDDDGLFDIADMEYDTLFSLP

SEQ ID NO: 83656 - protein, 985 aa, Arabidopsis thaliana
  peptide (1)..(985): Ceres Seq. ID no. 12671279
  misc_feature (649)..(681): Pfam Name: Ankyrin repeat Pfam Description: Ankyrin repeat
  misc_feature (390)..(955): Homolog of NCBI NO: 38344575 NR Description: OSJNBa0053B21.7 [Oryza sativa (japonica
  misc_feature (1)..(190): Homolog of NCBI NO: 38344575 NR Description: OSJNBa0053B21.7 [Oryza sativa (japonica
  misc_feature (410)..(945): Homolog of NCBI NO: 37991923 NR Description: putative calmodulin-binding transcription factor
  misc_feature (6)..(193): Homolog of NCBI NO: 37991923 NR Description: putative calmodulin-binding transcription factor
  misc_feature (410)..(946): Homolog of NCBI NO: 30697970 NR Description: calmodulin-binding protein [Arabidopsis thaliana]
  misc_feature (6)..(188): Homolog of NCBI NO: 30697970 NR Description: calmodulin-binding protein [Arabidopsis thaliana]
  misc_feature (410)..(902): Homolog of NCBI NO: 33146619 NR Description: putative anther ethylene-upregulated protein ER1
  misc_feature (6)..(140): Homolog of NCBI NO: 33146619 NR Description: putative anther ethylene-upregulated protein ER1
  misc_feature (410)..(946): Homolog of NCBI NO: 15242417 NR Description: calmodulin-binding protein; protein id: [Arabidopsis thaliana] >gi|9955528|emb|CAC05467.1| putative
  misc_feature (1)..(127): Homolog of NCBI NO: 15242417 NR Description: calmodulin-binding protein; protein id: [Arabidopsis thaliana] >gi|9955528|emb|CAC05467.1| putative
MQSEYEISTLYQEAHSRWLKPPEVLFILQNHESLTLTNTAPQRPTSGSLLLFNKRVLKFFRKDGHQWRRKRDGRAIAEAHERLKVGNAEALNCYYAHGEQDPTFRRRIYWMLDPEYEHIVLVHYRDVSEREEGQQTGGQVYQFAPILSTQNVSYNQYIGDSSDIYQQSSTSPGVAEVNSNLEGSASSSEFGQALKMLKEQLSIGDEHVNSVDPHYIQPESLDSLQFLEYSDIDHLAQPTTVYQRPENNKLERCYGGNFGAQYSAKNDSNKLERCYGGYVGGAEYHSSNLMLVKNGSGPSGGTGGSGDQGSESWKDVLEACEASIPLNSEGSTPSSAKGLLAGLQEDSNWSYSNQVDQSTFLLPQDLGSFQLPASYSALVAPENNGEYCGMMEDGMKIGLPFEQEMRVTGAHNQKFTIQDISPDWGYANETTKVIIIGSFLCDPTESTWSCMFGNAQVPFEIIKEGVIRCEAPQCGPGKVNLCITSGDGLLCSEIREFEYREKPDTCCPKCSEPQTSDMSTSPNELILLVRFVQTLLSDRSSERKSNLESGNDKLLTKLKADDDQWRHVIGTIIDGSASSTSTVDWLLQELLKDKLDTWLSSRSCDEDYITCSLSKQEQGIIHMVAGLGFEWAFYPILAHGVNVDFRDIKGWSALHWAAQFGSEKMVAALIASGASAGAVTDPSRQDPNGKTAASIAASNGHKGLAGYLSEVALTNHLSSLTLEETENSKDTAQVQTEKTLNSISEQSPSGNEDQVSLKDTLAAVRNAAQAAARIQAAFRAHSFRKRKQREAALVACLQEYGMYCEDIEGISAMSKLTFGKGRNYNSAALSIQKNFRGYKDRKCFLELRQKVVKIQAHVRGYQIRKNYKVICWAVRILDKVVLRWRRKGVGLRGFRQDVESTEDSEDEDILKVFRKQKVDVAVNEAFSRVLSMSNSPEARQQYHRVLKRYCQTKAELGKTETLVGEDDDGLFDIADMEYDTLFSLP

SEQ ID NO: 83657 - protein, 875 aa, Arabidopsis thaliana
  peptide (1)..(875): Ceres Seq. ID no. 12671280
  misc_feature (539)..(571): Pfam Name: Ankyrin repeat Pfam Description: Ankyrin repeat
  misc_feature (280)..(845): Homolog of NCBI NO: 38344575 NR Description: OSJNBa0053B21.7 [Oryza sativa (japonica
  misc_feature (1)..(80): Homolog of NCBI NO: 38344575 NR Description: OSJNBa0053B21.7 [Oryza sativa (japonica
  misc_feature (300)..(835): Homolog of NCBI NO: 37991923 NR Description: putative calmodulin-binding transcription factor
  misc_feature (1)..(83): Homolog of NCBI NO: 37991923 NR Description: putative calmodulin-binding transcription factor
  misc_feature (300)..(836): Homolog of NCBI NO: 30697970 NR Description: calmodulin-binding protein [Arabidopsis thaliana]
  misc_feature (1)..(78): Homolog of NCBI NO: 30697970 NR Description: calmodulin-binding protein [Arabidopsis thaliana]
  misc_feature (300)..(792): Homolog of NCBI NO: 33146619 NR Description: putative anther ethylene-upregulated protein ER1
  misc_feature (1)..(30): Homolog of NCBI NO: 33146619 NR Description: putative anther ethylene-upregulated protein ER1
  misc_feature (300)..(836): Homolog of NCBI NO: 15242417 NR Description: calmodulin-binding protein; protein id: [Arabidopsis thaliana] >gi|9955528|emb|CAC05467.1| putative
  misc_feature (1)..(17): Homolog of NCBI NO: 15242417 NR Description: calmodulin-binding protein; protein id: [Arabidopsis thaliana] >gi|9955528|emb|CAC05467.1| putative
MLDPEYEHIVLVHYRDVSEREEGQQTGGQVYQFAPILSTQNVSYNQYIGDSSDIYQQSSTSPGVAEVNSNLEGSASSSEFGQALKMLKEQLSIGDEHVNSVDPHYIQPESLDSLQFLEYSDIDHLAQPTTVYQRPENNKLERCYGGNFGAQYSAKNDSNKLERCYGGYVGGAEYHSSNLMLVKNGSGPSGGTGGSGDQGSESWKDVLEACEASIPLNSEGSTPSSAKGLLAGLQEDSNWSYSNQVDQSTFLLPQDLGSFQLPASYSALVAPENNGEYCGMMEDGMKIGLPFEQEMRVTGAHNQKFTIQDISPDWGYANETTKVIIIGSFLCDPTESTWSCMFGNAQVPFEIIKEGVIRCEAPQCGPGKVNLCITSGDGLLCSEIREFEYREKPDTCCPKCSEPQTSDMSTSPNELILLVRFVQTLLSDRSSERKSNLESGNDKLLTKLKADDDQWRHVIGTIIDGSASSTSTVDWLLQELLKDKLDTWLSSRSCDEDYITCSLSKQEQGIIHMVAGLGFEWAFYPILAHGVNVDFRDIKGWSALHWAAQFGSEKMVAALIASGASAGAVTDPSRQDPNGKTAASIAASNGHKGLAGYLSEVALTNHLSSLTLEETENSKDTAQVQTEKTLNSISEQSPSGNEDQVSLKDTLAAVRNAAQAAARIQAAFRAHSFRKRKQREAALVACLQEYGMYCEDIEGISAMSKLTFGKGRNYNSAALSIQKNFRGYKDRKCFLELRQKVVKIQAHVRGYQIRKNYKVICWAVRILDKVVLRWRRKGVGLRGFRQDVESTEDSEDEDILKVFRKQKVDVAVNEAFSRVLSMSNSPEARQQYHRVLKRYCQTKAELGKTETLVGEDDDGLFDIADMEYDTLFSLP

SEQ ID NO: 83658 - DNA, 987 bp, Arabidopsis thaliana
  misc_feature (1)..(987): Ceres Seq. ID no. 12671281
  misc_feature: MA Experiment ID: 20000438 Result: Up-regulated in Transcription
  misc_feature: MA Experiment 20000438 PARAMETER Experiment Name: At_Shoots__P Parameter: Age (day) Value: 14
  misc_feature: MA Experiment 20000438 PARAMETER Experiment Name: At_Shoots__P Parameter: Tissue Value: Shoots vs. Whole Plant
  misc_feature: MA Experiment ID: 20001451 Result: Down-regulated in Transcription
  misc_feature: MA Experiment 20001451 PARAMETER Experiment Name: At_Far-red-induction_P Parameter: Age (day) Value: 7
  misc_feature: MA Experiment 20001451 PARAMETER Experiment Name: At_Far-red-induction_P Parameter: Light Value: Far-red vs. White
  misc_feature: MA Experiment 20001451 PARAMETER Experiment Name: At_Far-red-induction_P Parameter: Organism Value: A. thaliana
  misc_feature: MA Experiment 20001451 PARAMETER Experiment Name: At_Far-red-induction_P Parameter: Plant Line Value: Columbia
  misc_feature: MA Experiment 20001451 PARAMETER Experiment Name: At_Far-red-induction_P Parameter: Timepoint (hr) Value: 24
  misc_feature: MA Experiment 20001451 PARAMETER Experiment Name: At_Far-red-induction_P Parameter: Tissue Value: Whole Plant
atggctaaaatgatcatattaccaaaactggtccaaaagagtgttgtatcgccgaagcagacttcgcaagagagagtagtaacaagcacgttctctccgccaaaaccagccggagaaaatatctcagttcaacggagatgcgagttgtcagaatatcatgcgtcgggacacgtcatctctcacctccctcctccgttcgcggttgcgaagcccactccgacgacgtctctgcttcctcagccggtacgactaattaacgcggatgcagaagatgcgagttgtagtagcacgcctagttggagaatcaagaagagtctaacatgtgtttgctttaaccgcaagagagcatatgaacgcatttgctctaacttgacaccattgcaggaagaaagacttaaaaggttgaggaagagaatgaagaattactatgatgcatcacggcccgatcatcaggatgcattaagagcactgtggtcagcaacgtatcctgatgaaaagcttcaagatttgatctcagaccagtggaaaaatatgggatggcaaggaaaagatccatccactgatttcagaggagctggattcatttcactggagaatcttctattctttgcaaagactttctcgacttcgtttcagcgtctgttgaataaacaaggaggcaaaagagcggcttgggaatatccattcgctgtagcgggcgtcaacataaccttcatgatcatgcaaatgcttgaccttgaagcatcaaaacctaggagttttatacggttggtgttcttacaaatgttgtcagaaagcgaatgggcctttgatttgctttactgtgtggcctttgtggtaatggacaagcaatggctggacaagaacgccacctacatggaattcaacgatgtgctaagatgtacaagggggcagcttgagagagagctgatgatggatgatgttttcagaattgaggatatgccttctttctctcttctctcttag

SEQ ID NO: 83659 - protein, 328 aa, Arabidopsis thaliana
  peptide (1)..(328): Ceres Seq. ID no. 12671282
  misc_feature (148)..(309): Pfam Name: Protein of unknown function, DUF609 Pfam Description: Protein of unknown function, DUF609
  misc_feature (1)..(328): Homolog of NCBI NO: 18408759 NR Description: hypothetical protein; protein id: At1g67400.1 thaliana] >gi|9828622|gb|AAG00245.1|AC002130_10 F1N21.22
  misc_feature (95)..(328): Homolog of NCBI NO: 14140119 NR Description: putative protein [Oryza sativa]
  misc_feature (159)..(304): Homolog of NCBI NO: 15229278 NR Description: putative protein; protein id: At3g43400.1
  misc_feature (84)..(114): Homolog of NCBI NO: 15229278 NR Description: putative protein; protein id: At3g43400.1
  misc_feature (86)..(328): Homolog of NCBI NO: 18406626 NR Description: expressed protein; protein id: At2g44770.1, by cDNA: 36996., supported by cDNA: gi_15810013, supported by gi_17981658 [Arabidopsis thaliana] >gi|20197031|gb|AAC27479.2|
  misc_feature (95)..(328): Homolog of NCBI NO: 18411543 NR Description: putative protein; protein id: At3g60260.1, by cDNA: 104796., supported by cDNA: gi_17473881, supported by gi_20148670 [Arabidopsis thaliana] >gi|17473882|gb|AAL38361.1|
  misc_feature (86)..(328): Homolog of NCBI NO: 15810014 NR Description: At2g44770/F16B22.26 [Arabidopsis thaliana]
  misc_feature (95)..(327): Homolog of NCBI NO: 38345956 NR Description: OSJNBb0038F03.14 [Oryza sativa (japonica
  misc_feature (124)..(327): Homolog of NCBI NO: 18396599 NR Description: expressed protein; protein id: At3g03610.1, by cDNA: 28199., supported by cDNA: gi_18377968 [Arabidopsis >gi|18377969|gb|AAL67127.1| unknown protein [Arabidopsis
  misc_feature (112)..(327): Homolog of NCBI NO: 15218859 NR Description: hypothetical protein; protein id: At1g03620.1
MAKMIILPKLVQKSVVSPKQTSQERVVTSTFSPPKPAGENISVQRRCELSEYHASGHVISHLPPPFAVAKPTPTTSLLPQPVRLINADAEDASCSSTPSWRIKKSLTCVCFNRKRAYERICSNLTPLQEERLKRLRKRMKNYYDASRPDHQDALRALWSATYPDEKLQDLISDQWKNMGWQGKDPSTDFRGAGFISLENLLFFAKTFSTSFQRLLNKQGGKRAAWEYPFAVAGVNITFMIMQMLDLEASKPRSFIRLVFLQMLSESEWAFDLLYCVAFVVMDKQWLDKNATYMEFNDVLRCTRGQLERELMMDDVFRIEDMPSFSLLS

SEQ ID NO: 83660 - protein, 325 aa, Arabidopsis thaliana
  peptide (1)..(325): Ceres Seq. ID no. 12671283
  misc_feature (145)..(306): Pfam Name: Protein of unknown function, DUF609 Pfam Description: Protein of unknown function, DUF609
  misc_feature (1)..(325): Homolog of NCBI NO: 18408759 NR Description: hypothetical protein; protein id: At1g67400.1 thaliana] >gi|9828622|gb|AAG00245.1|AC002130_10 F1N21.22
  misc_feature (92)..(325): Homolog of NCBI NO: 14140119 NR Description: putative protein [Oryza sativa]
  misc_feature (156)..(301): Homolog of NCBI NO: 15229278 NR Description: putative protein; protein id: At3g43400.1
  misc_feature (81)..(111): Homolog of NCBI NO: 15229278 NR Description: putative protein; protein id: At3g43400.1
  misc_feature (83)..(325): Homolog of NCBI NO: 18406626 NR Description: expressed protein; protein id: At2g44770.1, by cDNA: 36996., supported by cDNA: gi_15810013, supported by gi_17981658 [Arabidopsis thaliana] >gi|20197031|gb|AAC27479.2|
  misc_feature (92)..(325): Homolog of NCBI NO: 18411543 NR Description: putative protein; protein id: At3g60260.1, by cDNA: 104796., supported by cDNA: gi_17473881, supported by gi_20148670 [Arabidopsis thaliana] >gi|17473882|gb|AAL38361.1|
  misc_feature (83)..(325): Homolog of NCBI NO: 15810014 NR Description: At2g44770/F16B22.26 [Arabidopsis thaliana]
  misc_feature (92)..(324): Homolog of NCBI NO: 38345956 NR Description: OSJNBb0038F03.14 [Oryza sativa (japonica
  misc_feature (121)..(324): Homolog of NCBI NO: 18396599 NR Description: expressed protein; protein id: At3g03610.1, by cDNA: 28199., supported by cDNA: gi_18377968 [Arabidopsis >gi|18377969|gb|AAL67127.1| unknown protein [Arabidopsis
  misc_feature (109)..(324): Homolog of NCBI NO: 15218859 NR Description: hypothetical protein; protein id: At1g03620.1
MIILPKLVQKSVVSPKQTSQERVVTSTFSPPKPAGENISVQRRCELSEYHASGHVISHLPPPFAVAKPTPTTSLLPQPVRLINADAEDASCSSTPSWRIKKSLTCVCFNRKRAYERICSNLTPLQEERLKRLRKRMKNYYDASRPDHQDALRALWSATYPDEKLQDLISDQWKNMGWQGKDPSTDFRGAGFISLENLLFFAKTFSTSFQRLLNKQGGKRAAWEYPFAVAGVNITFMIMQMLDLEASKPRSFIRLVFLQMLSESEWAFDLLYCVAFVVMDKQWLDKNATYMEFNDVLRCTRGQLERELMMDDVFRIEDMPSFSLLS

SEQ ID NO: 83661 - protein, 190 aa, Arabidopsis thaliana
  peptide (1)..(190): Ceres Seq. ID no. 12671284
  misc_feature (10)..(171): Pfam Name: Protein of unknown function, DUF609 Pfam Description: Protein of unknown function, DUF609
  misc_feature (1)..(190): Homolog of NCBI NO: 18408759 NR Description: hypothetical protein; protein id: At1g67400.1 thaliana] >gi|9828622|gb|AAG00245.1|AC002130_10 F1N21.22
  misc_feature (1)..(190): Homolog of NCBI NO: 14140119 NR Description: putative protein [Oryza sativa]
  misc_feature (21)..(166): Homolog of NCBI NO: 15229278 NR Description: putative protein; protein id: At3g43400.1
  misc_feature (1)..(190): Homolog of NCBI NO: 18406626 NR Description: expressed protein; protein id: At2g44770.1, by cDNA: 36996., supported by cDNA: gi_15810013, supported by gi_17981658 [Arabidopsis thaliana] >gi|20197031|gb|AAC27479.2|
  misc_feature (1)..(190): Homolog of NCBI NO: 18411543 NR Description: putative protein; protein id: At3g60260.1, by cDNA: 104796., supported by cDNA: gi_17473881, supported by gi_20148670 [Arabidopsis thaliana] >gi|17473882|gb|AAL38361.1|
  misc_feature (1)..(190): Homolog of NCBI NO: 15810014 NR Description: At2g44770/F16B22.26 [Arabidopsis thaliana]
  misc_feature (1)..(189): Homolog of NCBI NO: 38345956 NR Description: OSJNBb0038F03.14 [Oryza sativa (japonica
  misc_feature (1)..(189): Homolog of NCBI NO: 18396599 NR Description: expressed protein; protein id: At3g03610.1, by cDNA: 28199., supported by cDNA: gi_18377968 [Arabidopsis >gi|18377969|gb|AAL67127.1| unknown protein [Arabidopsis
  misc_feature (1)..(189): Homolog of NCBI NO: 15218859 NR Description: hypothetical protein; protein id: At1g03620.1
  misc_feature (1)..(189): Homolog of NCBI NO: 21555509 NR Description: unknown [Arabidopsis thaliana]
MKNYYDASRPDHQDALRALWSATYPDEKLQDLISDQWKNMGWQGKDPSTDFRGAGFISLENLLFFAKTFSTSFQRLLNKQGGKRAAWEYPFAVAGVNITFMIMQMLDLEASKPRSFIRLVFLQMLSESEWAFDLLYCVAFVVMDKQWLDKNATYMEFNDVLRCTRGQLERELMMDDVFRIEDMPSFSLLS

SEQ ID NO: 83662 - DNA, 1395 bp, Arabidopsis thaliana
  misc_feature (1)..(1395): Ceres Seq. ID no. 12671297
  misc_feature: MA Experiment ID: 20000182 Result: Up-regulated in Transcription
  misc_feature: MA Experiment 20000182 PARAMETER Experiment Name: At_2mM_SA_P Parameter: Age (day) Value: 14
  misc_feature: MA Experiment 20000182 PARAMETER Experiment Name: At_2mM_SA_P Parameter: Organism Value: A. thaliana
  misc_feature: MA Experiment 20000182 PARAMETER Experiment Name: At_2mM_SA_P Parameter: Plant Line Value: WS
  misc_feature: MA Experiment 20000182 PARAMETER Experiment Name: At_2mM_SA_P Parameter: Timepoint (hr) Value: 6
  misc_feature: MA Experiment 20000182 PARAMETER Experiment Name: At_2mM_SA_P Parameter: Tissue Value: Aerial
  misc_feature: MA Experiment 20000182 PARAMETER Experiment Name: At_2mM_SA_P Parameter: Treatment Value: 2mM SA vs. No Treatment
  misc_feature: MA Experiment ID: 20000265 Result: Up-regulated in Transcription
  misc_feature: MA Experiment 20000265 PARAMETER Experiment Name: At_Open_Flower_P Parameter: Age (day) Value: 21
  misc_feature: MA Experiment 20000265 PARAMETER Experiment Name: At_Open_Flower_P Parameter: Plant Line Value: WS
  misc_feature: MA Experiment 20000265 PARAMETER Experiment Name: At_Open_Flower_P Parameter: Tissue Value: Closed Flower vs. Whole Plant
  misc_feature: MA Experiment ID: 20000439 Result: Up-regulated in Transcription
  misc_feature: MA Experiment 20000439 PARAMETER Experiment Name: At_Roots__P Parameter: Age (day) Value: 14 vs. 21
  misc_feature: MA Experiment 20000439 PARAMETER Experiment Name: At_Roots__P Parameter: Organism Value: A. thaliana
  misc_feature: MA Experiment 20000439 PARAMETER Experiment Name: At_Roots__P Parameter: Tissue Value: Roots vs. Whole Plant
  misc_feature: MA Experiment ID: 20000496 Result: Up-regulated in Transcription
  misc_feature: MA Experiment 20000496 PARAMETER Experiment Name: At_Guard_Cells_P Parameter: Harvest Date Value: 7/19/2002
  misc_feature: MA Experiment 20000496 PARAMETER Experiment Name: At_Guard_Cells_P Parameter: Organism Value: Canola
  misc_feature: MA Experiment 20000496 PARAMETER Experiment Name: At_Guard_Cells_P Parameter: Tissue Value: Guard Cells vs. Leaves
  misc_feature: MA Experiment ID: 20000527 Result: Down-regulated in Transcription
  misc_feature: MA Experiment 20000527 PARAMETER Experiment Name: At_10percent_PEG_P Parameter: Age (day) Value: 20
  misc_feature: MA Experiment 20000527 PARAMETER Experiment Name: At_10percent_PEG_P Parameter: Organism Value: A. thaliana
  misc_feature: MA Experiment 20000527 PARAMETER Experiment Name: At_10percent_PEG_P Parameter: Plant Line Value: WS
  misc_feature: MA Experiment 20000527 PARAMETER Experiment Name: At_10percent_PEG_P Parameter: Timepoint (day) Value: 20
  misc_feature: MA Experiment 20000527 PARAMETER Experiment Name: At_10percent_PEG_P Parameter: Tissue Value: Whole Plant
  misc_feature: MA Experiment 20000527 PARAMETER Experiment Name: At_10percent_PEG_P Parameter: Treatment Value: 10percent PEG vs. No Treatment
atgactaataaacttcgctcagaagaaacaatcacgtccctttcttctttcatggctagtacacttagcattgcgtcaccctctccttgttctattccattgtcggtcacaaaggtctcgcctttaaagagaaagagacctacccacttaaatatccctgacctcaatcctcaacaaccgatttcaactgattacttccgtttcagagagggtgacgcaaaggtctcgcctttaaagagaaagagacctgcccacctaaatatccctgacctcaatcctcaacaaccgattcgaactgattacttcagtttcacagactttgctcaccaaaacggcaccgtaagcttcggtggcaatggttttggtgtcgtctccagaaacggtaagaagaagtttatggaagatactcacagaattgttccttgtttggttggtaactccaaaaagagtttctttggagtttatgatggtcatggaggtgctaaagctgcagaatttgtggctgagaatttgcacaaatatgttgttgagatgatggagaattgtaaggggaaggaggagaaagttgaagcctttaaggctgcttttttgaggactgatcgtgatttcctagaaaaggtaataaaggaacaatctttgaagggtgttgtgagtggtgcttgctgtgttactgctgtgatacaagatcaggagatgattgtatcaaatttgggagattgtagagctgtcctgtgtagagcaggtgttgctgaggctcttactgatgatcacaaaccaggaagggatgatgaaaaggaaagaattgagagtcagagtttgatacctttcatgacatttggtttacagggaggttatgtcgataatcatcaaggggcttggcgagttcagggaatacttgcggtttccagaagcattggagatgcacacttaaagaagtgggtggttgctgaacctgagacgagagtactagaactggaacaagatatggagtttcttgtcttagcttctgatggactttgggatgtggttagcaatcaagaagctgtttataccgtgttgcatgttctagctcagagaaagacgcctaaagaaagtgaggaggagaacttggttcagggctttgtcaatatgagcccatcttcgaaacttcgtcgagcttcactggtcaagtctcccagatgtgctaaatcccaaagttactactacaactcagagaatgaatcaccctcactcaaccgtgaaatagggagttcaccttcaaagtcaccgataacaccgtggaagtctctttgggccaaagcggcttgcaaagagcttgcgaacctggctgcaaaaagaggcagtatggatgatatcacagtggtgataattgatctcaaccattacaaaggctga

SEQ ID NO: 83663 - protein, 464 aa, Arabidopsis thaliana
  peptide (1)..(464): Ceres Seq. ID no. 12671298
  misc_feature (119)..(378): Pfam Name: Protein phosphatase 2C Pfam Description: Protein phosphatase 2C
  misc_feature (1)..(464): Homolog of NCBI NO: 15220548 NR Description: protein phosphatase 2C (PP2C); protein id:
  misc_feature (21)..(349): Homolog of NCBI NO: 25352225 NR Description: hypothetical protein [imported] - Arabidopsis >gi|8954030|gb|AAF82204.1|AC067971_12 Contains similarity to phosphatase 2C from Arabidopsis thaliana gb|AF085279. It contains
  misc_feature (435)..(461): Homolog of NCBI NO: 25352225 NR Description: hypothetical protein [imported] - Arabidopsis >gi|8954030|gb|AAF82204.1|AC067971_12 Contains similarity to phosphatase 2C from Arabidopsis thaliana gb|AF085279. It contains
  misc_feature (18)..(352): Homolog of NCBI NO: 15225656 NR Description: protein phosphatase 2C (PP2C); protein id: [Arabidopsis thaliana] >gi|25352216|pir||C84826 protein
  misc_feature (434)..(462): Homolog of NCBI NO: 15225656 NR Description: protein phosphatase 2C (PP2C); protein id: [Arabidopsis thaliana] >gi|25352216|pir||C84826 protein
  misc_feature (208)..(349): Homolog of NCBI NO: 15227687 NR Description: protein phosphatase 2C (PP2C); protein id: supported by cDNA: gi_13877670 [Arabidopsis thaliana]
  misc_feature (434)..(462): Homolog of NCBI NO: 15227687 NR Description: protein phosphatase 2C (PP2C); protein id: supported by cDNA: gi_13877670 [Arabidopsis thaliana]
  misc_feature (197)..(349): Homolog of NCBI NO: 7488754 NR Description: protein phosphatase 2C - alfalfa
  misc_feature (435)..(462): Homolog of NCBI NO: 7488754 NR Description: protein phosphatase 2C - alfalfa
  misc_feature (208)..(349): Homolog of NCBI NO: 15222312 NR Description: protein phosphatase 2C (PP2C); protein id: supported by cDNA: gi_20258779 [Arabidopsis thaliana]
MTNKLRSEETITSLSSFMASTLSIASPSPCSIPLSVTKVSPLKRKRPTHLNIPDLNPQQPISTDYFRFREGDAKVSPLKRKRPAHLNIPDLNPQQPIRTDYFSFTDFAHQNGTVSFGGNGFGVVSRNGKKKFMEDTHRIVPCLVGNSKKSFFGVYDGHGGAKAAEFVAENLHKYVVEMMENCKGKEEKVEAFKAAFLRTDRDFLEKVIKEQSLKGVVSGACCVTAVIQDQEMIVSNLGDCRAVLCRAGVAEALTDDHKPGRDDEKERIESQSLIPFMTFGLQGGYVDNHQGAWRVQGILAVSRSIGDAHLKKWVVAEPETRVLELEQDMEFLVLASDGLWDVVSNQEAVYTVLHVLAQRKTPKESEEENLVQGFVNMSPSSKLRRASLVKSPRCAKSQSYYYNSENESPSLNREIGSSPSKSPITPWKSLWAKAACKELANLAAKRGSMDDITVVIIDLNHYKG

SEQ ID NO: 83664 - protein, 447 aa, Arabidopsis thaliana
  peptide (1)..(447): Ceres Seq. ID no. 12671299
  misc_feature (102)..(361): Pfam Name: Protein phosphatase 2C Pfam Description: Protein phosphatase 2C
  misc_feature (1)..(447): Homolog of NCBI NO: 15220548 NR Description: protein phosphatase 2C (PP2C); protein id:
  misc_feature (4)..(332): Homolog of NCBI NO: 25352225 NR Description: hypothetical protein [imported] - Arabidopsis >gi|8954030|gb|AAF82204.1|AC067971_12 Contains similarity to phosphatase 2C from Arabidopsis thaliana gb|AF085279. It contains
  misc_feature (418)..(444): Homolog of NCBI NO: 25352225 NR Description: hypothetical protein [imported] - Arabidopsis >gi|8954030|gb|AAF82204.1|AC067971_12 Contains similarity to phosphatase 2C from Arabidopsis thaliana gb|AF085279. It contains
  misc_feature (1)..(335): Homolog of NCBI NO: 15225656 NR Description: protein phosphatase 2C (PP2C); protein id: [Arabidopsis thaliana] >gi|25352216|pir||C84826 protein
  misc_feature (417)..(445): Homolog of NCBI NO: 15225656 NR Description: protein phosphatase 2C (PP2C); protein id: [Arabidopsis thaliana] >gi|25352216|pir||C84826 protein
  misc_feature (191)..(332): Homolog of NCBI NO: 15227687 NR Description: protein phosphatase 2C (PP2C); protein id: supported by cDNA: gi_13877670 [Arabidopsis thaliana]
  misc_feature (417)..(445): Homolog of NCBI NO: 15227687 NR Description: protein phosphatase 2C (PP2C); protein id: supported by cDNA: gi_13877670 [Arabidopsis thaliana]
  misc_feature (180)..(332): Homolog of NCBI NO: 7488754 NR Description: protein phosphatase 2C - alfalfa
  misc_feature (418)..(445): Homolog of NCBI NO: 7488754 NR Description: protein phosphatase 2C - alfalfa
  misc_feature (191)..(332): Homolog of NCBI NO: 15222312 NR Description: protein phosphatase 2C (PP2C); protein id: supported by cDNA: gi_20258779 [Arabidopsis thaliana]
MASTLSIASPSPCSIPLSVTKVSPLKRKRPTHLNIPDLNPQQPISTDYFRFREGDAKVSPLKRKRPAHLNIPDLNPQQPIRTDYFSFTDFAHQNGTVSFGGNGFGVVSRNGKKKFMEDTHRIVPCLVGNSKKSFFGVYDGHGGAKAAEFVAENLHKYVVEMMENCKGKEEKVEAFKAAFLRTDRDFLEKVIKEQSLKGVVSGACCVTAVIQDQEMIVSNLGDCRAVLCRAGVAEALTDDHKPGRDDEKERIESQSLIPFMTFGLQGGYVDNHQGAWRVQGILAVSRSIGDAHLKKWVVAEPETRVLELEQDMEFLVLASDGLWDVVSNQEAVYTVLHVLAQRKTPKESEEENLVQGFVNMSPSSKLRRASLVKSPRCAKSQSYYYNSENESPSLNREIGSSPSKSPITPWKSLWAKAACKELANLAAKRGSMDDITVVIIDLNHYKG

SEQ ID NO: 83665 - protein, 332 aa, Arabidopsis thaliana
  peptide (1)..(332): Ceres Seq. ID no. 12671300
  misc_feature (1)..(246): Pfam Name: Protein phosphatase 2C Pfam Description: Protein phosphatase 2C
  misc_feature (1)..(332): Homolog of NCBI NO: 15220548 NR Description: protein phosphatase 2C (PP2C); protein id:
  misc_feature (1)..(217): Homolog of NCBI NO: 25352225 NR Description: hypothetical protein [imported] - Arabidopsis >gi|8954030|gb|AAF82204.1|AC067971_12 Contains similarity to phosphatase 2C from Arabidopsis thaliana gb|AF085279. It contains
  misc_feature (303)..(329): Homolog of NCBI NO: 25352225 NR Description: hypothetical protein [imported] - Arabidopsis >gi|8954030|gb|AAF82204.1|AC067971_12 Contains similarity to phosphatase 2C from Arabidopsis thaliana gb|AF085279. It contains
  misc_feature (1)..(220): Homolog of NCBI NO: 15225656 NR Description: protein phosphatase 2C (PP2C); protein id: [Arabidopsis thaliana] >gi|25352216|pir||C84826 protein
  misc_feature (302)..(330): Homolog of NCBI NO: 15225656 NR Description: protein phosphatase 2C (PP2C); protein id: [Arabidopsis thaliana] >gi|25352216|pir||C84826 protein
  misc_feature (76)..(217): Homolog of NCBI NO: 15227687 NR Description: protein phosphatase 2C (PP2C); protein id: supported by cDNA: gi_13877670 [Arabidopsis thaliana]
  misc_feature (302)..(330): Homolog of NCBI NO: 15227687 NR Description: protein phosphatase 2C (PP2C); protein id: supported by cDNA: gi_13877670 [Arabidopsis thaliana]
  misc_feature (65)..(217): Homolog of NCBI NO: 7488754 NR Description: protein phosphatase 2C - alfalfa
  misc_feature (303)..(330): Homolog of NCBI NO: 7488754 NR Description: protein phosphatase 2C - alfalfa
  misc_feature (76)..(217): Homolog of NCBI NO: 15222312 NR Description: protein phosphatase 2C (PP2C); protein id: supported by cDNA: gi_20258779 [Arabidopsis thaliana]
MEDTHRIVPCLVGNSKKSFFGVYDGHGGAKAAEFVAENLHKYVVEMMENCKGKEEKVEAFKAAFLRTDRDFLEKVIKEQSLKGVVSGACCVTAVIQDQEMIVSNLGDCRAVLCRAGVAEALTDDHKPGRDDEKERIESQSLIPFMTFGLQGGYVDNHQGAWRVQGILAVSRSIGDAHLKKWVVAEPETRVLELEQDMEFLVLASDGLWDVVSNQEAVYTVLHVLAQRKTPKESEEENLVQGFVNMSPSSKLRRASLVKSPRCAKSQSYYYNSENESPSLNREIGSSPSKSPITPWKSLWAKAACKELANLAAKRGSMDDITVVIIDLNHYKG

SEQ ID NO: 83666 - DNA, 1691 bp, Arabidopsis thaliana
  misc_feature (1)..(1691): Ceres Seq. ID no. 12671321
  misc_feature: MA Experiment ID: 20000437 Result: Up-regulated in Transcription
  misc_feature: MA Experiment 20000437 PARAMETER Experiment Name: At_Drought_P Parameter: Age (day) Value: 8
  misc_feature: MA Experiment 20000437 PARAMETER Experiment Name: At_Drought_P Parameter: Organism Value: A. thaliana
  misc_feature: MA Experiment 20000437 PARAMETER Experiment Name: At_Drought_P Parameter: Plant Line Value: WS
  misc_feature: MA Experiment 20000437 PARAMETER Experiment Name: At_Drought_P Parameter: Timepoint (hr) Value: 24
  misc_feature: MA Experiment 20000437 PARAMETER Experiment Name: At_Drought_P Parameter: Tissue Value: Whole Plant
  misc_feature: MA Experiment 20000437 PARAMETER Experiment Name: At_Drought_P Parameter: Treatment Value: Drought vs. No Drought
  misc_feature: MA Experiment ID: 20001555 Result: Up-regulated in Transcription
  misc_feature: MA Experiment 20001555 PARAMETER Experiment Name: At_Drought_Soil_Dry_P Parameter: Age (day) Value: 24
  misc_feature: MA Experiment 20001555 PARAMETER Experiment Name: At_Drought_Soil_Dry_P Parameter: Organism Value: A. thaliana
  misc_feature: MA Experiment 20001555 PARAMETER Experiment Name: At_Drought_Soil_Dry_P Parameter: Plant Line Value: WS
  misc_feature: MA Experiment 20001555 PARAMETER Experiment Name: At_Drought_Soil_Dry_P Parameter: Post Timepoint (hr) Value: None
  misc_feature: MA Experiment 20001555 PARAMETER Experiment Name: At_Drought_Soil_Dry_P Parameter: Post-Treatment Value: None
  misc_feature: MA Experiment 20001555 PARAMETER Experiment Name: At_Drought_Soil_Dry_P Parameter: Timepoint (day) Value: 10
  misc_feature: MA Experiment 20001555 PARAMETER Experiment Name: At_Drought_Soil_Dry_P Parameter: Treatment Value: Drought vs. No Drought
  misc_feature: MA Experiment ID: 20001905 Result: Up-regulated in Transcription
  misc_feature: MA Experiment 20001905 PARAMETER Experiment Name: At_Drought_Reproduction_P Parameter: Age (day) Value: 40
  misc_feature: MA Experiment 20001905 PARAMETER Experiment Name: At_Drought_Reproduction_P Parameter: Organism Value: A. thaliana
  misc_feature: MA Experiment 20001905 PARAMETER Experiment Name: At_Drought_Reproduction_P Parameter: Plant Line Value: WS
  misc_feature: MA Experiment 20001905 PARAMETER Experiment Name: At_Drought_Reproduction_P Parameter: Timepoint (day) Value: 10
  misc_feature: MA Experiment 20001905 PARAMETER Experiment Name: At_Drought_Reproduction_P Parameter: Tissue Value: Rosettes
  misc_feature: MA Experiment 20001905 PARAMETER Experiment Name: At_Drought_Reproduction_P Parameter: Treatment Value: Drought vs. No Drought
  misc_feature: MA Experiment ID: 20001911 Result: Up-regulated in Transcription
  misc_feature: MA Experiment 20001911 PARAMETER Experiment Name: At_Drought_Reproduction_P Parameter: Age (day) Value: 40
  misc_feature: MA Experiment 20001911 PARAMETER Experiment Name: At_Drought_Reproduction_P Parameter: Organism Value: A. thaliana
  misc_feature: MA Experiment 20001911 PARAMETER Experiment Name: At_Drought_Reproduction_P Parameter: Plant Line Value: WS
  misc_feature: MA Experiment 20001911 PARAMETER Experiment Name: At_Drought_Reproduction_P Parameter: Timepoint (day) Value: 10
  misc_feature: MA Experiment 20001911 PARAMETER Experiment Name: At_Drought_Reproduction_P Parameter: Tissue Value: Flowers
  misc_feature: MA Experiment 20001911 PARAMETER Experiment Name: At_Drought_Reproduction_P Parameter: Treatment Value: Drought vs. No Drought
acactcaccactgttctaaattctctcttttttttttccttaaccaaaaaagctctctttttttcttctgggtttcatcgtttccaatctaaaatcatcgtagatttgtttgaaattcttcaaattgagccggtatcaagacatggcgggaagtgaagcggtagaagataaggagataaaatcggcggtttcaagctgtgaagcgtatttcgagaaagtacaatcaaggaagaatctacccaaatctcttcaagaaaccctaaactctgctttcgccggaatcccagtctcctccttccctcaagtccccggcggcagagtgatagagattcaagcggaaacacctgtatcagaagcagtaaagatcttatcagatagcaagattctatcagctcctgtgattaacacagatcacgagagttctttagattggagagaaagatatttaggaatcattgactactcttcaatcatcttatgggtgctagagagtgctgaactcgctgcaatcgcgttgtccgctacgtcagcaactgctgctggtgttggtgctggagctgttggagctcttggtgttgcagcgctcgggatgaccggtccggttgctgctgcggggctagccgcagctgcggttggagccgcggttgctggtggtgttgcagctgaacgtgggattggaaaagatgctccaactgctgctgataagttggggaaagatttctatgaagttattcttcaagaagagccttttaaatcaaccactgtaagttttttaacagaacattaagttatttgtgttgtgatggtcctgattgatcatggatatatgtttatgttgtcaggttagaacaatacttaagtcgtttagatgggctccttttcttccggtttcaacagagagttcgatgttgagtgttatgttgttactctcgaaatatcggttaagaaatgtgccggttattaaaacaggagaaccggatatcaagaactacgttactcaatctgcagttgttcatggtcttgaaggttgcaaaggtagagattggtttgatcacatttccgctctcccgatttctgatctcggcctcccgtttatgtcacccaatgaggttattagcattgagagtgaggaacttatccttgaagcatttaaaaggatgagagacaacaacattggtggtctccctgtagttgaagggttgaataagaagattgttggtaacattagcatgagagacattagatatttgcttttacaacctgaagtcttttccaatttcagacaactcacggtgaagagtttcgcgacaaagattgctacagcgggagaggaatacggtttagcgattcctgcaataacttgtaggcctgattcgactttagggagtgttataaacagtttggcttcgaggtcggtgcatcgggtttatgtagcggctggagatgagaatgagctttatggggttataacactgagggatgtgatctcttgtttcgtatcagaacctccaaattactttgagaactgtctcggtttctcggttaaggaaatgcttaaccgatgatctcttgtttctcagcttttttttggctttgttgtttgttctttcttggtttagatttctgaagttgttgtctttatatctaatttgtaaccaaccattttgagttttaaagttctatcattaacg

SEQ ID NO: 83667 - protein, 248 aa, Arabidopsis thaliana
  peptide (1)..(248): Ceres Seq. ID no. 12671322
  misc_feature (9)..(248): Homolog of NCBI NO: 25404839 NR Description: hypothetical protein T17F3.17 [imported] -
  misc_feature (9)..(245): Homolog of NCBI NO: 34912162 NR Description: P0712E02.24 [Oryza sativa (japonica
  misc_feature (1)..(248): Homolog of NCBI NO: 18409372 NR Description: expressed protein; protein id: At1g69800.1, by cDNA: gi_15450969 [Arabidopsis thaliana]
  misc_feature (8)..(234): Homolog of NCBI NO: 38346640 NR Description: OSJNBa0072D21.10 [Oryza sativa (japonica
  misc_feature (8)..(234): Homolog of NCBI NO: 15228397 NR Description: putative protein; protein id: At3g48530.1, by cDNA: 34151., supported by cDNA: gi_14596102, supported by
  misc_feature (8)..(234): Homolog of NCBI NO: 21592917 NR Description: unknown [Arabidopsis thaliana]
  misc_feature (8)..(234): Homolog of NCBI NO: 19386799 NR Description: OJ1485_B09.7 [Oryza sativa (japonica
  misc_feature (8)..(231): Homolog of NCBI NO: 6650528 NR Description: putative transcription factor X2 [Oryza sativa
  misc_feature (8)..(158): Homolog of NCBI NO: 20502802 NR Description: YZ1 [Zea mays]
  misc_feature (8)..(231): Homolog of NCBI NO: 34912990 NR Description: P0663E10.8 [Oryza sativa (japonica
MDICLCCQVRTILKSFRWAPFLPVSTESSMLSVMLLLSKYRLRNVPVIKTGEPDIKNYVTQSAVVHGLEGCKGRDWFDHISALPISDLGLPFMSPNEVISIESEELILEAFKRMRDNNIGGLPVVEGLNKKIVGNISMRDIRYLLLQPEVFSNFRQLTVKSFATKIATAGEEYGLAIPAITCRPDSTLGSVINSLASRSVHRVYVAAGDENELYGVITLRDVISCFVSEPPNYFENCLGFSVKEMLNR

SEQ ID NO: 83668 - protein, 219 aa, Arabidopsis thaliana
  peptide (1)..(219): Ceres Seq. ID no. 12671323
  misc_feature (1)..(219): Homolog of NCBI NO: 25404839 NR Description: hypothetical protein T17F3.17 [imported] -
  misc_feature (1)..(216): Homolog of NCBI NO: 34912162 NR Description: P0712E02.24 [Oryza sativa (japonica
  misc_feature (1)..(219): Homolog of NCBI NO: 18409372 NR Description: expressed protein; protein id: At1g69800.1, by cDNA: gi_15450969 [Arabidopsis thaliana]
  misc_feature (1)..(205): Homolog of NCBI NO: 38346640 NR Description: OSJNBa0072D21.10 [Oryza sativa (japonica
  misc_feature (1)..(205): Homolog of NCBI NO: 15228397 NR Description: putative protein; protein id: At3g48530.1, by cDNA: 34151., supported by cDNA: gi_14596102, supported by
  misc_feature (1)..(205): Homolog of NCBI NO: 21592917 NR Description: unknown [Arabidopsis thaliana]
  misc_feature (1)..(205): Homolog of NCBI NO: 19386799 NR Description: OJ1485_B09.7 [Oryza sativa (japonica
  misc_feature (1)..(202): Homolog of NCBI NO: 6650528 NR Description: putative transcription factor X2 [Oryza sativa
  misc_feature (1)..(129): Homolog of NCBI NO: 20502802 NR Description: YZ1 [Zea mays]
  misc_feature (1)..(202): Homolog of NCBI NO: 34912990 NR Description: P0663E10.8 [Oryza sativa (japonica
MLSVMLLLSKYRLRNVPVIKTGEPDIKNYVTQSAVVHGLEGCKGRDWFDHISALPISDLGLPFMSPNEVISIESEELILEAFKRMRDNNIGGLPVVEGLNKKIVGNISMRDIRYLLLQPEVFSNFRQLTVKSFATKIATAGEEYGLAIPAITCRPDSTLGSVINSLASRSVHRVYVAAGDENELYGVITLRDVISCFVSEPPNYFENCLGFSVKEMLNR

SEQ ID NO: 83669 - protein, 215 aa, Arabidopsis thaliana
  peptide (1)..(215): Ceres Seq. ID no. 12671324
  misc_feature (1)..(215): Homolog of NCBI NO: 25404839 NR Description: hypothetical protein T17F3.17 [imported] -
  misc_feature (1)..(212): Homolog of NCBI NO: 34912162 NR Description: P0712E02.24 [Oryza sativa (japonica
  misc_feature (1)..(215): Homolog of NCBI NO: 18409372 NR Description: expressed protein; protein id: At1g69800.1, by cDNA: gi_15450969 [Arabidopsis thaliana]
  misc_feature (1)..(201): Homolog of NCBI NO: 38346640 NR Description: OSJNBa0072D21.10 [Oryza sativa (japonica
  misc_feature (1)..(201): Homolog of NCBI NO: 15228397 NR Description: putative protein; protein id: At3g48530.1, by cDNA: 34151., supported by cDNA: gi_14596102, supported by
  misc_feature (1)..(201): Homolog of NCBI NO: 21592917 NR Description: unknown [Arabidopsis thaliana]
  misc_feature (1)..(201): Homolog of NCBI NO: 19386799 NR Description: OJ1485_B09.7 [Oryza sativa (japonica
  misc_feature (1)..(198): Homolog of NCBI NO: 6650528 NR Description: putative transcription factor X2 [Oryza sativa
  misc_feature (1)..(125): Homolog of NCBI NO: 20502802 NR Description: YZ1 [Zea mays]
  misc_feature (1)..(198): Homolog of NCBI NO: 34912990 NR Description: P0663E10.8 [Oryza sativa (japonica
MLLLSKYRLRNVPVIKTGEPDIKNYVTQSAVVHGLEGCKGRDWFDHISALPISDLGLPFMSPNEVISIESEELILEAFKRMRDNNIGGLPVVEGLNKKIVGNISMRDIRYLLLQPEVFSNFRQLTVKSFATKIATAGEEYGLAIPAITCRPDSTLGSVINSLASRSVHRVYVAAGDENELYGVITLRDVISCFVSEPPNYFENCLGFSVKEMLNR

SEQ ID NO: 83670 - DNA, 1137 bp, Arabidopsis thaliana
  misc_feature (1)..(1137): Ceres Seq. ID no. 12671329
  misc_feature: MA Experiment ID: 20000184 Result: Up-regulated in Transcription
  misc_feature: MA Experiment 20000184 PARAMETER Experiment Name: At_Shoots__P Parameter: Age (day) Value: 7
  misc_feature: MA Experiment 20000184 PARAMETER Experiment Name: At_Shoots__P Parameter: Tissue Value: Shoots vs. Whole Plant
  misc_feature: MA Experiment ID: 20000185 Result: Up-regulated in Transcription
  misc_feature: MA Experiment 20000185 PARAMETER Experiment Name: At_Roots__P Parameter: Age (day) Value: 7 vs. 21
  misc_feature: MA Experiment 20000185 PARAMETER Experiment Name: At_Roots__P Parameter: Organism Value: A. thaliana
  misc_feature: MA Experiment 20000185 PARAMETER Experiment Name: At_Roots__P Parameter: Tissue Value: Roots vs. Whole Plant
  misc_feature: MA Experiment ID: 20000436 Result: Up-regulated in Transcription
  misc_feature: MA Experiment 20000436 PARAMETER Experiment Name: At_Drought_P Parameter: Age (day) Value: 7
  misc_feature: MA Experiment 20000436 PARAMETER Experiment Name: At_Drought_P Parameter: Organism Value: A. thaliana
  misc_feature: MA Experiment 20000436 PARAMETER Experiment Name: At_Drought_P Parameter: Plant Line Value: WS
  misc_feature: MA Experiment 20000436 PARAMETER Experiment Name: At_Drought_P Parameter: Timepoint (hr) Value: 12
  misc_feature: MA Experiment 20000436 PARAMETER Experiment Name: At_Drought_P Parameter: Tissue Value: Whole Plant
  misc_feature: MA Experiment 20000436 PARAMETER Experiment Name: At_Drought_P Parameter: Treatment Value: Drought vs. No Drought
  misc_feature: MA Experiment ID: 20000439 Result: Up-regulated in Transcription
  misc_feature: MA Experiment 20000439 PARAMETER Experiment Name: At_Roots__P Parameter: Age (day) Value: 14 vs. 21
  misc_feature: MA Experiment 20000439 PARAMETER Experiment Name: At_Roots__P Parameter: Organism Value: A. thaliana
  misc_feature: MA Experiment 20000439 PARAMETER Experiment Name: At_Roots__P Parameter: Tissue Value: Roots vs. Whole Plant
  misc_feature: MA Experiment ID: 20001910 Result: Up-regulated in Transcription
  misc_feature: MA Experiment 20001910 PARAMETER Experiment Name: At_Drought_Reproduction_P Parameter: Age (day) Value: 37
  misc_feature: MA Experiment 20001910 PARAMETER Experiment Name: At_Drought_Reproduction_P Parameter: Organism Value: A. thaliana
  misc_feature: MA Experiment 20001910 PARAMETER Experiment Name: At_Drought_Reproduction_P Parameter: Plant Line Value: WS
  misc_feature: MA Experiment 20001910 PARAMETER Experiment Name: At_Drought_Reproduction_P Parameter: Timepoint (day) Value: 7
  misc_feature: MA Experiment 20001910 PARAMETER Experiment Name: At_Drought_Reproduction_P Parameter: Tissue Value: Flowers
  misc_feature: MA Experiment 20001910 PARAMETER Experiment Name: At_Drought_Reproduction_P Parameter: Treatment Value: Drought vs. No Drought
atgaggttttgtgttttcgggtttttatcgcttttcttgattgtttctcctgcctccgcctggttcttccctaactccaccgcggtaccaccgtctctacgtaacactacacgtgttttctgggacgctttctccaatttcaccggttgtcaccacggccaaaacgttgatggtctctaccgtatcaaaaaatacttccaacgttttggttacatccctgaaacgttttcgggaaatttcaccgatgattttgatgatatcctcaaagccgctgtcgaattgtatcagacgaatttcaatcttaacgttaccggtgagcttgatgcgcttaccattcaacacatcgtgatcccgcgttgcggtaatcctgacgtggtcaacggtacttcgttgatgcatggcgggagaagaaagaccttcgaggtcaacttctcccgcacgcatttgcacgcggttaaacgctacacgttattcccaggcgagccacggtggccgagaaaccgccgtgacttgacctacgcgttcgacccgaaaaacccgttgacggaagaggtcaagagcgtgttctcacgcgcttttggtcgttggtctgacgtcaccgcgttaaacttcactctttccgagtctttctcgacgtctgacatcacaatcggattctacaccggcgaccatggtgacggagagcctttcgacggcgttttgggaacattagctcacgctttctctcctcccagcgggaaattccacctagacgcagatgagaactgggtggtctccggagacctagacagtttcctctccgtaactgctgcggttgatcttgaatcagtggcggttcacgagatcggtcatcttctaggtttaggacattcttcagttgaggaatccatcatgtatccaacgatcacgacagggaaacgtaaggttgacttaaccaatgatgacgtggaaggaatccaatacttgtacggtgcaaaccctaacttcaacggcacaacatctccaccgtcgaccactaaacaccagcgagacactggtggcttcagtgccgcctggagaatcgacggttcatcgagatcaacaattgttagtctcttgttgtcaaccgtcggattggtcttgtggttcttaccgtag

SEQ ID NO: 83671 - protein, 378 aa, Arabidopsis thaliana
  peptide (1)..(378): Ceres Seq. ID no. 12671330
  misc_feature (157)..(261): Pfam Name: Matrixin Pfam Description: Matrixin
  misc_feature (1)..(378): Homolog of NCBI NO: 15223067 NR Description: matrix metalloproteinase, putative; protein id: [Arabidopsis thaliana] >gi|25406033|pir||E96724 hypothetical
  misc_feature (1)..(366): Homolog of NCBI NO: 30688744 NR Description: metallo proteinase -related [Arabidopsis thaliana]
  misc_feature (8)..(366): Homolog of NCBI NO: 7488435 NR Description: zinc metalloproteinase homolog F3I6.6 - thaliana >gi|2829864|gb|AAC00572.1| similar to zinc
  misc_feature (1)..(366): Homolog of NCBI NO: 15218963 NR Description: metalloproteinase, putative; protein id: [Arabidopsis thaliana] >gi|4249376|gb|AAD14473.1|AAD14473 Strong to gi|2829864 F3I6.6 zinc metalloproteinase homolog from this
  misc_feature (26)..(327): Homolog of NCBI NO: 15235820 NR Description: proteinase like protein; protein id: At4g16640.1, by cDNA: 14136. [Arabidopsis thaliana] >gi|7488133|pir||E71433
  misc_feature (26)..(327): Homolog of NCBI NO: 28393482 NR Description: putative proteinase [Arabidopsis thaliana]
  misc_feature (26)..(327): Homolog of NCBI NO: 21553383 NR Description: proteinase like protein [Arabidopsis thaliana]
MRFCVFGFLSLFLIVSPASAWFFPNSTAVPPSLRNTTRVFWDAFSNFTGCHHGQNVDGLYRIKKYFQRFGYIPETFSGNFTDDFDDILKAAVELYQTNFNLNVTGELDALTIQHIVIPRCGNPDVVNGTSLMHGGRRKTFEVNFSRTHLHAVKRYTLFPGEPRWPRNRRDLTYAFDPKNPLTEEVKSVFSRAFGRWSDVTALNFTLSESFSTSDITIGFYTGDHGDGEPFDGVLGTLAHAFSPPSGKFHLDADENWVVSGDLDSFLSVTAAVDLESVAVHEIGHLLGLGHSSVEESIMYPTITTGKRKVDLTNDDVEGIQYLYGANPNFNGTTSPPSTTKHQRDTGGFSAAWRIDGSSRSTIVSLLLSTVGLVLWFLP

SEQ ID NO: 83672 - protein, 247 aa, Arabidopsis thaliana
  peptide (1)..(247): Ceres Seq. ID no. 12671331
  misc_feature (26)..(130): Pfam Name: Matrixin Pfam Description: Matrixin
  misc_feature (1)..(247): Homolog of NCBI NO: 15223067 NR Description: matrix metalloproteinase, putative; protein id: [Arabidopsis thaliana] >gi|25406033|pir||E96724 hypothetical
  misc_feature (1)..(235): Homolog of NCBI NO: 30688744 NR Description: metallo proteinase -related [Arabidopsis thaliana]
  misc_feature (1)..(235): Homolog of NCBI NO: 7488435 NR Description: zinc metalloproteinase homolog F3I6.6 - thaliana >gi|2829864|gb|AAC00572.1| similar to zinc
  misc_feature (1)..(235): Homolog of NCBI NO: 15218963 NR Description: metalloproteinase, putative; protein id: [Arabidopsis thaliana] >gi|4249376|gb|AAD14473.1|AAD14473 Strong to gi|2829864 F3I6.6 zinc metalloproteinase homolog from this
  misc_feature (1)..(196): Homolog of NCBI NO: 15235820 NR Description: proteinase like protein; protein id: At4g16640.1, by cDNA: 14136. [Arabidopsis thaliana] >gi|7488133|pir||E71433
  misc_feature (1)..(196): Homolog of NCBI NO: 28393482 NR Description: putative proteinase [Arabidopsis thaliana]
  misc_feature (1)..(196): Homolog of NCBI NO: 21553383 NR Description: proteinase like protein [Arabidopsis thaliana]
MHGGRRKTFEVNFSRTHLHAVKRYTLFPGEPRWPRNRRDLTYAFDPKNPLTEEVKSVFSRAFGRWSDVTALNFTLSESFSTSDITIGFYTGDHGDGEPFDGVLGTLAHAFSPPSGKFHLDADENWVVSGDLDSFLSVTAAVDLESVAVHEIGHLLGLGHSSVEESIMYPTITTGKRKVDLTNDDVEGIQYLYGANPNFNGTTSPPSTTKHQRDTGGFSAAWRIDGSSRSTIVSLLLSTVGLVLWFLP

SEQ ID NO: 83673 - DNA, 1785 bp, Arabidopsis thaliana
  misc_feature (1)..(1785): Ceres Seq. ID no. 12671340
  misc_feature: MA Experiment ID: 20000436 Result: Down-regulated in Transcription
  misc_feature: MA Experiment 20000436 PARAMETER Experiment Name: At_Drought_P Parameter: Age (day) Value: 7
  misc_feature: MA Experiment 20000436 PARAMETER Experiment Name: At_Drought_P Parameter: Organism Value: A. thaliana
  misc_feature: MA Experiment 20000436 PARAMETER Experiment Name: At_Drought_P Parameter: Plant Line Value: WS
  misc_feature: MA Experiment 20000436 PARAMETER Experiment Name: At_Drought_P Parameter: Timepoint (hr) Value: 12
  misc_feature: MA Experiment 20000436 PARAMETER Experiment Name: At_Drought_P Parameter: Tissue Value: Whole Plant
  misc_feature: MA Experiment 20000436 PARAMETER Experiment Name: At_Drought_P Parameter: Treatment Value: Drought vs. No Drought
  misc_feature: MA Experiment ID: 20000453 Result: Down-regulated in Transcription
  misc_feature: MA Experiment 20000453 PARAMETER Experiment Name: At_100uM_ABA_P Parameter: Age (day) Value: 15
  misc_feature: MA Experiment 20000453 PARAMETER Experiment Name: At_100uM_ABA_P Parameter: Organism Value: A. thaliana
  misc_feature: MA Experiment 20000453 PARAMETER Experiment Name: At_100uM_ABA_P Parameter: Plant Line Value: WS
  misc_feature: MA Experiment 20000453 PARAMETER Experiment Name: At_100uM_ABA_P Parameter: Timepoint (hr) Value: 24
  misc_feature: MA Experiment 20000453 PARAMETER Experiment Name: At_100uM_ABA_P Parameter: Tissue Value: Aerial
  misc_feature: MA Experiment 20000453 PARAMETER Experiment Name: At_100uM_ABA_P Parameter: Treatment Value: 100uM ABA vs. No Treatment
  misc_feature: MA Experiment ID: 20000794 Result: Up-regulated in Transcription
  misc_feature: MA Experiment 20000794 PARAMETER Experiment Name: At_Petals_P Parameter: Age (day) Value: 23-25 days
  misc_feature: MA Experiment 20000794 PARAMETER Experiment Name: At_Petals_P Parameter: Plant Line Value: WS
  misc_feature: MA Experiment 20000794 PARAMETER Experiment Name: At_Petals_P Parameter: Tissue Value: Petals vs. Whole plant
  misc_feature: MA Experiment ID: 20001451 Result: Down-regulated in Transcription
  misc_feature: MA Experiment 20001451 PARAMETER Experiment Name: At_Far-red-induction_P Parameter: Age (day) Value: 7
  misc_feature: MA Experiment 20001451 PARAMETER Experiment Name: At_Far-red-induction_P Parameter: Light Value: Far-red vs. White
  misc_feature: MA Experiment 20001451 PARAMETER Experiment Name: At_Far-red-induction_P Parameter: Organism Value: A. thaliana
  misc_feature: MA Experiment 20001451 PARAMETER Experiment Name: At_Far-red-induction_P Parameter: Plant Line Value: Columbia
  misc_feature: MA Experiment 20001451 PARAMETER Experiment Name: At_Far-red-induction_P Parameter: Timepoint (hr) Value: 24
  misc_feature: MA Experiment 20001451 PARAMETER Experiment Name: At_Far-red-induction_P Parameter: Tissue Value: Whole Plant
atggctggttcatcaacgaaacgatttcctctatatgctaaagattatgagctctttgaagaggtaggagaaggtgttagtgctactgtgtatagagctcgttgcattgctcttaacgagattgtcgctgttaaaatcttggatctcgaaaaatgcaggaatgatttggaaacaatacgcaaggaagttcatataatgagtttgattgatcatccgaatttattgaaagcgcattgttcgtttatcgacagtagtagtttgtggattgtaatgccttatatgtcgggtggttcttgttttcatttaatgaaatctgtatatccggaaggtcttgagcaacctataattgctactttgttgagggaagtgcttaaagctcttgtttatcttcatagacaaggtcacatccatagagatgttaaggctgggaatatattgattcactcaaaaggcgtagttaaacttggagactttggagtttcagcatgtatgtttgatagtggagaaagaatgcaaacaaggaatacattcgttgggactccttgttggatggcacctgaggttatgcagcaactagatggatatgatttcaagtatcttgctcatggtcatgccccattttccaaatatccacctatgaaggtgctactaatgacattacaaaatgcacctcctcgtctagactatgacagagataagaaattctcaaagtcatttagagagttaatcgcagcgtgcttagttaaagatccgaaaaagcgtccaactgcagcaaaacttctgaaacatcctttcttcaaacatgctcggtctacagattatttgtcccgtaaaattcttcatggtctttctccacttggtgaacgttttaaaaagctcaaggaggcagaggctgagttgttcaaaggcataaatggtgacaaagaacagttgtctcagcatgagtatatgagaggaattagtgcttggaactttgatcttgaagcattgagaaggcaggcatcacttgtaattattccaaatgaagaaatctataattcagagatacaggaactgaacagaaatggagatgtaccaaaaggaaaaccagtgatacaaaggtcacagactatgcctttggaatatttctcagaaaaggcaagtgatatggtgagtgagagtagcagtcaattaaccggttcattacttccttcgtttcatcgcaaattcctcccggctcttggcaatgcatgtaactcgagcgatagagcagcagagaagctcgcttttgaagagccacgtcaagtactacacccattagcggatacaaagaaaattagaaaagcaggaagtgatcagcaggagaaaccaaaaaatggttacgcagatagtcctgtgaaccgtgaatcttccacattatcaaaggaaccattagcggatacaaagcaagttagaaaaccaggaaatgagcaggagaaaccaaaaaacggctatatagttagtcatgtgaaccgtgaatcttccacatcagaggaaatcctcccactgttgcagagtctcctggttcagaatgacattcaaagggcgcaagtaatcaggttaattagattttttgatcgaactgcgaaaacggaaaatccaatctcaaaaaccgaaggagtgcaggagaaagatctgcaatctcaagttcagtttttggagcaaagtgttgagaagcttgtagaggaagttcagagaagaaaagatataaatagtcagctagagcaacagatcagctctctgattagcagcaacaacatctcttaa

SEQ ID NO: 83674 - protein, 594 aa, Arabidopsis thaliana
  peptide (1)..(594): Ceres Seq. ID no. 12671341
  misc_feature (16)..(266): Pfam Name: Protein kinase domain Pfam Description: Protein kinase domain
  misc_feature (1)..(594): Homolog of NCBI NO: 15223145 NR Description: Ste-20 related kinase SPAK, putative; protein id:
  misc_feature (1)..(525): Homolog of NCBI NO: 7485682 NR Description: hypothetical protein F17O7.3 - Arabidopsis
  misc_feature (1)..(354): Homolog of NCBI NO: 17529280 NR Description: putative protein kinase [Arabidopsis thaliana]
  misc_feature (383)..(592): Homolog of NCBI NO: 17529280 NR Description: putative protein kinase [Arabidopsis thaliana]
  misc_feature (1)..(354): Homolog of NCBI NO: 30685021 NR Description: protein kinase family [Arabidopsis thaliana]
  misc_feature (383)..(592): Homolog of NCBI NO: 30685021 NR Description: protein kinase family [Arabidopsis thaliana]
  misc_feature (1)..(313): Homolog of NCBI NO: 11358725 NR Description: protein kinase-like protein - Arabidopsis thaliana
  misc_feature (1)..(313): Homolog of NCBI NO: 15220847 NR Description: putative Ser/Thr protein kinase; protein id:
  misc_feature (496)..(535): Homolog of NCBI NO: 15220847 NR Description: putative Ser/Thr protein kinase; protein id:
  misc_feature (494)..(542): Homolog of NCBI NO: 15220847 NR Description: putative Ser/Thr protein kinase; protein id:
MAGSSTKRFPLYAKDYELFEEVGEGVSATVYRARCIALNEIVAVKILDLEKCRNDLETIRKEVHIMSLIDHPNLLKAHCSFIDSSSLWIVMPYMSGGSCFHLMKSVYPEGLEQPIIATLLREVLKALVYLHRQGHIHRDVKAGNILIHSKGVVKLGDFGVSACMFDSGERMQTRNTFVGTPCWMAPEVMQQLDGYDFKYLAHGHAPFSKYPPMKVLLMTLQNAPPRLDYDRDKKFSKSFRELIAACLVKDPKKRPTAAKLLKHPFFKHARSTDYLSRKILHGLSPLGERFKKLKEAEAELFKGINGDKEQLSQHEYMRGISAWNFDLEALRRQASLVIIPNEEIYNSEIQELNRNGDVPKGKPVIQRSQTMPLEYFSEKASDMVSESSSQLTGSLLPSFHRKFLPALGNACNSSDRAAEKLAFEEPRQVLHPLADTKKIRKAGSDQQEKPKNGYADSPVNRESSTLSKEPLADTKQVRKPGNEQEKPKNGYIVSHVNRESSTSEEILPLLQSLLVQNDIQRAQVIRLIRFFDRTAKTENPISKTEGVQEKDLQSQVQFLEQSVEKLVEEVQRRKDINSQLEQQISSLISSNNIS

SEQ ID NO: 83675 - protein, 529 aa, Arabidopsis thaliana
  peptide (1)..(529): Ceres Seq. ID no. 12671342
  misc_feature (1)..(201): Pfam Name: Protein kinase domain Pfam Description: Protein kinase domain
  misc_feature (1)..(529): Homolog of NCBI NO: 15223145 NR Description: Ste-20 related kinase SPAK, putative; protein id:
  misc_feature (1)..(460): Homolog of NCBI NO: 7485682 NR Description: hypothetical protein F17O7.3 - Arabidopsis
  misc_feature (1)..(289): Homolog of NCBI NO: 17529280 NR Description: putative protein kinase [Arabidopsis thaliana]
  misc_feature (318)..(527): Homolog of NCBI NO: 17529280 NR Description: putative protein kinase [Arabidopsis thaliana]
  misc_feature (1)..(289): Homolog of NCBI NO: 30685021 NR Description: protein kinase family [Arabidopsis thaliana]
  misc_feature (318)..(527): Homolog of NCBI NO: 30685021 NR Description: protein kinase family [Arabidopsis thaliana]
  misc_feature (1)..(248): Homolog of NCBI NO: 11358725 NR Description: protein kinase-like protein - Arabidopsis thaliana
  misc_feature (1)..(248): Homolog of NCBI NO: 15220847 NR Description: putative Ser/Thr protein kinase; protein id:
  misc_feature (431)..(470): Homolog of NCBI NO: 15220847 NR Description: putative Ser/Thr protein kinase; protein id:
  misc_feature (429)..(477): Homolog of NCBI NO: 15220847 NR Description: putative Ser/Thr protein kinase; protein id:
MSLIDHPNLLKAHCSFIDSSSLWIVMPYMSGGSCFHLMKSVYPEGLEQPIIATLLREVLKALVYLHRQGHIHRDVKAGNILIHSKGVVKLGDFGVSACMFDSGERMQTRNTFVGTPCWMAPEVMQQLDGYDFKYLAHGHAPFSKYPPMKVLLMTLQNAPPRLDYDRDKKFSKSFRELIAACLVKDPKKRPTAAKLLKHPFFKHARSTDYLSRKILHGLSPLGERFKKLKEAEAELFKGINGDKEQLSQHEYMRGISAWNFDLEALRRQASLVIIPNEEIYNSEIQELNRNGDVPKGKPVIQRSQTMPLEYFSEKASDMVSESSSQLTGSLLPSFHRKFLPALGNACNSSDRAAEKLAFEEPRQVLHPLADTKKIRKAGSDQQEKPKNGYADSPVNRESSTLSKEPLADTKQVRKPGNEQEKPKNGYIVSHVNRESSTSEEILPLLQSLLVQNDIQRAQVIRLIRFFDRTAKTENPISKTEGVQEKDLQSQVQFLEQSVEKLVEEVQRRKDINSQLEQQISSLISSNNIS

SEQ ID NO: 83676 - protein, 504 aa, Arabidopsis thaliana
  peptide (1)..(504): Ceres Seq. ID no. 12671343
  misc_feature (1)..(176): Pfam Name: Protein kinase domain Pfam Description: Protein kinase domain
  misc_feature (1)..(504): Homolog of NCBI NO: 15223145 NR Description: Ste-20 related kinase SPAK, putative; protein id:
  misc_feature (1)..(435): Homolog of NCBI NO: 7485682 NR Description: hypothetical protein F17O7.3 - Arabidopsis
  misc_feature (1)..(264): Homolog of NCBI NO: 17529280 NR Description: putative protein kinase [Arabidopsis thaliana]
  misc_feature (293)..(502): Homolog of NCBI NO: 17529280 NR Description: putative protein kinase [Arabidopsis thaliana]
  misc_feature (1)..(264): Homolog of NCBI NO: 30685021 NR Description: protein kinase family [Arabidopsis thaliana]
  misc_feature (293)..(502): Homolog of NCBI NO: 30685021 NR Description: protein kinase family [Arabidopsis thaliana]
  misc_feature (1)..(223): Homolog of NCBI NO: 11358725 NR Description: protein kinase-like protein - Arabidopsis thaliana
  misc_feature (1)..(223): Homolog of NCBI NO: 15220847 NR Description: putative Ser/Thr protein kinase; protein id:
  misc_feature (406)..(445): Homolog of NCBI NO: 15220847 NR Description: putative Ser/Thr protein kinase; protein id:
  misc_feature (404)..(452): Homolog of NCBI NO: 15220847 NR Description: putative Ser/Thr protein kinase; protein id:
MPYMSGGSCFHLMKSVYPEGLEQPIIATLLREVLKALVYLHRQGHIHRDVKAGNILIHSKGVVKLGDFGVSACMFDSGERMQTRNTFVGTPCWMAPEVMQQLDGYDFKYLAHGHAPFSKYPPMKVLLMTLQNAPPRLDYDRDKKFSKSFRELIAACLVKDPKKRPTAAKLLKHPFFKHARSTDYLSRKILHGLSPLGERFKKLKEAEAELFKGINGDKEQLSQHEYMRGISAWNFDLEALRRQASLVIIPNEEIYNSEIQELNRNGDVPKGKPVIQRSQTMPLEYFSEKASDMVSESSSQLTGSLLPSFHRKFLPALGNACNSSDRAAEKLAFEEPRQVLHPLADTKKIRKAGSDQQEKPKNGYADSPVNRESSTLSKEPLADTKQVRKPGNEQEKPKNGYIVSHVNRESSTSEEILPLLQSLLVQNDIQRAQVIRLIRFFDRTAKTENPISKTEGVQEKDLQSQVQFLEQSVEKLVEEVQRRKDINSQLEQQISSLISSNNIS

SEQ ID NO: 83677 - DNA, 1062 bp, Arabidopsis thaliana
  misc_feature (1)..(1062): Ceres Seq. ID no. 12671375
  misc_feature: MA Experiment ID: 108473 Result: Down-regulated in Transcription
  misc_feature: MA Experiment 108473 PARAMETER Experiment Name: At_Drought_Flowers_cDNA_P Parameter: Timepoint (hr) Value: 7 d
  misc_feature: MA Experiment 108473 PARAMETER Experiment Name: At_Drought_Flowers_cDNA_P Parameter: Tissue Value: Flower
  misc_feature: MA Experiment 108473 PARAMETER Experiment Name: At_Drought_Flowers_cDNA_P Parameter: Treatment Value: Drought vs. No Drought
  misc_feature: MA Experiment ID: 108501 Result: Down-regulated in Transcription
  misc_feature: MA Experiment 108501 PARAMETER Experiment Name: At_ap2_floral_buds_cDNA_P Parameter: Plant Line Value: ap2 (Ler.)
  misc_feature: MA Experiment 108501 PARAMETER Experiment Name: At_ap2_floral_buds_cDNA_P Parameter: Tissue Value: Closed Flower
  misc_feature: MA Experiment ID: 20000087 Result: Up-regulated in Transcription
  misc_feature: MA Experiment 20000087 PARAMETER Experiment Name: At_100uM_ABA_Mutants_cDNA_P Parameter: Plant Line Value: WS
  misc_feature: MA Experiment 20000087 PARAMETER Experiment Name: At_100uM_ABA_Mutants_cDNA_P Parameter: Timepoint (hr) Value: 6
  misc_feature: MA Experiment 20000087 PARAMETER Experiment Name: At_100uM_ABA_Mutants_cDNA_P Parameter: Tissue Value: Aerial
  misc_feature: MA Experiment 20000087 PARAMETER Experiment Name: At_100uM_ABA_Mutants_cDNA_P Parameter: Treatment Value: 100uM ABA vs. No Treatment
atgttggtgttagcattattttccatttacttcttatcaatagaagctgtccggaatgaatcatttcctgcgctattagcttttggagattcaatggtcgatactggtaacaacaattacctcctgactctaatgaaaggaaattactggccatatgggtggaatttcgactcaaaaataccgaccggaagatttggaaacggaagagttttctccgatgtagttggtataatattaaagagttctttacaatgcttttttgtaatttctgctgaaggtttggggatcaaaagaattgtaccagcttatcgtaagttatacattgctccaagcgaccttaaaacgggtgtttcttttgcatcaggtggtgcaggagtcgaccctgttacatccaaattgctgagagttttatcgccagctgaccaagtaaaagatttcaaaggctacaaaagaaagctaaaaggtgtagtaggcaggtcaaaagcaaaaaaaatagttgcaaattcagtgattcttgtttctgaaggaaataatgatattggaatcacatatgcgattcatgatgctggtatgcgattaatgactccgaaagtatacaccagtaaattagttggttggaacaaaaaatttataaaagatttatatgatcacggagcaagaaaatttgcggtgatgggagtgataccattgggatgtttgcctatgtcaagacttatttttggtgggttcttcgtgtggtgtaatttcttggcaaacacaatctctgaagattacaacaaaaaattgaaaagcggaattaaaagttggagaggagcatcagattttaggggtgctaggtttgtctatgtcgacatgtacaactctcttatggatgttatcaacaatcataggaaatacggatttacccatgagaagaatggatgttgttgtatgcttacggcaatagtaccatgctccaacccagataaatatgtcttctatgactttgctcatccctccgagaaagcctacaaaacaattgctaaaaagcttgtcgaggatatcaagacaggacttgcctga

SEQ ID NO: 83678 - protein, 353 aa, Arabidopsis thaliana
  peptide (1)..(353): Ceres Seq. ID no. 12671376
  misc_feature (25)..(344): Pfam Name: GDSL-like Lipase/Acylhydrolase Pfam Description: GDSL-like Lipase/Acylhydrolase
  misc_feature (1)..(353): Homolog of NCBI NO: 8778809 NR Description: T4O12.14 [Arabidopsis thaliana]
  misc_feature (1)..(353): Homolog of NCBI NO: 18410967 NR Description: family II extracellular lipase 5 (EXL5); protein At1g75920.1, supported by cDNA: gi_15054391 [Arabidopsis >gi|15054392|gb|AAK30020.1| family II lipase EXL5 [Arabidopsis
  misc_feature (2)..(353): Homolog of NCBI NO: 15222902 NR Description: family II extracellular lipase 4 (EXL4); protein At1g75910.1, supported by cDNA: gi_15054387 [Arabidopsis
  misc_feature (19)..(353): Homolog of NCBI NO: 25404994 NR Description: protein T4O12.13 [imported] - Arabidopsis >gi|8778808|gb|AAF79815.1|AC007396_8 T4O12.13 [Arabidopsis
  misc_feature (21)..(353): Homolog of NCBI NO: 15054388 NR Description: family II lipase EXL4 [Arabidopsis thaliana]
  misc_feature (1)..(353): Homolog of NCBI NO: 15222904 NR Description: family II extracellular lipase 6 (EXL6); protein At1g75930.1, supported by cDNA: gi_15054389 [Arabidopsis >gi|15054390|gb|AAK30021.1| family II lipase EXL6 [Arabidopsis
  misc_feature (1)..(338): Homolog of NCBI NO: 25404995 NR Description: protein T4O12.15 [imported] - Arabidopsis >gi|8778810|gb|AAF26759.2|AC007396_8 T4O12.15 [Arabidopsis
  misc_feature (12)..(353): Homolog of NCBI NO: 15242657 NR Description: lipase/acylhydrolase-like protein; protein id:
  misc_feature (24)..(215): Homolog of NCBI NO: 8778580 NR Description: F28C11.13 [Arabidopsis thaliana]
  misc_feature (210)..(353): Homolog of NCBI NO: 8778580 NR Description: F28C11.13 [Arabidopsis thaliana]
MLVLALFSIYFLSIEAVRNESFPALLAFGDSMVDTGNNNYLLTLMKGNYWPYGWNFDSKIPTGRFGNGRVFSDVVGIILKSSLQCFFVISAEGLGIKRIVPAYRKLYIAPSDLKTGVSFASGGAGVDPVTSKLLRVLSPADQVKDFKGYKRKLKGVVGRSKAKKIVANSVILVSEGNNDIGITYAIHDAGMRLMTPKVYTSKLVGWNKKFIKDLYDHGARKFAVMGVIPLGCLPMSRLIFGGFFVWCNFLANTISEDYNKKLKSGIKSWRGASDFRGARFVYVDMYNSLMDVINNHRKYGFTHEKNGCCCMLTAIVPCSNPDKYVFYDFAHPSEKAYKTIAKKLVEDIKTGLA

SEQ ID NO: 83679 - protein, 322 aa, Arabidopsis thaliana
  peptide (1)..(322): Ceres Seq. ID no. 12671377
  misc_feature (1)..(313): Pfam Name: GDSL-like Lipase/Acylhydrolase Pfam Description: GDSL-like Lipase/Acylhydrolase
  misc_feature (1)..(322): Homolog of NCBI NO: 8778809 NR Description: T4O12.14 [Arabidopsis thaliana]
  misc_feature (1)..(322): Homolog of NCBI NO: 18410967 NR Description: family II extracellular lipase 5 (EXL5); protein At1g75920.1, supported by cDNA: gi_15054391 [Arabidopsis >gi|15054392|gb|AAK30020.1| family II lipase EXL5 [Arabidopsis
  misc_feature (1)..(322): Homolog of NCBI NO: 15222902 NR Description: family II extracellular lipase 4 (EXL4); protein At1g75910.1, supported by cDNA: gi_15054387 [Arabidopsis
  misc_feature (1)..(322): Homolog of NCBI NO: 25404994 NR Description: protein T4O12.13 [imported] - Arabidopsis >gi|8778808|gb|AAF79815.1|AC007396_8 T4O12.13 [Arabidopsis
  misc_feature (1)..(322): Homolog of NCBI NO: 15054388 NR Description: family II lipase EXL4 [Arabidopsis thaliana]
  misc_feature (1)..(322): Homolog of NCBI NO: 15222904 NR Description: family II extracellular lipase 6 (EXL6); protein At1g75930.1, supported by cDNA: gi_15054389 [Arabidopsis >gi|15054390|gb|AAK30021.1| family II lipase EXL6 [Arabidopsis
  misc_feature (1)..(307): Homolog of NCBI NO: 25404995 NR Description: protein T4O12.15 [imported] - Arabidopsis >gi|8778810|gb|AAF26759.2|AC007396_8 T4O12.15 [Arabidopsis
  misc_feature (1)..(322): Homolog of NCBI NO: 15242657 NR Description: lipase/acylhydrolase-like protein; protein id:
  misc_feature (1)..(184): Homolog of NCBI NO: 8778580 NR Description: F28C11.13 [Arabidopsis thaliana]
  misc_feature (179)..(322): Homolog of NCBI NO: 8778580 NR Description: F28C11.13 [Arabidopsis thaliana]
MVDTGNNNYLLTLMKGNYWPYGWNFDSKIPTGRFGNGRVFSDVVGIILKSSLQCFFVISAEGLGIKRIVPAYRKLYIAPSDLKTGVSFASGGAGVDPVTSKLLRVLSPADQVKDFKGYKRKLKGVVGRSKAKKIVANSVILVSEGNNDIGITYAIHDAGMRLMTPKVYTSKLVGWNKKFIKDLYDHGARKFAVMGVIPLGCLPMSRLIFGGFFVWCNFLANTISEDYNKKLKSGIKSWRGASDFRGARFVYVDMYNSLMDVINNHRKYGFTHEKNGCCCMLTAIVPCSNPDKYVFYDFAHPSEKAYKTIAKKLVEDIKTGLA

SEQ ID NO: 83680 - protein, 309 aa, Arabidopsis thaliana
  peptide (1)..(309): Ceres Seq. ID no. 12671378
  misc_feature (1)..(300): Pfam Name: GDSL-like Lipase/Acylhydrolase Pfam Description: GDSL-like Lipase/Acylhydrolase
  misc_feature (1)..(309): Homolog of NCBI NO: 8778809 NR Description: T4O12.14 [Arabidopsis thaliana]
  misc_feature (1)..(309): Homolog of NCBI NO: 18410967 NR Description: family II extracellular lipase 5 (EXL5); protein At1g75920.1, supported by cDNA: gi_15054391 [Arabidopsis >gi|15054392|gb|AAK30020.1| family II lipase EXL5 [Arabidopsis
  misc_feature (1)..(309): Homolog of NCBI NO: 15222902 NR Description: family II extracellular lipase 4 (EXL4); protein At1g75910.1, supported by cDNA: gi_15054387 [Arabidopsis
  misc_feature (1)..(309): Homolog of NCBI NO: 25404994 NR Description: protein T4O12.13 [imported] - Arabidopsis >gi|8778808|gb|AAF79815.1|AC007396_8 T4O12.13 [Arabidopsis
  misc_feature (1)..(309): Homolog of NCBI NO: 15054388 NR Description: family II lipase EXL4 [Arabidopsis thaliana]
  misc_feature (1)..(309): Homolog of NCBI NO: 15222904 NR Description: family II extracellular lipase 6 (EXL6); protein At1g75930.1, supported by cDNA: gi_15054389 [Arabidopsis >gi|15054390|gb|AAK30021.1| family II lipase EXL6 [Arabidopsis
  misc_feature (1)..(294): Homolog of NCBI NO: 25404995 NR Description: protein T4O12.15 [imported] - Arabidopsis >gi|8778810|gb|AAF26759.2|AC007396_8 T4O12.15 [Arabidopsis
  misc_feature (1)..(309): Homolog of NCBI NO: 15242657 NR Description: lipase/acylhydrolase-like protein; protein id:
  misc_feature (1)..(171): Homolog of NCBI NO: 8778580 NR Description: F28C11.13 [Arabidopsis thaliana]
  misc_feature (166)..(309): Homolog of NCBI NO: 8778580 NR Description: F28C11.13 [Arabidopsis thaliana]
MKGNYWPYGWNFDSKIPTGRFGNGRVFSDVVGIILKSSLQCFFVISAEGLGIKRIVPAYRKLYIAPSDLKTGVSFASGGAGVDPVTSKLLRVLSPADQVKDFKGYKRKLKGVVGRSKAKKIVANSVILVSEGNNDIGITYAIHDAGMRLMTPKVYTSKLVGWNKKFIKDLYDHGARKFAVMGVIPLGCLPMSRLIFGGFFVWCNFLANTISEDYNKKLKSGIKSWRGASDFRGARFVYVDMYNSLMDVINNHRKYGFTHEKNGCCCMLTAIVPCSNPDKYVFYDFAHPSEKAYKTIAKKLVEDIKTGLA

SEQ ID NO: 83681 - DNA, 1068 bp, Arabidopsis thaliana
  misc_feature (1)..(1068): Ceres Seq. ID no. 12671404
  misc_feature: MA Experiment ID: 20000179 Result: Up-regulated in Transcription
  misc_feature: MA Experiment 20000179 PARAMETER Experiment Name: At_Germinating_Seeds_P Parameter: Age (hr) Value: 6 vs. 0
  misc_feature: MA Experiment 20000179 PARAMETER Experiment Name: At_Germinating_Seeds_P Parameter: Tissue Value: Germinating Seeds
  misc_feature: MA Experiment ID: 20000180 Result: Up-regulated in Transcription
  misc_feature: MA Experiment 20000180 PARAMETER Experiment Name: At_Germinating_Seeds_P Parameter: Age (hr) Value: 24 vs. 0
  misc_feature: MA Experiment 20000180 PARAMETER Experiment Name: At_Germinating_Seeds_P Parameter: Tissue Value: Germinating Seeds
  misc_feature: MA Experiment ID: 20000185 Result: Up-regulated in Transcription
  misc_feature: MA Experiment 20000185 PARAMETER Experiment Name: At_Roots__P Parameter: Age (day) Value: 7 vs. 21
  misc_feature: MA Experiment 20000185 PARAMETER Experiment Name: At_Roots__P Parameter: Organism Value: A. thaliana
  misc_feature: MA Experiment 20000185 PARAMETER Experiment Name: At_Roots__P Parameter: Tissue Value: Roots vs. Whole Plant
  misc_feature: MA Experiment ID: 20001451 Result: Up-regulated in Transcription
  misc_feature: MA Experiment 20001451 PARAMETER Experiment Name: At_Far-red-induction_P Parameter: Age (day) Value: 7
  misc_feature: MA Experiment 20001451 PARAMETER Experiment Name: At_Far-red-induction_P Parameter: Light Value: Far-red vs. White
  misc_feature: MA Experiment 20001451 PARAMETER Experiment Name: At_Far-red-induction_P Parameter: Organism Value: A. thaliana
  misc_feature: MA Experiment 20001451 PARAMETER Experiment Name: At_Far-red-induction_P Parameter: Plant Line Value: Columbia
  misc_feature: MA Experiment 20001451 PARAMETER Experiment Name: At_Far-red-induction_P Parameter: Timepoint (hr) Value: 24
  misc_feature: MA Experiment 20001451 PARAMETER Experiment Name: At_Far-red-induction_P Parameter: Tissue Value: Whole Plant
  misc_feature: MA Experiment ID: 20001910 Result: Down-regulated in Transcription
  misc_feature: MA Experiment 20001910 PARAMETER Experiment Name: At_Drought_Reproduction_P Parameter: Age (day) Value: 37
  misc_feature: MA Experiment 20001910 PARAMETER Experiment Name: At_Drought_Reproduction_P Parameter: Organism Value: A. thaliana
  misc_feature: MA Experiment 20001910 PARAMETER Experiment Name: At_Drought_Reproduction_P Parameter: Plant Line Value: WS
  misc_feature: MA Experiment 20001910 PARAMETER Experiment Name: At_Drought_Reproduction_P Parameter: Timepoint (day) Value: 7
  misc_feature: MA Experiment 20001910 PARAMETER Experiment Name: At_Drought_Reproduction_P Parameter: Tissue Value: Flowers
  misc_feature: MA Experiment 20001910 PARAMETER Experiment Name: At_Drought_Reproduction_P Parameter: Treatment Value: Drought vs. No Drought
atggctaatgcaaaggaaacaacgttttatataacaatctctgtggttgcttttgtcattggcaaaatcgtaatcgctcttcttttctacaagagatggaagagaaagcacacaattcatgaaaatggatttccagtcaaaggaggaggaaaaatggtgatgtttagatctcaattacttaactctgtttcctccgacatgtttatgaagaagacacataaactaagcaacaaagacattcttggttctggaggatttggaactgtgtacagattagtcattgatgattcaactacttttgctgtgaagaggctaaacagaggaacttctgagagagacagagggtttcatagagagttagaagcaatggctgatataaaacacagaaacattgtaactcttcatggctactttacttctccacattacaatcttctcatctatgagctcatgcctaatgggagcttggattcttttctacacggaagaaaagctttggattgggcgtcgagatatagaatcgcagtaggagcggctagagggatttcgtaccttcaccatgattgcattcctcacattatccatagagacatcaaatctagcaacatacttcttgatcacaacatggaagctagggtttctgatttcggtttagccactttgatggagccagacaagactcatgtttcgacttttgtggctggaacattcggatatttagctcctgagtatttcgatactggaaaagcgacaatgaaaggagatgtttacagtttcggagttgttctgttggagcttttaactggaagaaaaccaacagatgacgagtttttcgaagaaggaacaaagcttgttacttgggttaaaggagtggtaagagaccaaagagaagaggtggtgatagataaccgattaagaggatcatcggttcaagagaatgaagagatgaacgatgtgtttggtatagcgatgatgtgtcttgaacccgaaccagcaattagaccagccatgactgaggttgtcaaattgctcgaatacatcaaactttccacacgttcctctttttga

SEQ ID NO: 83682 - protein, 355 aa, Arabidopsis thaliana
  peptide (1)..(355): Ceres Seq. ID no. 12671405
  misc_feature (1)..(355): Homolog of NCBI NO: 15218397 NR Description: receptor protein kinase, putative; protein id: [Arabidopsis thaliana] >gi|25287623|pir||G96813 hypothetical
  misc_feature (10)..(351): Homolog of NCBI NO: 34904634 NR Description: putative receptor protein kinase [Oryza sativa
  misc_feature (52)..(351): Homolog of NCBI NO: 5042449 NR Description: putative protein kinase [Oryza sativa (japonica
  misc_feature (3)..(345): Homolog of NCBI NO: 25403114 NR Description: probable protein kinase [imported] - Arabidopsis >gi|12322537|gb|AAG51266.1|AC027135_7 protein kinase, putative
  misc_feature (3)..(345): Homolog of NCBI NO: 30692520 NR Description: leucine-rich repeat transmembrane protein kinase,
  misc_feature (11)..(345): Homolog of NCBI NO: 15227455 NR Description: putative receptor-like protein kinase; protein id:
  misc_feature (15)..(353): Homolog of NCBI NO: 10177448 NR Description: receptor-like protein kinase [Arabidopsis
  misc_feature (15)..(353): Homolog of NCBI NO: 30697726 NR Description: leucine rich repeat protein family [Arabidopsis >gi|26451750|dbj|BAC42970.1| putative receptor like protein
  misc_feature (52)..(347): Homolog of NCBI NO: 15240747 NR Description: receptor-like protein kinase-like protein;
  misc_feature (52)..(347): Homolog of NCBI NO: 23304947 NR Description: extra sporogenous cells [Arabidopsis thaliana]
MANAKETTFYITISVVAFVIGKIVIALLFYKRWKRKHTIHENGFPVKGGGKMVMFRSQLLNSVSSDMFMKKTHKLSNKDILGSGGFGTVYRLVIDDSTTFAVKRLNRGTSERDRGFHRELEAMADIKHRNIVTLHGYFTSPHYNLLIYELMPNGSLDSFLHGRKALDWASRYRIAVGAARGISYLHHDCIPHIIHRDIKSSNILLDHNMEARVSDFGLATLMEPDKTHVSTFVAGTFGYLAPEYFDTGKATMKGDVYSFGVVLLELLTGRKPTDDEFFEEGTKLVTWVKGVVRDQREEVVIDNRLRGSSVQENEEMNDVFGIAMMCLEPEPAIRPAMTEVVKLLEYIKLSTRSSF

SEQ ID NO: 83683 - protein, 304 aa, Arabidopsis thaliana
  peptide (1)..(304): Ceres Seq. ID no. 12671406
  misc_feature (1)..(304): Homolog of NCBI NO: 15218397 NR Description: receptor protein kinase, putative; protein id: [Arabidopsis thaliana] >gi|25287623|pir||G96813 hypothetical
  misc_feature (1)..(300): Homolog of NCBI NO: 34904634 NR Description: putative receptor protein kinase [Oryza sativa
  misc_feature (1)..(300): Homolog of NCBI NO: 5042449 NR Description: putative protein kinase [Oryza sativa (japonica
  misc_feature (1)..(294): Homolog of NCBI NO: 25403114 NR Description: probable protein kinase [imported] - Arabidopsis >gi|12322537|gb|AAG51266.1|AC027135_7 protein kinase, putative
  misc_feature (1)..(294): Homolog of NCBI NO: 30692520 NR Description: leucine-rich repeat transmembrane protein kinase,
  misc_feature (1)..(294): Homolog of NCBI NO: 15227455 NR Description: putative receptor-like protein kinase; protein id:
  misc_feature (1)..(302): Homolog of NCBI NO: 10177448 NR Description: receptor-like protein kinase [Arabidopsis
  misc_feature (1)..(302): Homolog of NCBI NO: 30697726 NR Description: leucine rich repeat protein family [Arabidopsis >gi|26451750|dbj|BAC42970.1| putative receptor like protein
  misc_feature (1)..(296): Homolog of NCBI NO: 15240747 NR Description: receptor-like protein kinase-like protein;
  misc_feature (1)..(296): Homolog of NCBI NO: 23304947 NR Description: extra sporogenous cells [Arabidopsis thaliana]
MVMFRSQLLNSVSSDMFMKKTHKLSNKDILGSGGFGTVYRLVIDDSTTFAVKRLNRGTSERDRGFHRELEAMADIKHRNIVTLHGYFTSPHYNLLIYELMPNGSLDSFLHGRKALDWASRYRIAVGAARGISYLHHDCIPHIIHRDIKSSNILLDHNMEARVSDFGLATLMEPDKTHVSTFVAGTFGYLAPEYFDTGKATMKGDVYSFGVVLLELLTGRKPTDDEFFEEGTKLVTWVKGVVRDQREEVVIDNRLRGSSVQENEEMNDVFGIAMMCLEPEPAIRPAMTEVVKLLEYIKLSTRSSF

SEQ ID NO: 83684 - protein, 302 aa, Arabidopsis thaliana
  peptide (1)..(302): Ceres Seq. ID no. 12671407
  misc_feature (1)..(302): Homolog of NCBI NO: 15218397 NR Description: receptor protein kinase, putative; protein id: [Arabidopsis thaliana] >gi|25287623|pir||G96813 hypothetical
  misc_feature (1)..(298): Homolog of NCBI NO: 34904634 NR Description: putative receptor protein kinase [Oryza sativa
  misc_feature (1)..(298): Homolog of NCBI NO: 5042449 NR Description: putative protein kinase [Oryza sativa (japonica
  misc_feature (1)..(292): Homolog of NCBI NO: 25403114 NR Description: probable protein kinase [imported] - Arabidopsis >gi|12322537|gb|AAG51266.1|AC027135_7 protein kinase, putative
  misc_feature (1)..(292): Homolog of NCBI NO: 30692520 NR Description: leucine-rich repeat transmembrane protein kinase,
  misc_feature (1)..(292): Homolog of NCBI NO: 15227455 NR Description: putative receptor-like protein kinase; protein id:
  misc_feature (1)..(300): Homolog of NCBI NO: 10177448 NR Description: receptor-like protein kinase [Arabidopsis
  misc_feature (1)..(300): Homolog of NCBI NO: 30697726 NR Description: leucine rich repeat protein family [Arabidopsis >gi|26451750|dbj|BAC42970.1| putative receptor like protein
  misc_feature (1)..(294): Homolog of NCBI NO: 15240747 NR Description: receptor-like protein kinase-like protein;
  misc_feature (1)..(294): Homolog of NCBI NO: 23304947 NR Description: extra sporogenous cells [Arabidopsis thaliana]
MFRSQLLNSVSSDMFMKKTHKLSNKDILGSGGFGTVYRLVIDDSTTFAVKRLNRGTSERDRGFHRELEAMADIKHRNIVTLHGYFTSPHYNLLIYELMPNGSLDSFLHGRKALDWASRYRIAVGAARGISYLHHDCIPHIIHRDIKSSNILLDHNMEARVSDFGLATLMEPDKTHVSTFVAGTFGYLAPEYFDTGKATMKGDVYSFGVVLLELLTGRKPTDDEFFEEGTKLVTWVKGVVRDQREEVVIDNRLRGSSVQENEEMNDVFGIAMMCLEPEPAIRPAMTEVVKLLEYIKLSTRSSF

SEQ ID NO: 83685 - DNA, 1336 bp, Arabidopsis thaliana
  misc_feature (1)..(1336): Ceres Seq. ID no. 12671421
  misc_feature: MA Experiment ID: 20000437 Result: Up-regulated in Transcription
  misc_feature: MA Experiment 20000437 PARAMETER Experiment Name: At_Drought_P Parameter: Age (day) Value: 8
  misc_feature: MA Experiment 20000437 PARAMETER Experiment Name: At_Drought_P Parameter: Organism Value: A. thaliana
  misc_feature: MA Experiment 20000437 PARAMETER Experiment Name: At_Drought_P Parameter: Plant Line Value: WS
  misc_feature: MA Experiment 20000437 PARAMETER Experiment Name: At_Drought_P Parameter: Timepoint (hr) Value: 24
  misc_feature: MA Experiment 20000437 PARAMETER Experiment Name: At_Drought_P Parameter: Tissue Value: Whole Plant
  misc_feature: MA Experiment 20000437 PARAMETER Experiment Name: At_Drought_P Parameter: Treatment Value: Drought vs. No Drought
  misc_feature: MA Experiment ID: 20000794 Result: Up-regulated in Transcription
  misc_feature: MA Experiment 20000794 PARAMETER Experiment Name: At_Petals_P Parameter: Age (day) Value: 23-25 days
  misc_feature: MA Experiment 20000794 PARAMETER Experiment Name: At_Petals_P Parameter: Plant Line Value: WS
  misc_feature: MA Experiment 20000794 PARAMETER Experiment Name: At_Petals_P Parameter: Tissue Value: Petals vs. Whole plant
  misc_feature: MA Experiment ID: 20001911 Result: Up-regulated in Transcription
  misc_feature: MA Experiment 20001911 PARAMETER Experiment Name: At_Drought_Reproduction_P Parameter: Age (day) Value: 40
  misc_feature: MA Experiment 20001911 PARAMETER Experiment Name: At_Drought_Reproduction_P Parameter: Organism Value: A. thaliana
  misc_feature: MA Experiment 20001911 PARAMETER Experiment Name: At_Drought_Reproduction_P Parameter: Plant Line Value: WS
  misc_feature: MA Experiment 20001911 PARAMETER Experiment Name: At_Drought_Reproduction_P Parameter: Timepoint (day) Value: 10
  misc_feature: MA Experiment 20001911 PARAMETER Experiment Name: At_Drought_Reproduction_P Parameter: Tissue Value: Flowers
  misc_feature: MA Experiment 20001911 PARAMETER Experiment Name: At_Drought_Reproduction_P Parameter: Treatment Value: Drought vs. No Drought
atcacattcgtttcttgaatcccctctttcagagagagaaagagagtcagagagagagagagagagaatgttccatgctaagaaaccttcaagtatgaatggttcatatgagaacagagctatgtgcgttcaaggcgattcaggccttgtcctcaccaccgaccctaaaccgcgtttgcgttggaccgtcgaactccacgagcgttttgtggacgccgtcgctcagctcggcggccccgacagtatgaacacacatacacaaatatatattcaatccatttaaccaattataaatgtgttttttcaaagtttttgatcatttctatttgcagaagcgaccccaaagacgattatgagagttatgggtgtgaagggtcttactctttaccacctaaagagccatcttcagaaattcaggcttggaaagcagccgcacaaggagtacggagatcactccacaaaggaaggttcaagagcttctgccatggatattcagcgcaacgtagcttcttcttctggcatgatgagtcgcaacatgaatgagatgcaaatggaagtgcagagaaggttgcatgaacagctagaggtgcaaagacatctgcaactgaggattgaagcacaaggaaagtacatgcaatctatcttggagagagcttgccaaaccctagccggtgagaacatggcagccgccaccgcagcagccgccgtcggaggaggatacaagggtaatctgggaagttcgagtctttcagcagcggtgggcccacctcctcatcctcttagtttcccgccgtttcaagacctaaacatctatggaaacacaaccgaccaagtcctcgaccatcacaacttccatcatcaaaacatagagaaccatttcacgggtaacaatgctgcagacaccaacatttacttggggaagaagcgacctaatcctaattttggtaacgatgtaaggaaaggactattgatgtggtctgatcaagatcacgatctttccgcaaaccaatcgatcgatgatgagcatagaattcagatacagatggctacacatgtctccacggatttggattctttgtcggagatctacgaaaggaaatcaggtttatcaggtgatgaagggaataatggtgggaaattactggaaaggccatcgcctaggagatcaccattgagtcctatgatgaaccctaatggtggattaatacaaggaagaaactcgccatttgggtgatacaatttattaatttttatctatgagtgatgcatgggaatgtaagaacgagatatatatgttttgtcattgtgagtttgacgtagggtttagagatgagac

SEQ ID NO: 83686 - protein, 293 aa, Arabidopsis thaliana
  peptide (1)..(293): Ceres Seq. ID no. 12671422
  misc_feature (1)..(293): Homolog of NCBI NO: 30699418 NR Description: transfactor -related [Arabidopsis thaliana]
  misc_feature (1)..(293): Homolog of NCBI NO: 25406584 NR Description: hypothetical protein T8K14.15 [imported] - thaliana >gi|4835766|gb|AAD30233.1|AC007202_15 Contains
  misc_feature (1)..(293): Homolog of NCBI NO: 18412370 NR Description: transfactor, putative; protein id: At1g79430.1, by cDNA: gi_15010721 [Arabidopsis thaliana] At1g79430/T8K14_15 [Arabidopsis thaliana]
  misc_feature (1)..(104): Homolog of NCBI NO: 22331031 NR Description: regulatory protein of P-starvation acclimation Psr1, putative; protein id: At3g12730.1, supported by cDNA: [Arabidopsis thaliana] >gi|17979533|gb|AAL50101.1|
  misc_feature (1)..(104): Homolog of NCBI NO: 11994415 NR Description: contains similarity to
  misc_feature (1)..(118): Homolog of NCBI NO: 18414049 NR Description: putative protein; protein id: At4g13640.1, by cDNA: 38327. [Arabidopsis thaliana]
  misc_feature (1)..(115): Homolog of NCBI NO: 18404044 NR Description: transfactor, putative; protein id: At3g24120.1, by cDNA: 6626., supported by cDNA: gi_15215653, supported by gi_20334891 [Arabidopsis thaliana] >gi|15215654|gb|AAK91372.1|
  misc_feature (1)..(115): Homolog of NCBI NO: 11994231 NR Description: contains similarity to transfactor~gene_id:MUJ8.2
  misc_feature (1)..(106): Homolog of NCBI NO: 29647444 NR Description: P0410E11.32 [Oryza sativa (japonica
  misc_feature (1)..(106): Homolog of NCBI NO: 32470629 NR Description: putative phosphate starvation response regulator
MRVMGVKGLTLYHLKSHLQKFRLGKQPHKEYGDHSTKEGSRASAMDIQRNVASSSGMMSRNMNEMQMEVQRRLHEQLEVQRHLQLRIEAQGKYMQSILERACQTLAGENMAAATAAAAVGGGYKGNLGSSSLSAAVGPPPHPLSFPPFQDLNIYGNTTDQVLDHHNFHHQNIENHFTGNNAADTNIYLGKKRPNPNFGNDVRKGLLMWSDQDHDLSANQSIDDEHRIQIQMATHVSTDLDSLSEIYERKSGLSGDEGNNGGKLLERPSPRRSPLSPMMNPNGGLIQGRNSPFG

SEQ ID NO: 83687 - protein, 290 aa, Arabidopsis thaliana
  peptide (1)..(290): Ceres Seq. ID no. 12671423
  misc_feature (1)..(290): Homolog of NCBI NO: 30699418 NR Description: transfactor -related [Arabidopsis thaliana]
  misc_feature (1)..(290): Homolog of NCBI NO: 25406584 NR Description: hypothetical protein T8K14.15 [imported] - thaliana >gi|4835766|gb|AAD30233.1|AC007202_15 Contains
  misc_feature (1)..(290): Homolog of NCBI NO: 18412370 NR Description: transfactor, putative; protein id: At1g79430.1, by cDNA: gi_15010721 [Arabidopsis thaliana] At1g79430/T8K14_15 [Arabidopsis thaliana]
  misc_feature (1)..(101): Homolog of NCBI NO: 22331031 NR Description: regulatory protein of P-starvation acclimation Psr1, putative; protein id: At3g12730.1, supported by cDNA: [Arabidopsis thaliana] >gi|17979533|gb|AAL50101.1|
  misc_feature (1)..(101): Homolog of NCBI NO: 11994415 NR Description: contains similarity to
  misc_feature (1)..(115): Homolog of NCBI NO: 18414049 NR Description: putative protein; protein id: At4g13640.1, by cDNA: 38327. [Arabidopsis thaliana]
  misc_feature (1)..(112): Homolog of NCBI NO: 18404044 NR Description: transfactor, putative; protein id: At3g24120.1, by cDNA: 6626., supported by cDNA: gi_15215653, supported by gi_20334891 [Arabidopsis thaliana] >gi|15215654|gb|AAK91372.1|
  misc_feature (1)..(112): Homolog of NCBI NO: 11994231 NR Description: contains similarity to transfactor~gene_id:MUJ8.2
  misc_feature (1)..(103): Homolog of NCBI NO: 29647444 NR Description: P0410E11.32 [Oryza sativa (japonica
  misc_feature (1)..(103): Homolog of NCBI NO: 32470629 NR Description: putative phosphate starvation response regulator
MGVKGLTLYHLKSHLQKFRLGKQPHKEYGDHSTKEGSRASAMDIQRNVASSSGMMSRNMNEMQMEVQRRLHEQLEVQRHLQLRIEAQGKYMQSILERACQTLAGENMAAATAAAAVGGGYKGNLGSSSLSAAVGPPPHPLSFPPFQDLNIYGNTTDQVLDHHNFHHQNIENHFTGNNAADTNIYLGKKRPNPNFGNDVRKGLLMWSDQDHDLSANQSIDDEHRIQIQMATHVSTDLDSLSEIYERKSGLSGDEGNNGGKLLERPSPRRSPLSPMMNPNGGLIQGRNSPFG

SEQ ID NO: 83688 - protein, 249 aa, Arabidopsis thaliana
  peptide (1)..(249): Ceres Seq. ID no. 12671424
  misc_feature (1)..(249): Homolog of NCBI NO: 30699418 NR Description: transfactor -related [Arabidopsis thaliana]
  misc_feature (1)..(249): Homolog of NCBI NO: 25406584 NR Description: hypothetical protein T8K14.15 [imported] - thaliana >gi|4835766|gb|AAD30233.1|AC007202_15 Contains
  misc_feature (1)..(249): Homolog of NCBI NO: 18412370 NR Description: transfactor, putative; protein id: At1g79430.1, by cDNA: gi_15010721 [Arabidopsis thaliana] At1g79430/T8K14_15 [Arabidopsis thaliana]
  misc_feature (1)..(60): Homolog of NCBI NO: 22331031 NR Description: regulatory protein of P-starvation acclimation Psr1, putative; protein id: At3g12730.1, supported by cDNA: [Arabidopsis thaliana] >gi|17979533|gb|AAL50101.1|
  misc_feature (1)..(60): Homolog of NCBI NO: 11994415 NR Description: contains similarity to
  misc_feature (1)..(74): Homolog of NCBI NO: 18414049 NR Description: putative protein; protein id: At4g13640.1, by cDNA: 38327. [Arabidopsis thaliana]
  misc_feature (1)..(71): Homolog of NCBI NO: 18404044 NR Description: transfactor, putative; protein id: At3g24120.1, by cDNA: 6626., supported by cDNA: gi_15215653, supported by gi_20334891 [Arabidopsis thaliana] >gi|15215654|gb|AAK91372.1|
  misc_feature (1)..(71): Homolog of NCBI NO: 11994231 NR Description: contains similarity to transfactor~gene_id:MUJ8.2
  misc_feature (1)..(62): Homolog of NCBI NO: 29647444 NR Description: P0410E11.32 [Oryza sativa (japonica
  misc_feature (1)..(62): Homolog of NCBI NO: 32470629 NR Description: putative phosphate starvation response regulator
MDIQRNVASSSGMMSRNMNEMQMEVQRRLHEQLEVQRHLQLRIEAQGKYMQSILERACQTLAGENMAAATAAAAVGGGYKGNLGSSSLSAAVGPPPHPLSFPPFQDLNIYGNTTDQVLDHHNFHHQNIENHFTGNNAADTNIYLGKKRPNPNFGNDVRKGLLMWSDQDHDLSANQSIDDEHRIQIQMATHVSTDLDSLSEIYERKSGLSGDEGNNGGKLLERPSPRRSPLSPMMNPNGGLIQGRNSPFG

SEQ ID NO: 83689 - DNA, 2490 bp, Arabidopsis thaliana
  misc_feature (1)..(2490): Ceres Seq. ID no. 12671441
  misc_feature: MA Experiment ID: 20000169 Result: Up-regulated in Transcription
  misc_feature: MA Experiment 20000169 PARAMETER Experiment Name: At_100uM_ABA_P Parameter: Age (day) Value: 14
  misc_feature: MA Experiment 20000169 PARAMETER Experiment Name: At_100uM_ABA_P Parameter: Organism Value: A. thaliana
  misc_feature: MA Experiment 20000169 PARAMETER Experiment Name: At_100uM_ABA_P Parameter: Plant Line Value: WS
  misc_feature: MA Experiment 20000169 PARAMETER Experiment Name: At_100uM_ABA_P Parameter: Timepoint (hr) Value: 6
  misc_feature: MA Experiment 20000169 PARAMETER Experiment Name: At_100uM_ABA_P Parameter: Tissue Value: Aerial
  misc_feature: MA Experiment 20000169 PARAMETER Experiment Name: At_100uM_ABA_P Parameter: Treatment Value: 100uM ABA vs. No Treatment
  misc_feature: MA Experiment ID: 20000180 Result: Up-regulated in Transcription
  misc_feature: MA Experiment 20000180 PARAMETER Experiment Name: At_Germinating_Seeds_P Parameter: Age (hr) Value: 24 vs. 0
  misc_feature: MA Experiment 20000180 PARAMETER Experiment Name: At_Germinating_Seeds_P Parameter: Tissue Value: Germinating Seeds
  misc_feature: MA Experiment ID: 20000182 Result: Up-regulated in Transcription
  misc_feature: MA Experiment 20000182 PARAMETER Experiment Name: At_2mM_SA_P Parameter: Age (day) Value: 14
  misc_feature: MA Experiment 20000182 PARAMETER Experiment Name: At_2mM_SA_P Parameter: Organism Value: A. thaliana
  misc_feature: MA Experiment 20000182 PARAMETER Experiment Name: At_2mM_SA_P Parameter: Plant Line Value: WS
  misc_feature: MA Experiment 20000182 PARAMETER Experiment Name: At_2mM_SA_P Parameter: Timepoint (hr) Value: 6
  misc_feature: MA Experiment 20000182 PARAMETER Experiment Name: At_2mM_SA_P Parameter: Tissue Value: Aerial
  misc_feature: MA Experiment 20000182 PARAMETER Experiment Name: At_2mM_SA_P Parameter: Treatment Value: 2mM SA vs. No Treatment
  misc_feature: MA Experiment ID: 20000184 Result: Up-regulated in Transcription
  misc_feature: MA Experiment 20000184 PARAMETER Experiment Name: At_Shoots__P Parameter: Age (day) Value: 7
  misc_feature: MA Experiment 20000184 PARAMETER Experiment Name: At_Shoots__P Parameter: Tissue Value: Shoots vs. Whole Plant
  misc_feature: MA Experiment ID: 20000227 Result: Up-regulated in Transcription
  misc_feature: MA Experiment 20000227 PARAMETER Experiment Name: At_Root-Tips-vs-Tops_P Parameter: Tissue Value: Root Tips vs. Root Tops
  misc_feature: MA Experiment ID: 20000264 Result: Down-regulated in Transcription
  misc_feature: MA Experiment 20000264 PARAMETER Experiment Name: At_Open_Flower_P Parameter: Age (day) Value: 21
  misc_feature: MA Experiment 20000264 PARAMETER Experiment Name: At_Open_Flower_P Parameter: Plant Line Value: WS
  misc_feature: MA Experiment 20000264 PARAMETER Experiment Name: At_Open_Flower_P Parameter: Tissue Value: Open Flower vs. Whole Plant
  misc_feature: MA Experiment ID: 20000268 Result: Up-regulated in Transcription
  misc_feature: MA Experiment 20000268 PARAMETER Experiment Name: At_100mM_NaCl__P Parameter: Age (day) Value: 14
  misc_feature: MA Experiment 20000268 PARAMETER Experiment Name: At_100mM_NaCl__P Parameter: Organism Value: A. thaliana
  misc_feature: MA Experiment 20000268 PARAMETER Experiment Name: At_100mM_NaCl__P Parameter: Plant Line Value: WS
  misc_feature: MA Experiment 20000268 PARAMETER Experiment Name: At_100mM_NaCl__P Parameter: Timepoint (hr) Value: 6
  misc_feature: MA Experiment 20000268 PARAMETER Experiment Name: At_100mM_NaCl__P Parameter: Tissue Value: Whole Plant
  misc_feature: MA Experiment 20000268 PARAMETER Experiment Name: At_100mM_NaCl__P Parameter: Treatment Value: 100mM NaCl vs. No Treatment
  misc_feature: MA Experiment ID: 20000436 Result: Up-regulated in Transcription
  misc_feature: MA Experiment 20000436 PARAMETER Experiment Name: At_Drought_P Parameter: Age (day) Value: 7
  misc_feature: MA Experiment 20000436 PARAMETER Experiment Name: At_Drought_P Parameter: Organism Value: A. thaliana
  misc_feature: MA Experiment 20000436 PARAMETER Experiment Name: At_Drought_P Parameter: Plant Line Value: WS
  misc_feature: MA Experiment 20000436 PARAMETER Experiment Name: At_Drought_P Parameter: Timepoint (hr) Value: 12
  misc_feature: MA Experiment 20000436 PARAMETER Experiment Name: At_Drought_P Parameter: Tissue Value: Whole Plant
  misc_feature: MA Experiment 20000436 PARAMETER Experiment Name: At_Drought_P Parameter: Treatment Value: Drought vs. No Drought
  misc_feature: MA Experiment ID: 20000437 Result: Up-regulated in Transcription
  misc_feature: MA Experiment 20000437 PARAMETER Experiment Name: At_Drought_P Parameter: Age (day) Value: 8
  misc_feature: MA Experiment 20000437 PARAMETER Experiment Name: At_Drought_P Parameter: Organism Value: A. thaliana
  misc_feature: MA Experiment 20000437 PARAMETER Experiment Name: At_Drought_P Parameter: Plant Line Value: WS
  misc_feature: MA Experiment 20000437 PARAMETER Experiment Name: At_Drought_P Parameter: Timepoint (hr) Value: 24
  misc_feature: MA Experiment 20000437 PARAMETER Experiment Name: At_Drought_P Parameter: Tissue Value: Whole Plant
  misc_feature: MA Experiment 20000437 PARAMETER Experiment Name: At_Drought_P Parameter: Treatment Value: Drought vs. No Drought
  misc_feature: MA Experiment ID: 20000438 Result: Up-regulated in Transcription
  misc_feature: MA Experiment 20000438 PARAMETER Experiment Name: At_Shoots__P Parameter: Age (day) Value: 14
  misc_feature: MA Experiment 20000438 PARAMETER Experiment Name: At_Shoots__P Parameter: Tissue Value: Shoots vs. Whole Plant
  misc_feature: MA Experiment ID: 20000439 Result: Up-regulated in Transcription
  misc_feature: MA Experiment 20000439 PARAMETER Experiment Name: At_Roots__P Parameter: Age (day) Value: 14 vs. 21
  misc_feature: MA Experiment 20000439 PARAMETER Experiment Name: At_Roots__P Parameter: Organism Value: A. thaliana
  misc_feature: MA Experiment 20000439 PARAMETER Experiment Name: At_Roots__P Parameter: Tissue Value: Roots vs. Whole Plant
  misc_feature: MA Experiment ID: 20000452 Result: Up-regulated in Transcription
  misc_feature: MA Experiment 20000452 PARAMETER Experiment Name: At_CS6879_Shoots-Roots_P Parameter: Age (day) Value: 14
  misc_feature: MA Experiment 20000452 PARAMETER Experiment Name: At_CS6879_Shoots-Roots_P Parameter: Organism Value: A. thaliana
  misc_feature: MA Experiment 20000452 PARAMETER Experiment Name: At_CS6879_Shoots-Roots_P Parameter: Plant Line Value: CS6879 vs. WS
  misc_feature: MA Experiment 20000452 PARAMETER Experiment Name: At_CS6879_Shoots-Roots_P Parameter: Tissue Value: Shoots
  misc_feature: MA Experiment ID: 20000453 Result: Up-regulated in Transcription
  misc_feature: MA Experiment 20000453 PARAMETER Experiment Name: At_100uM_ABA_P Parameter: Age (day) Value: 15
  misc_feature: MA Experiment 20000453 PARAMETER Experiment Name: At_100uM_ABA_P Parameter: Organism Value: A. thaliana
  misc_feature: MA Experiment 20000453 PARAMETER Experiment Name: At_100uM_ABA_P Parameter: Plant Line Value: WS
  misc_feature: MA Experiment 20000453 PARAMETER Experiment Name: At_100uM_ABA_P Parameter: Timepoint (hr) Value: 24
  misc_feature: MA Experiment 20000453 PARAMETER Experiment Name: At_100uM_ABA_P Parameter: Tissue Value: Aerial
  misc_feature: MA Experiment 20000453 PARAMETER Experiment Name: At_100uM_ABA_P Parameter: Treatment Value: 100uM ABA vs. No Treatment
  misc_feature: MA Experiment ID: 20000495 Result: Up-regulated in Transcription
  misc_feature: MA Experiment 20000495 PARAMETER Experiment Name: At_Guard_Cells_P Parameter: Harvest Date Value: 8/2/2002
  misc_feature: MA Experiment 20000495 PARAMETER Experiment Name: At_Guard_Cells_P Parameter: Organism Value: A. thaliana
  misc_feature: MA Experiment 20000495 PARAMETER Experiment Name: At_Guard_Cells_P Parameter: Tissue Value: Guard Cells vs. Leaves
  misc_feature: MA Experiment ID: 20000496 Result: Up-regulated in Transcription
  misc_feature: MA Experiment 20000496 PARAMETER Experiment Name: At_Guard_Cells_P Parameter: Harvest Date Value: 7/19/2002
  misc_feature: MA Experiment 20000496 PARAMETER Experiment Name: At_Guard_Cells_P Parameter: Organism Value: Canola
  misc_feature: MA Experiment 20000496 PARAMETER Experiment Name: At_Guard_Cells_P Parameter: Tissue Value: Guard Cells vs. Leaves
  misc_feature: MA Experiment ID: 20000527 Result: Down-regulated in Transcription
  misc_feature: MA Experiment 20000527 PARAMETER Experiment Name: At_10percent_PEG_P Parameter: Age (day) Value: 20
  misc_feature: MA Experiment 20000527 PARAMETER Experiment Name: At_10percent_PEG_P Parameter: Organism Value: A. thaliana
  misc_feature: MA Experiment 20000527 PARAMETER Experiment Name: At_10percent_PEG_P Parameter: Plant Line Value: WS
  misc_feature: MA Experiment 20000527 PARAMETER Experiment Name: At_10percent_PEG_P Parameter: Timepoint (day) Value: 20
  misc_feature: MA Experiment 20000527 PARAMETER Experiment Name: At_10percent_PEG_P Parameter: Tissue Value: Whole Plant
  misc_feature: MA Experiment 20000527 PARAMETER Experiment Name: At_10percent_PEG_P Parameter: Treatment Value: 10percent PEG vs. No Treatment
  misc_feature: MA Experiment ID: 20000709 Result: Down-regulated in Transcription
  misc_feature: MA Experiment 20000709 PARAMETER Experiment Name: At_15mM_NH4NO3_L-to-H_P Parameter: Age (hr) Value: 14
  misc_feature: MA Experiment 20000709 PARAMETER Experiment Name: At_15mM_NH4NO3_L-to-H_P Parameter: Organism Value: A. thaliana
  misc_feature: MA Experiment 20000709 PARAMETER Experiment Name: At_15mM_NH4NO3_L-to-H_P Parameter: Plant Line Value: WS
  misc_feature: MA Experiment 20000709 PARAMETER Experiment Name: At_15mM_NH4NO3_L-to-H_P Parameter: Timepoint (hr) Value: 4
  misc_feature: MA Experiment 20000709 PARAMETER Experiment Name: At_15mM_NH4NO3_L-to-H_P Parameter: Tissue Value: Aerial
  misc_feature: MA Experiment 20000709 PARAMETER Experiment Name: At_15mM_NH4NO3_L-to-H_P Parameter: Treatment Value: 15mM NH4NO3 vs. 30mM Mannitol
  misc_feature: MA Experiment ID: 20001248 Result: Down-regulated in Transcription
  misc_feature: MA Experiment 20001248 PARAMETER Experiment Name: At_Far-red-induction_P Parameter: Age (day) Value: 7
  misc_feature: MA Experiment 20001248 PARAMETER Experiment Name: At_Far-red-induction_P Parameter: Light Value: Far-red vs. White
  misc_feature: MA Experiment 20001248 PARAMETER Experiment Name: At_Far-red-induction_P Parameter: Organism Value: A. thaliana
  misc_feature: MA Experiment 20001248 PARAMETER Experiment Name: At_Far-red-induction_P Parameter: Plant Line Value: Columbia
  misc_feature: MA Experiment 20001248 PARAMETER Experiment Name: At_Far-red-induction_P Parameter: Timepoint (hr) Value: 4
  misc_feature: MA Experiment 20001248 PARAMETER Experiment Name: At_Far-red-induction_P Parameter: Tissue Value: Whole Plant
  misc_feature: MA Experiment ID: 20001450 Result: Down-regulated in Transcription
  misc_feature: MA Experiment 20001450 PARAMETER Experiment Name: At_Far-red-induction_P Parameter: Age (day) Value: 7
  misc_feature: MA Experiment 20001450 PARAMETER Experiment Name: At_Far-red-induction_P Parameter: Light Value: Far-red vs. White
  misc_feature: MA Experiment 20001450 PARAMETER Experiment Name: At_Far-red-induction_P Parameter: Organism Value: A. thaliana
  misc_feature: MA Experiment 20001450 PARAMETER Experiment Name: At_Far-red-induction_P Parameter: Plant Line Value: Columbia
  misc_feature: MA Experiment 20001450 PARAMETER Experiment Name: At_Far-red-induction_P Parameter: Timepoint (hr) Value: 8
  misc_feature: MA Experiment 20001450 PARAMETER Experiment Name: At_Far-red-induction_P Parameter: Tissue Value: Whole Plant
  misc_feature: MA Experiment ID: 20001451 Result: Down-regulated in Transcription
  misc_feature: MA Experiment 20001451 PARAMETER Experiment Name: At_Far-red-induction_P Parameter: Age (day) Value: 7
  misc_feature: MA Experiment 20001451 PARAMETER Experiment Name: At_Far-red-induction_P Parameter: Light Value: Far-red vs. White
  misc_feature: MA Experiment 20001451 PARAMETER Experiment Name: At_Far-red-induction_P Parameter: Organism Value: A. thaliana
  misc_feature: MA Experiment 20001451 PARAMETER Experiment Name: At_Far-red-induction_P Parameter: Plant Line Value: Columbia
  misc_feature: MA Experiment 20001451 PARAMETER Experiment Name: At_Far-red-induction_P Parameter: Timepoint (hr) Value: 24
  misc_feature: MA Experiment 20001451 PARAMETER Experiment Name: At_Far-red-induction_P Parameter: Tissue Value: Whole Plant
  misc_feature: MA Experiment ID: 20001557 Result: Up-regulated in Transcription
  misc_feature: MA Experiment 20001557 PARAMETER Experiment Name: At_Drought_Soil_Dry_P Parameter: Age (day) Value: 27
  misc_feature: MA Experiment 20001557 PARAMETER Experiment Name: At_Drought_Soil_Dry_P Parameter: Organism Value: A. thaliana
  misc_feature: MA Experiment 20001557 PARAMETER Experiment Name: At_Drought_Soil_Dry_P Parameter: Plant Line Value: WS
  misc_feature: MA Experiment 20001557 PARAMETER Experiment Name: At_Drought_Soil_Dry_P Parameter: Post Timepoint (hr) Value: 3
  misc_feature: MA Experiment 20001557 PARAMETER Experiment Name: At_Drought_Soil_Dry_P Parameter: Post-Treatment Value: Re-Water vs. No Drought
  misc_feature: MA Experiment 20001557 PARAMETER Experiment Name: At_Drought_Soil_Dry_P Parameter: Timepoint (day) Value: 13
  misc_feature: MA Experiment 20001557 PARAMETER Experiment Name: At_Drought_Soil_Dry_P Parameter: Treatment Value: Drought vs. No Drought
  misc_feature: MA Experiment ID: 20001558 Result: Up-regulated in Transcription
  misc_feature: MA Experiment 20001558 PARAMETER Experiment Name: At_Drought_Soil_Dry_P Parameter: Age (day) Value: 27
  misc_feature: MA Experiment 20001558 PARAMETER Experiment Name: At_Drought_Soil_Dry_P Parameter: Organism Value: A. thaliana
  misc_feature: MA Experiment 20001558 PARAMETER Experiment Name: At_Drought_Soil_Dry_P Parameter: Plant Line Value: WS
  misc_feature: MA Experiment 20001558 PARAMETER Experiment Name: At_Drought_Soil_Dry_P Parameter: Post Timepoint (hr) Value: 6
  misc_feature: MA Experiment 20001558 PARAMETER Experiment Name: At_Drought_Soil_Dry_P Parameter: Post-Treatment Value: Re-Water vs. No Drought
  misc_feature: MA Experiment 20001558 PARAMETER Experiment Name: At_Drought_Soil_Dry_P Parameter: Timepoint (day) Value: 13
  misc_feature: MA Experiment 20001558 PARAMETER Experiment Name: At_Drought_Soil_Dry_P Parameter: Treatment Value: Drought vs. No Drought
  misc_feature: MA Experiment ID: 20001560 Result: Up-regulated in Transcription
  misc_feature: MA Experiment 20001560 PARAMETER Experiment Name: At_Drought_Soil_Dry_P Parameter: Age (day) Value: 28
  misc_feature: MA Experiment 20001560 PARAMETER Experiment Name: At_Drought_Soil_Dry_P Parameter: Organism Value: A. thaliana
  misc_feature: MA Experiment 20001560 PARAMETER Experiment Name: At_Drought_Soil_Dry_P Parameter: Plant Line Value: WS
  misc_feature: MA Experiment 20001560 PARAMETER Experiment Name: At_Drought_Soil_Dry_P Parameter: Post Timepoint (hr) Value: None
  misc_feature: MA Experiment 20001560 PARAMETER Experiment Name: At_Drought_Soil_Dry_P Parameter: Post-Treatment Value: None
  misc_feature: MA Experiment 20001560 PARAMETER Experiment Name: At_Drought_Soil_Dry_P Parameter: Timepoint (day) Value: 14
  misc_feature: MA Experiment 20001560 PARAMETER Experiment Name: At_Drought_Soil_Dry_P Parameter: Treatment Value: Drought vs. No Drought
  misc_feature: MA Experiment ID: 20001906 Result: Up-regulated in Transcription
  misc_feature: MA Experiment 20001906 PARAMETER Experiment Name: At_Drought_Reproduction_P Parameter: Age (day) Value: 35
  misc_feature: MA Experiment 20001906 PARAMETER Experiment Name: At_Drought_Reproduction_P Parameter: Organism Value: A. thaliana
  misc_feature: MA Experiment 20001906 PARAMETER Experiment Name: At_Drought_Reproduction_P Parameter: Plant Line Value: WS
  misc_feature: MA Experiment 20001906 PARAMETER Experiment Name: At_Drought_Reproduction_P Parameter: Timepoint (day) Value: 5
  misc_feature: MA Experiment 20001906 PARAMETER Experiment Name: At_Drought_Reproduction_P Parameter: Tissue Value: Siliques
  misc_feature: MA Experiment 20001906 PARAMETER Experiment Name: At_Drought_Reproduction_P Parameter: Treatment Value: Drought vs. No Drought
  misc_feature: MA Experiment ID: 20001907 Result: Up-regulated in Transcription
  misc_feature: MA Experiment 20001907 PARAMETER Experiment Name: At_Drought_Reproduction_P Parameter: Age (day) Value: 37
  misc_feature: MA Experiment 20001907 PARAMETER Experiment Name: At_Drought_Reproduction_P Parameter: Organism Value: A. thaliana
  misc_feature: MA Experiment 20001907 PARAMETER Experiment Name: At_Drought_Reproduction_P Parameter: Plant Line Value: WS
  misc_feature: MA Experiment 20001907 PARAMETER Experiment Name: At_Drought_Reproduction_P Parameter: Timepoint (day) Value: 7
  misc_feature: MA Experiment 20001907 PARAMETER Experiment Name: At_Drought_Reproduction_P Parameter: Tissue Value: Siliques
  misc_feature: MA Experiment 20001907 PARAMETER Experiment Name: At_Drought_Reproduction_P Parameter: Treatment Value: Drought vs. No Drought
  misc_feature: MA Experiment ID: 20001908 Result: Up-regulated in Transcription
  misc_feature: MA Experiment 20001908 PARAMETER Experiment Name: At_Drought_Reproduction_P Parameter: Age (day) Value: 40
  misc_feature: MA Experiment 20001908 PARAMETER Experiment Name: At_Drought_Reproduction_P Parameter: Organism Value: A. thaliana
  misc_feature: MA Experiment 20001908 PARAMETER Experiment Name: At_Drought_Reproduction_P Parameter: Plant Line Value: WS
  misc_feature: MA Experiment 20001908 PARAMETER Experiment Name: At_Drought_Reproduction_P Parameter: Timepoint (day) Value: 10
  misc_feature: MA Experiment 20001908 PARAMETER Experiment Name: At_Drought_Reproduction_P Parameter: Tissue Value: Siliques
  misc_feature: MA Experiment 20001908 PARAMETER Experiment Name: At_Drought_Reproduction_P Parameter: Treatment Value: Drought vs. No Drought
agtgaaagtccaacaaagatacaaagaagaagagagaagaagaagaagaatgaagctaacacataacttctcgtttcttcttcttcttcttcttgttcacatgagctcgaaacacattcttgcttctaaagattcgtcttcatatgtggtgtacttcggagctcactctcatgtcggagagataacagaagatgccatggatcgagtcaaagaaactcactacgactttcttggttccttcactggaagccgtgagagagccacagacgccattttctactcatacacaaagcacatcaacggattcgctgctcatctagaccacgaccttgcttatgaaatctccaaacaccctgaagttgtgtctgtcttcccaaacaaagctttaaagcttcacacgactcgatcatgggactttttgggtttggaacataactcttacgttccttcctcttccatttggagaaaggctaggttcggagaagataccattattgcaaatctcgatacaggtgtgtggccagaatcaaagagctttagagatgaaggcttgggaccaattccttcaagatggaagggaatatgtcaaaaccaaaaagatgccactttccattgcaataggaaactgataggagcaaggtacttcaacaagggctacgcagccgccgtaggacatctcaactcaagcttcgactctccacgtgatctcgacggccatggctcccacactctctccaccgccgccggagattttgttcctggagtcagcatcttcggccaaggcaacggcacggccaaaggtggctcccctcgcgccagagtggccgcgtacaaagtctgctggccgccagtcaaaggcaacgaatgctacgacgcagacgtcctcgctgctttcgacgctgccatacacgacggagctgacgtcatatccgtctctctaggcggcgagcctacctcgttttttaacgacagtgtcgctattggttcctttcacgccgctaagaagcggatcgtggttgtttgctctgccggaaactctggaccggcagatagtacggtttctaatgtcgcgccatggcagattaccgttggtgctagcaccatggaccgtgagtttgctagcaatcttgttctcggtaatggaaaacattacaagggacaaagcttgtcatccacggcattgccacatgctaagttctatccaattatggcatctgtaaatgcaaaagctaagaacgcttcagctttggatgcacaattatgcaaacttggatcgcttgaccctataaagacaaagggaaagatattagtgtgtctcagagggcagaacgggagggtggaaaagggtcgggccgtggctttagggggtggcatagggatggttcttgagaacacttatgtcaccgggaatgatttactcgctgacccgcatgtccttccagccacacagctcacttctaaggatagttttgctgtgtcaagatatatcagccaaaccaagaagccgattgcacacattactccttcaaggacagatttgggactaaaaccagcgcctgtaatggcttcattttcttcaaaaggtccaagcatagtggctcctcagattctgaagcctgacataactgctcctggtgtgagtgtgatcgctgcctacactggagcagtctctccaacaaacgaacagtttgatcctcgacgacttctgttcaatgctatttcaggaacctctatgtcttgtcctcatatctctggcattgcgggtcttctcaaaactcgttatccttcttggagccccgcagctatccgctctgccatcatgactaccgcaacaataatggatgacattcctggacctatccaaaatgcaaccaacatgaaggcaacacctttcagttttggggcaggacacgtccaaccaaatttagctgtgaatcccggtctcgtatacgatttaggcatcaaggattacctcaacttcttatgctcacttggatacaatgcatcacaaatctctgtattctcgggcaacaactttacttgttcaagccctaaaatcagtcttgttaacctcaactatccttccatcacagttccaaacttaacatcaagcaaagtcaccgtttcaaggactgttaaaaacgttggacgaccttcgatgtataccgtcaaggtgaataacccacagggtgtttatgtcgcggtgaagccaacgagcttgaatttcaccaaagttggagagcaaaagacgtttaaagtgatccttgtgaaaagtaagggaaatgtggctaagggctatgtgtttggagaattggtttggtcagacaagaagcatcgtgtgagaagtcccattgtggtgaagctctaactttgaatttgagtgccaattatgatatttgatctatgaagtttagttgcctatatgtttgaatttaaggcttacaaagaatggtgtaatgttgtgctgatcatataaaataatacctagac

SEQ ID NO: 83690 - protein, 788 aa, Arabidopsis thaliana
  peptide (1)..(788): Ceres Seq. ID no. 12671442
  misc_feature (393)..(496): Pfam Name: PA domain Pfam Description: PA domain
  misc_feature (208)..(788): Homolog of NCBI NO: 20198169 NR Description: subtilisin-like serine protease AIR3 [Arabidopsis
  misc_feature (1)..(788): Homolog of NCBI NO: 30697281 NR Description: subtilisin-like serine protease [Arabidopsis
  misc_feature (47)..(788): Homolog of NCBI NO: 9757901 NR Description: serine protease-like protein [Arabidopsis
  misc_feature (1)..(768): Homolog of NCBI NO: 26451139 NR Description: putative subtilisin-like protease [Arabidopsis
  misc_feature (368)..(788): Homolog of NCBI NO: 15010692 NR Description: At2g04160/T16B23.1 [Arabidopsis thaliana]
  misc_feature (48)..(786): Homolog of NCBI NO: 24414066 NR Description: subtilisin-like serine protease [Oryza sativa
  misc_feature (24)..(786): Homolog of NCBI NO: 34910800 NR Description: subtilisin-like protease [Oryza sativa (japonica
  misc_feature (85)..(786): Homolog of NCBI NO: 18423316 NR Description: subtilisin-like serine protease; protein id:
  misc_feature (81)..(786): Homolog of NCBI NO: 7435656 NR Description: subtilisin-like proteinase (EC 3.4.21.-) 2 -
  misc_feature (91)..(786): Homolog of NCBI NO: 25289834 NR Description: F22M8.3 protein - Arabidopsis thaliana Contains similarity to p69d gene from Lycopersicon esculentum and contains a Peptidase S8 PF|00082 domain. [Arabidopsis
VKVQQRYKEEERRRRRMKLTHNFSFLLLLLLVHMSSKHILASKDSSSYVVYFGAHSHVGEITEDAMDRVKETHYDFLGSFTGSRERATDAIFYSYTKHINGFAAHLDHDLAYEISKHPEVVSVFPNKALKLHTTRSWDFLGLEHNSYVPSSSIWRKARFGEDTIIANLDTGVWPESKSFRDEGLGPIPSRWKGICQNQKDATFHCNRKLIGARYFNKGYAAAVGHLNSSFDSPRDLDGHGSHTLSTAAGDFVPGVSIFGQGNGTAKGGSPRARVAAYKVCWPPVKGNECYDADVLAAFDAAIHDGADVISVSLGGEPTSFFNDSVAIGSFHAAKKRIVVVCSAGNSGPADSTVSNVAPWQITVGASTMDREFASNLVLGNGKHYKGQSLSSTALPHAKFYPIMASVNAKAKNASALDAQLCKLGSLDPIKTKGKILVCLRGQNGRVEKGRAVALGGGIGMVLENTYVTGNDLLADPHVLPATQLTSKDSFAVSRYISQTKKPIAHITPSRTDLGLKPAPVMASFSSKGPSIVAPQILKPDITAPGVSVIAAYTGAVSPTNEQFDPRRLLFNAISGTSMSCPHISGIAGLLKTRYPSWSPAAIRSAIMTTATIMDDIPGPIQNATNMKATPFSFGAGHVQPNLAVNPGLVYDLGIKDYLNFLCSLGYNASQISVFSGNNFTCSSPKISLVNLNYPSITVPNLTSSKVTVSRTVKNVGRPSMYTVKVNNPQGVYVAVKPTSLNFTKVGEQKTFKVILVKSKGNVAKGYVFGELVWSDKKHRVRSPIVVKL

SEQ ID NO: 83691 - protein, 772 aa, Arabidopsis thaliana
  peptide (1)..(772): Ceres Seq. ID no. 12671443
  misc_feature (377)..(480): Pfam Name: PA domain Pfam Description: PA domain
  misc_feature (192)..(772): Homolog of NCBI NO: 20198169 NR Description: subtilisin-like serine protease AIR3 [Arabidopsis
  misc_feature (1)..(772): Homolog of NCBI NO: 30697281 NR Description: subtilisin-like serine protease [Arabidopsis
  misc_feature (31)..(772): Homolog of NCBI NO: 9757901 NR Description: serine protease-like protein [Arabidopsis
  misc_feature (1)..(752): Homolog of NCBI NO: 26451139 NR Description: putative subtilisin-like protease [Arabidopsis
  misc_feature (352)..(772): Homolog of NCBI NO: 15010692 NR Description: At2g04160/T16B23.1 [Arabidopsis thaliana]
  misc_feature (32)..(770): Homolog of NCBI NO: 24414066 NR Description: subtilisin-like serine protease [Oryza sativa
  misc_feature (8)..(770): Homolog of NCBI NO: 34910800 NR Description: subtilisin-like protease [Oryza sativa (japonica
  misc_feature (69)..(770): Homolog of NCBI NO: 18423316 NR Description: subtilisin-like serine protease; protein id:
  misc_feature (65)..(770): Homolog of NCBI NO: 7435656 NR Description: subtilisin-like proteinase (EC 3.4.21.-) 2 -
  misc_feature (75)..(770): Homolog of NCBI NO: 25289834 NR Description: F22M8.3 protein - Arabidopsis thaliana Contains similarity to p69d gene from Lycopersicon esculentum and contains a Peptidase S8 PF|00082 domain. [Arabidopsis
MKLTHNFSFLLLLLLVHMSSKHILASKDSSSYVVYFGAHSHVGEITEDAMDRVKETHYDFLGSFTGSRERATDAIFYSYTKHINGFAAHLDHDLAYEISKHPEVVSVFPNKALKLHTTRSWDFLGLEHNSYVPSSSIWRKARFGEDTIIANLDTGVWPESKSFRDEGLGPIPSRWKGICQNQKDATFHCNRKLIGARYFNKGYAAAVGHLNSSFDSPRDLDGHGSHTLSTAAGDFVPGVSIFGQGNGTAKGGSPRARVAAYKVCWPPVKGNECYDADVLAAFDAAIHDGADVISVSLGGEPTSFFNDSVAIGSFHAAKKRIVVVCSAGNSGPADSTVSNVAPWQITVGASTMDREFASNLVLGNGKHYKGQSLSSTALPHAKFYPIMASVNAKAKNASALDAQLCKLGSLDPIKTKGKILVCLRGQNGRVEKGRAVALGGGIGMVLENTYVTGNDLLADPHVLPATQLTSKDSFAVSRYISQTKKPIAHITPSRTDLGLKPAPVMASFSSKGPSIVAPQILKPDITAPGVSVIAAYTGAVSPTNEQFDPRRLLFNAISGTSMSCPHISGIAGLLKTRYPSWSPAAIRSAIMTTATIMDDIPGPIQNATNMKATPFSFGAGHVQPNLAVNPGLVYDLGIKDYLNFLCSLGYNASQISVFSGNNFTCSSPKISLVNLNYPSITVPNLTSSKVTVSRTVKNVGRPSMYTVKVNNPQGVYVAVKPTSLNFTKVGEQKTFKVILVKSKGNVAKGYVFGELVWSDKKHRVRSPIVVKL

SEQ ID NO: 83692 - protein, 755 aa, Arabidopsis thaliana
  peptide (1)..(755): Ceres Seq. ID no. 12671444
  misc_feature (360)..(463): Pfam Name: PA domain Pfam Description: PA domain
  misc_feature (175)..(755): Homolog of NCBI NO: 20198169 NR Description: subtilisin-like serine protease AIR3 [Arabidopsis
  misc_feature (1)..(755): Homolog of NCBI NO: 30697281 NR Description: subtilisin-like serine protease [Arabidopsis
  misc_feature (14)..(755): Homolog of NCBI NO: 9757901 NR Description: serine protease-like protein [Arabidopsis
  misc_feature (1)..(735): Homolog of NCBI NO: 26451139 NR Description: putative subtilisin-like protease [Arabidopsis
  misc_feature (335)..(755): Homolog of NCBI NO: 15010692 NR Description: At2g04160/T16B23.1 [Arabidopsis thaliana]
  misc_feature (15)..(753): Homolog of NCBI NO: 24414066 NR Description: subtilisin-like serine protease [Oryza sativa
  misc_feature (1)..(753): Homolog of NCBI NO: 34910800 NR Description: subtilisin-like protease [Oryza sativa (japonica
  misc_feature (52)..(753): Homolog of NCBI NO: 18423316 NR Description: subtilisin-like serine protease; protein id:
  misc_feature (48)..(753): Homolog of NCBI NO: 7435656 NR Description: subtilisin-like proteinase (EC 3.4.21.-) 2 -
  misc_feature (58)..(753): Homolog of NCBI NO: 25289834 NR Description: F22M8.3 protein - Arabidopsis thaliana Contains similarity to p69d gene from Lycopersicon esculentum and contains a Peptidase S8 PF|00082 domain. [Arabidopsis
MSSKHILASKDSSSYVVYFGAHSHVGEITEDAMDRVKETHYDFLGSFTGSRERATDAIFYSYTKHINGFAAHLDHDLAYEISKHPEVVSVFPNKALKLHTTRSWDFLGLEHNSYVPSSSIWRKARFGEDTIIANLDTGVWPESKSFRDEGLGPIPSRWKGICQNQKDATFHCNRKLIGARYFNKGYAAAVGHLNSSFDSPRDLDGHGSHTLSTAAGDFVPGVSIFGQGNGTAKGGSPRARVAAYKVCWPPVKGNECYDADVLAAFDAAIHDGADVISVSLGGEPTSFFNDSVAIGSFHAAKKRIVVVCSAGNSGPADSTVSNVAPWQITVGASTMDREFASNLVLGNGKHYKGQSLSSTALPHAKFYPIMASVNAKAKNASALDAQLCKLGSLDPIKTKGKILVCLRGQNGRVEKGRAVALGGGIGMVLENTYVTGNDLLADPHVLPATQLTSKDSFAVSRYISQTKKPIAHITPSRTDLGLKPAPVMASFSSKGPSIVAPQILKPDITAPGVSVIAAYTGAVSPTNEQFDPRRLLFNAISGTSMSCPHISGIAGLLKTRYPSWSPAAIRSAIMTTATIMDDIPGPIQNATNMKATPFSFGAGHVQPNLAVNPGLVYDLGIKDYLNFLCSLGYNASQISVFSGNNFTCSSPKISLVNLNYPSITVPNLTSSKVTVSRTVKNVGRPSMYTVKVNNPQGVYVAVKPTSLNFTKVGEQKTFKVILVKSKGNVAKGYVFGELVWSDKKHRVRSPIVVKL

SEQ ID NO: 83693 - DNA, 924 bp, Arabidopsis thaliana
  misc_feature (1)..(924): Ceres Seq. ID no. 12671445
  misc_feature: MA Experiment ID: 20000794 Result: Up-regulated in Transcription
  misc_feature: MA Experiment 20000794 PARAMETER Experiment Name: At_Petals_P Parameter: Age (day) Value: 23-25 days
  misc_feature: MA Experiment 20000794 PARAMETER Experiment Name: At_Petals_P Parameter: Plant Line Value: WS
  misc_feature: MA Experiment 20000794 PARAMETER Experiment Name: At_Petals_P Parameter: Tissue Value: Petals vs. Whole plant
  misc_feature: MA Experiment ID: 20001910 Result: Up-regulated in Transcription
  misc_feature: MA Experiment 20001910 PARAMETER Experiment Name: At_Drought_Reproduction_P Parameter: Age (day) Value: 37
  misc_feature: MA Experiment 20001910 PARAMETER Experiment Name: At_Drought_Reproduction_P Parameter: Organism Value: A. thaliana
  misc_feature: MA Experiment 20001910 PARAMETER Experiment Name: At_Drought_Reproduction_P Parameter: Plant Line Value: WS
  misc_feature: MA Experiment 20001910 PARAMETER Experiment Name: At_Drought_Reproduction_P Parameter: Timepoint (day) Value: 7
  misc_feature: MA Experiment 20001910 PARAMETER Experiment Name: At_Drought_Reproduction_P Parameter: Tissue Value: Flowers
  misc_feature: MA Experiment 20001910 PARAMETER Experiment Name: At_Drought_Reproduction_P Parameter: Treatment Value: Drought vs. No Drought
atgtcatttagatcacattcgagagggagtagtcaattcgcagagaaggtaacagaggatcctgtaacgtacaagacagcacaaagcaccgtgacgtgcatttaccaagcgcatatatccggattctggaggaatgttacggtattgtggtcaaagaatctcatgaatcattcgcttatggtcatggtgacaaacgtggaaggcgatatgaattattgttgcaaggttgatctgaagccttggcatttttggaacaagaaaggctacaagtcgttcgatgtggaaggtaacccggtagaggtgtattgggattttaggtctgcgaaattcacgagtagtccagagccgagctcggatttctacgtggctttagtctcggaggaagaggtggttttgcttgtgggtgattacaagaagaaagctttcaagagaacaaagtcgaggcctgctttggtcgaggctgccttgttctacaagaaagaaaacgtgtttggcaagaagtgtttcaccaccagggctaagttttacgataggaaaaaagaacacgagatcatcgtggaaagctcgacctccgggcctaaagagccagagatgtggattagcatagatgggattgtgttgatacaagtcaagaatttgcaatggaaattcagagggaatcagacagtgttggtagataaacaacctgttcaagtgttttgggacgtgtatgattggttgttcagcatgcctgggacaggccatggtttgttcatattcaaaccagggaccaccgaagacagcgacatggaaggaagtggtcacggtggtggtggtggtggtgagagcgatacaagtacagggagcaggtattattcgaccaagagtagtaacccttggccgccagagttttgcctttttcttcatgcatacaaacttgagtag

SEQ ID NO: 83694 - protein, 307 aa, Arabidopsis thaliana
  peptide (1)..(307): Ceres Seq. ID no. 12671446
  misc_feature (24)..(306): Pfam Name: Plant protein of unknown function (DUF868) Pfam Description: Plant protein of unknown function (DUF868)
  misc_feature (1)..(307): Homolog of NCBI NO: 15228105 NR Description: hypothetical protein; protein id: At2g04220.1 thaliana] >gi|20198211|gb|AAD27916.2| hypothetical protein thaliana] >gi|20198251|gb|AAM15482.1| hypothetical protein
  misc_feature (62)..(307): Homolog of NCBI NO: 25334990 NR Description: hypothetical protein At2g04220 [imported] -
  misc_feature (8)..(262): Homolog of NCBI NO: 15235452 NR Description: putative protein; protein id: At4g12690.1, by cDNA: 12923. [Arabidopsis thaliana] >gi|7459232|pir||T06627
  misc_feature (1)..(307): Homolog of NCBI NO: 15238927 NR Description: putative protein; protein id: At5g48270.1 thaliana] >gi|8777417|dbj|BAA97007.1|
  misc_feature (74)..(255): Homolog of NCBI NO: 20804936 NR Description: P0456E05.14 [Oryza sativa (japonica
  misc_feature (28)..(69): Homolog of NCBI NO: 20804936 NR Description: P0456E05.14 [Oryza sativa (japonica
  misc_feature (29)..(305): Homolog of NCBI NO: 22331055 NR Description: hypothetical protein; protein id: At3g13229.1 thaliana] >gi|9294527|dbj|BAB02790.1|
  misc_feature (25)..(261): Homolog of NCBI NO: 15241702 NR Description: putative protein; protein id: At5g28150.1, by cDNA: gi_19699076 [Arabidopsis thaliana] AT5g28150/T24G3_80 [Arabidopsis thaliana]
  misc_feature (27)..(266): Homolog of NCBI NO: 30102999 NR Description: hypothetical protein [Oryza sativa (japonica
  misc_feature (25)..(254): Homolog of NCBI NO: 18397034 NR Description: expressed protein; protein id: At3g04860.1, by cDNA: 5170., supported by cDNA: gi_16612260 [Arabidopsis
MSFRSHSRGSSQFAEKVTEDPVTYKTAQSTVTCIYQAHISGFWRNVTVLWSKNLMNHSLMVMVTNVEGDMNYCCKVDLKPWHFWNKKGYKSFDVEGNPVEVYWDFRSAKFTSSPEPSSDFYVALVSEEEVVLLVGDYKKKAFKRTKSRPALVEAALFYKKENVFGKKCFTTRAKFYDRKKEHEIIVESSTSGPKEPEMWISIDGIVLIQVKNLQWKFRGNQTVLVDKQPVQVFWDVYDWLFSMPGTGHGLFIFKPGTTEDSDMEGSGHGGGGGGESDTSTGSRYYSTKSSNPWPPEFCLFLHAYKLE

SEQ ID NO: 83695 - protein, 253 aa, Arabidopsis thaliana
  peptide (1)..(253): Ceres Seq. ID no. 12671447
  misc_feature (1)..(252): Pfam Name: Plant protein of unknown function (DUF868) Pfam Description: Plant protein of unknown function (DUF868)
  misc_feature (1)..(253): Homolog of NCBI NO: 15228105 NR Description: hypothetical protein; protein id: At2g04220.1 thaliana] >gi|20198211|gb|AAD27916.2| hypothetical protein thaliana] >gi|20198251|gb|AAM15482.1| hypothetical protein
  misc_feature (8)..(253): Homolog of NCBI NO: 25334990 NR Description: hypothetical protein At2g04220 [imported] -
  misc_feature (1)..(208): Homolog of NCBI NO: 15235452 NR Description: putative protein; protein id: At4g12690.1, by cDNA: 12923. [Arabidopsis thaliana] >gi|7459232|pir||T06627
  misc_feature (1)..(253): Homolog of NCBI NO: 15238927 NR Description: putative protein; protein id: At5g48270.1 thaliana] >gi|8777417|dbj|BAA97007.1|
  misc_feature (20)..(201): Homolog of NCBI NO: 20804936 NR Description: P0456E05.14 [Oryza sativa (japonica
  misc_feature (1)..(15): Homolog of NCBI NO: 20804936 NR Description: P0456E05.14 [Oryza sativa (japonica
  misc_feature (1)..(251): Homolog of NCBI NO: 22331055 NR Description: hypothetical protein; protein id: At3g13229.1 thaliana] >gi|9294527|dbj|BAB02790.1|
  misc_feature (1)..(207): Homolog of NCBI NO: 15241702 NR Description: putative protein; protein id: At5g28150.1, by cDNA: gi_19699076 [Arabidopsis thaliana] AT5g28150/T24G3_80 [Arabidopsis thaliana]
  misc_feature (1)..(212): Homolog of NCBI NO: 30102999 NR Description: hypothetical protein [Oryza sativa (japonica
  misc_feature (1)..(200): Homolog of NCBI NO: 18397034 NR Description: expressed protein; protein id: At3g04860.1, by cDNA: 5170., supported by cDNA: gi_16612260 [Arabidopsis
MNHSLMVMVTNVEGDMNYCCKVDLKPWHFWNKKGYKSFDVEGNPVEVYWDFRSAKFTSSPEPSSDFYVALVSEEEVVLLVGDYKKKAFKRTKSRPALVEAALFYKKENVFGKKCFTTRAKFYDRKKEHEIIVESSTSGPKEPEMWISIDGIVLIQVKNLQWKFRGNQTVLVDKQPVQVFWDVYDWLFSMPGTGHGLFIFKPGTTEDSDMEGSGHGGGGGGESDTSTGSRYYSTKSSNPWPPEFCLFLHAYKLE

SEQ ID NO: 83696 - protein, 248 aa, Arabidopsis thaliana
  peptide (1)..(248): Ceres Seq. ID no. 12671448
  misc_feature (1)..(247): Pfam Name: Plant protein of unknown function (DUF868) Pfam Description: Plant protein of unknown function (DUF868)
  misc_feature (1)..(248): Homolog of NCBI NO: 15228105 NR Description: hypothetical protein; protein id: At2g04220.1 thaliana] >gi|20198211|gb|AAD27916.2| hypothetical protein thaliana] >gi|20198251|gb|AAM15482.1| hypothetical protein
  misc_feature (3)..(248): Homolog of NCBI NO: 25334990 NR Description: hypothetical protein At2g04220 [imported] -
  misc_feature (1)..(203): Homolog of NCBI NO: 15235452 NR Description: putative protein; protein id: At4g12690.1, by cDNA: 12923. [Arabidopsis thaliana] >gi|7459232|pir||T06627
  misc_feature (1)..(248): Homolog of NCBI NO: 15238927 NR Description: putative protein; protein id: At5g48270.1 thaliana] >gi|8777417|dbj|BAA97007.1|
  misc_feature (15)..(196): Homolog of NCBI NO: 20804936 NR Description: P0456E05.14 [Oryza sativa (japonica
  misc_feature (1)..(246): Homolog of NCBI NO: 22331055 NR Description: hypothetical protein; protein id: At3g13229.1 thaliana] >gi|9294527|dbj|BAB02790.1|
  misc_feature (1)..(202): Homolog of NCBI NO: 15241702 NR Description: putative protein; protein id: At5g28150.1, by cDNA: gi_19699076 [Arabidopsis thaliana] AT5g28150/T24G3_80 [Arabidopsis thaliana]
  misc_feature (1)..(207): Homolog of NCBI NO: 30102999 NR Description: hypothetical protein [Oryza sativa (japonica
  misc_feature (1)..(195): Homolog of NCBI NO: 18397034 NR Description: expressed protein; protein id: At3g04860.1, by cDNA: 5170., supported by cDNA: gi_16612260 [Arabidopsis
  misc_feature (1)..(195): Homolog of NCBI NO: 21593854 NR Description: unknown [Arabidopsis thaliana]
MVMVTNVEGDMNYCCKVDLKPWHFWNKKGYKSFDVEGNPVEVYWDFRSAKFTSSPEPSSDFYVALVSEEEVVLLVGDYKKKAFKRTKSRPALVEAALFYKKENVFGKKCFTTRAKFYDRKKEHEIIVESSTSGPKEPEMWISIDGIVLIQVKNLQWKFRGNQTVLVDKQPVQVFWDVYDWLFSMPGTGHGLFIFKPGTTEDSDMEGSGHGGGGGGESDTSTGSRYYSTKSSNPWPPEFCLFLHAYKLE

SEQ ID NO: 83697 - DNA, 2094 bp, Arabidopsis thaliana
  misc_feature (1)..(2094): Ceres Seq. ID no. 12671471
  misc_feature: MA Experiment ID: 20000180 Result: Down-regulated in Transcription
  misc_feature: MA Experiment 20000180 PARAMETER Experiment Name: At_Germinating_Seeds_P Parameter: Age (hr) Value: 24 vs. 0
  misc_feature: MA Experiment 20000180 PARAMETER Experiment Name: At_Germinating_Seeds_P Parameter: Tissue Value: Germinating Seeds
  misc_feature: MA Experiment ID: 20001247 Result: Down-regulated in Transcription
  misc_feature: MA Experiment 20001247 PARAMETER Experiment Name: At_Far-red-induction_P Parameter: Age (day) Value: 7
  misc_feature: MA Experiment 20001247 PARAMETER Experiment Name: At_Far-red-induction_P Parameter: Light Value: Far-red vs. White
  misc_feature: MA Experiment 20001247 PARAMETER Experiment Name: At_Far-red-induction_P Parameter: Organism Value: A. thaliana
  misc_feature: MA Experiment 20001247 PARAMETER Experiment Name: At_Far-red-induction_P Parameter: Plant Line Value: Columbia
  misc_feature: MA Experiment 20001247 PARAMETER Experiment Name: At_Far-red-induction_P Parameter: Timepoint (hr) Value: 1
  misc_feature: MA Experiment 20001247 PARAMETER Experiment Name: At_Far-red-induction_P Parameter: Tissue Value: Whole Plant
atggcaacaaaatcatttctcaaactcgctgctgatctctcttctttcaccgattcttcaccattcgcaaagcttcttgattcatgcatcaaatccaagttatcagcaatctacgtccgttatgtccatgcttctgtcatcaaatcaggtttctccaatgaaatatttatacagaatcggctcatcgacgcttattcgaaatgtgggtcactcgaggatggtcgccaagtgttcgacaaaatgcctcaacgaaatatctacacttggaactctgttgtgacgggtttgacaaagttaggatttttagatgaagctgattctttattcaggtcaatgcctgaacgtgatcaatgtacttggaattctatggtttcgggttttgcgcaacatgataggtgtgaagaggctttgtgttattttgctatgatgcataaggaagggtttgtgcttaatgaatatagttttgctagtgttcttagtgcttgttctggtttgaatgatatgaataagggtgtacaagtacattctttgattgcgaaatcgccttttttgtcagatgtgtatataggttctgctcttgttgacatgtattccaaatgcggtaatgtaaatgatgctcagagggtttttgatgagatgggtgatagaaatgttgtttcttggaatagtttgattacatgttttgaacaaaatggtcctgcggtggaagctctcgatgtttttcaaatgatgttagaatctagggttgagccagatgaggttactttagctagtgtgattagtgcctgtgcaagcttgtcggcgattaaggttggtcaggaagttcatggccgtgttgttaaaaacgataagttgaggaatgatataattctaagcaatgcgtttgtggatatgtatgcaaagtgcagcaggataaaagaagctaggtttatatttgatagcatgcctatcagaaatgttattgcagaaacctccatgatcagtgggtacgcaatggctgcaagcactaaggcggctagactcatgtttaccaaaatggcggagaggaatgttgtttcatggaatgcgcttattgctggctatacgcagaacggagaaaacgaagaagcacttagtctcttttgtctcttgaagagggaatcagtatgcccaactcactattcctttgctaatatcctcaaggcatgtgcagatcttgcagagttacatctcggtatgcaggctcacgtgcatgtcttgaagcatggctttaagtttcaatctggtgaagaagatgatatatttgttggcaattccttgatagatatgtatgtgaaatgtggttgtgtagaagagggttatcttgtattcaggaagatgatggaaagagattgtgtttcctggaacgcgatgattattggatttgcacaaaatggttatggaaatgaggctcttgagttgttcagagaaatgcttgagtctggagaaaaaccagatcacattaccatgattggtgttctttctgcatgcgggcatgctggatttgttgaagaagggcggcactacttttcttctatgaccagagattttggtgtggctccgcttagggatcactatacttgcatggtcgatttgcttggtcgagctggatttctcgaagaagcaaagagcatgattgaggagatgcctatgcaaccagattctgttatatggggttctttgcttgctgcttgtaaagtacataggaacattacgttaggtaaatacgttgcagagaagcttttagaagtagagccgtcaaattcaggaccatatgttcttctttctaacatgtacgctgagctcggaaaatgggaggatgtgatgaatgtacgaaagtcgatgaggaaagagggagtcacaaagcagccagggtgtagttggataaagatacaaggacatgatcatgttttcatggttaaagataaaagccatcctcgaaaaaagcagatacactcgcttcttgatattttaatagccgagatgagaccggaacaagatcatactgaaataggatcactctcgtccgaggaaatggattattcatctaatcttctttgggacaacgccatgtaa

SEQ ID NO: 83698 - protein, 697 aa, Arabidopsis thaliana
  peptide (1)..(697): Ceres Seq. ID no. 12671472
  misc_feature (118)..(152): Pfam Name: PPR repeat Pfam Description: PPR repeat
  misc_feature (13)..(689): Homolog of NCBI NO: 21740490 NR Description: OSJNBa0006B20.5 [Oryza sativa (japonica
  misc_feature (18)..(668): Homolog of NCBI NO: 32487551 NR Description: OSJNBa0013K16.3 [Oryza sativa (japonica
  misc_feature (1)..(686): Homolog of NCBI NO: 9279687 NR Description: gb|AAC35225.1~gene_id:MWI23.6~strong similarity
  misc_feature (1)..(686): Homolog of NCBI NO: 15228829 NR Description: hypothetical protein; protein id: At3g22690.1
  misc_feature (318)..(669): Homolog of NCBI NO: 15226200 NR Description: putative selenium-binding protein; protein id:
  misc_feature (102)..(346): Homolog of NCBI NO: 15226200 NR Description: putative selenium-binding protein; protein id:
  misc_feature (58)..(691): Homolog of NCBI NO: 15227619 NR Description: hypothetical protein; protein id: At2g29760.1
  misc_feature (290)..(684): Homolog of NCBI NO: 18394615 NR Description: hypothetical protein; protein id: At1g18485.1
  misc_feature (14)..(336): Homolog of NCBI NO: 18394615 NR Description: hypothetical protein; protein id: At1g18485.1
  misc_feature (91)..(351): Homolog of NCBI NO: 15226200 NR Description: putative selenium-binding protein; protein id:
MATKSFLKLAADLSSFTDSSPFAKLLDSCIKSKLSAIYVRYVHASVIKSGFSNEIFIQNRLIDAYSKCGSLEDGRQVFDKMPQRNIYTWNSVVTGLTKLGFLDEADSLFRSMPERDQCTWNSMVSGFAQHDRCEEALCYFAMMHKEGFVLNEYSFASVLSACSGLNDMNKGVQVHSLIAKSPFLSDVYIGSALVDMYSKCGNVNDAQRVFDEMGDRNVVSWNSLITCFEQNGPAVEALDVFQMMLESRVEPDEVTLASVISACASLSAIKVGQEVHGRVVKNDKLRNDIILSNAFVDMYAKCSRIKEARFIFDSMPIRNVIAETSMISGYAMAASTKAARLMFTKMAERNVVSWNALIAGYTQNGENEEALSLFCLLKRESVCPTHYSFANILKACADLAELHLGMQAHVHVLKHGFKFQSGEEDDIFVGNSLIDMYVKCGCVEEGYLVFRKMMERDCVSWNAMIIGFAQNGYGNEALELFREMLESGEKPDHITMIGVLSACGHAGFVEEGRHYFSSMTRDFGVAPLRDHYTCMVDLLGRAGFLEEAKSMIEEMPMQPDSVIWGSLLAACKVHRNITLGKYVAEKLLEVEPSNSGPYVLLSNMYAELGKWEDVMNVRKSMRKEGVTKQPGCSWIKIQGHDHVFMVKDKSHPRKKQIHSLLDILIAEMRPEQDHTEIGSLSSEEMDYSSNLLWDNAM

SEQ ID NO: 83699 - protein, 617 aa, Arabidopsis thaliana
  peptide (1)..(617): Ceres Seq. ID no. 12671473
  misc_feature (38)..(72): Pfam Name: PPR repeat Pfam Description: PPR repeat
  misc_feature (1)..(609): Homolog of NCBI NO: 21740490 NR Description: OSJNBa0006B20.5 [Oryza sativa (japonica
  misc_feature (1)..(588): Homolog of NCBI NO: 32487551 NR Description: OSJNBa0013K16.3 [Oryza sativa (japonica
  misc_feature (1)..(606): Homolog of NCBI NO: 9279687 NR Description: gb|AAC35225.1~gene_id:MWI23.6~strong similarity
  misc_feature (1)..(606): Homolog of NCBI NO: 15228829 NR Description: hypothetical protein; protein id: At3g22690.1
  misc_feature (238)..(589): Homolog of NCBI NO: 15226200 NR Description: putative selenium-binding protein; protein id:
  misc_feature (22)..(266): Homolog of NCBI NO: 15226200 NR Description: putative selenium-binding protein; protein id:
  misc_feature (1)..(611): Homolog of NCBI NO: 15227619 NR Description: hypothetical protein; protein id: At2g29760.1
  misc_feature (210)..(604): Homolog of NCBI NO: 18394615 NR Description: hypothetical protein; protein id: At1g18485.1
  misc_feature (1)..(256): Homolog of NCBI NO: 18394615 NR Description: hypothetical protein; protein id: At1g18485.1
  misc_feature (11)..(271): Homolog of NCBI NO: 15226200 NR Description: putative selenium-binding protein; protein id:
MPQRNIYTWNSVVTGLTKLGFLDEADSLFRSMPERDQCTWNSMVSGFAQHDRCEEALCYFAMMHKEGFVLNEYSFASVLSACSGLNDMNKGVQVHSLIAKSPFLSDVYIGSALVDMYSKCGNVNDAQRVFDEMGDRNVVSWNSLITCFEQNGPAVEALDVFQMMLESRVEPDEVTLASVISACASLSAIKVGQEVHGRVVKNDKLRNDIILSNAFVDMYAKCSRIKEARFIFDSMPIRNVIAETSMISGYAMAASTKAARLMFTKMAERNVVSWNALIAGYTQNGENEEALSLFCLLKRESVCPTHYSFANILKACADLAELHLGMQAHVHVLKHGFKFQSGEEDDIFVGNSLIDMYVKCGCVEEGYLVFRKMMERDCVSWNAMIIGFAQNGYGNEALELFREMLESGEKPDHITMIGVLSACGHAGFVEEGRHYFSSMTRDFGVAPLRDHYTCMVDLLGRAGFLEEAKSMIEEMPMQPDSVIWGSLLAACKVHRNITLGKYVAEKLLEVEPSNSGPYVLLSNMYAELGKWEDVMNVRKSMRKEGVTKQPGCSWIKIQGHDHVFMVKDKSHPRKKQIHSLLDILIAEMRPEQDHTEIGSLSSEEMDYSSNLLWDNAM

SEQ ID NO: 83700 - protein, 586 aa, Arabidopsis thaliana
  peptide (1)..(586): Ceres Seq. ID no. 12671474
  misc_feature (7)..(41): Pfam Name: PPR repeat Pfam Description: PPR repeat
  misc_feature (1)..(578): Homolog of NCBI NO: 21740490 NR Description: OSJNBa0006B20.5 [Oryza sativa (japonica
  misc_feature (1)..(557): Homolog of NCBI NO: 32487551 NR Description: OSJNBa0013K16.3 [Oryza sativa (japonica
  misc_feature (1)..(575): Homolog of NCBI NO: 9279687 NR Description: gb|AAC35225.1~gene_id:MWI23.6~strong similarity
  misc_feature (1)..(575): Homolog of NCBI NO: 15228829 NR Description: hypothetical protein; protein id: At3g22690.1
  misc_feature (207)..(558): Homolog of NCBI NO: 15226200 NR Description: putative selenium-binding protein; protein id:
  misc_feature (1)..(235): Homolog of NCBI NO: 15226200 NR Description: putative selenium-binding protein; protein id:
  misc_feature (1)..(580): Homolog of NCBI NO: 15227619 NR Description: hypothetical protein; protein id: At2g29760.1
  misc_feature (179)..(573): Homolog of NCBI NO: 18394615 NR Description: hypothetical protein; protein id: At1g18485.1
  misc_feature (1)..(225): Homolog of NCBI NO: 18394615 NR Description: hypothetical protein; protein id: At1g18485.1
  misc_feature (1)..(240): Homolog of NCBI NO: 15226200 NR Description: putative selenium-binding protein; protein id:
MPERDQCTWNSMVSGFAQHDRCEEALCYFAMMHKEGFVLNEYSFASVLSACSGLNDMNKGVQVHSLIAKSPFLSDVYIGSALVDMYSKCGNVNDAQRVFDEMGDRNVVSWNSLITCFEQNGPAVEALDVFQMMLESRVEPDEVTLASVISACASLSAIKVGQEVHGRVVKNDKLRNDIILSNAFVDMYAKCSRIKEARFIFDSMPIRNVIAETSMISGYAMAASTKAARLMFTKMAERNVVSWNALIAGYTQNGENEEALSLFCLLKRESVCPTHYSFANILKACADLAELHLGMQAHVHVLKHGFKFQSGEEDDIFVGNSLIDMYVKCGCVEEGYLVFRKMMERDCVSWNAMIIGFAQNGYGNEALELFREMLESGEKPDHITMIGVLSACGHAGFVEEGRHYFSSMTRDFGVAPLRDHYTCMVDLLGRAGFLEEAKSMIEEMPMQPDSVIWGSLLAACKVHRNITLGKYVAEKLLEVEPSNSGPYVLLSNMYAELGKWEDVMNVRKSMRKEGVTKQPGCSWIKIQGHDHVFMVKDKSHPRKKQIHSLLDILIAEMRPEQDHTEIGSLSSEEMDYSSNLLWDNAM

SEQ ID NO: 83701 - DNA, 1535 bp, Arabidopsis thaliana
  misc_feature (1)..(1535): Ceres Seq. ID no. 12671475
  misc_feature: MA Experiment ID: 20000182 Result: Up-regulated in Transcription
  misc_feature: MA Experiment 20000182 PARAMETER Experiment Name: At_2mM_SA_P Parameter: Age (day) Value: 14
  misc_feature: MA Experiment 20000182 PARAMETER Experiment Name: At_2mM_SA_P Parameter: Organism Value: A. thaliana
  misc_feature: MA Experiment 20000182 PARAMETER Experiment Name: At_2mM_SA_P Parameter: Plant Line Value: WS
  misc_feature: MA Experiment 20000182 PARAMETER Experiment Name: At_2mM_SA_P Parameter: Timepoint (hr) Value: 6
  misc_feature: MA Experiment 20000182 PARAMETER Experiment Name: At_2mM_SA_P Parameter: Tissue Value: Aerial
  misc_feature: MA Experiment 20000182 PARAMETER Experiment Name: At_2mM_SA_P Parameter: Treatment Value: 2mM SA vs. No Treatment
  misc_feature: MA Experiment ID: 20000227 Result: Down-regulated in Transcription
  misc_feature: MA Experiment 20000227 PARAMETER Experiment Name: At_Root-Tips-vs-Tops_P Parameter: Tissue Value: Root Tips vs. Root Tops
  misc_feature: MA Experiment ID: 20000451 Result: Up-regulated in Transcription
  misc_feature: MA Experiment 20000451 PARAMETER Experiment Name: At_CS6879_Shoots-Roots_P Parameter: Age (day) Value: 14
  misc_feature: MA Experiment 20000451 PARAMETER Experiment Name: At_CS6879_Shoots-Roots_P Parameter: Organism Value: A. thaliana
  misc_feature: MA Experiment 20000451 PARAMETER Experiment Name: At_CS6879_Shoots-Roots_P Parameter: Plant Line Value: CS6879 vs. WS
  misc_feature: MA Experiment 20000451 PARAMETER Experiment Name: At_CS6879_Shoots-Roots_P Parameter: Tissue Value: Roots
  misc_feature: MA Experiment ID: 20000527 Result: Down-regulated in Transcription
  misc_feature: MA Experiment 20000527 PARAMETER Experiment Name: At_10percent_PEG_P Parameter: Age (day) Value: 20
  misc_feature: MA Experiment 20000527 PARAMETER Experiment Name: At_10percent_PEG_P Parameter: Organism Value: A. thaliana
  misc_feature: MA Experiment 20000527 PARAMETER Experiment Name: At_10percent_PEG_P Parameter: Plant Line Value: WS
  misc_feature: MA Experiment 20000527 PARAMETER Experiment Name: At_10percent_PEG_P Parameter: Timepoint (day) Value: 20
  misc_feature: MA Experiment 20000527 PARAMETER Experiment Name: At_10percent_PEG_P Parameter: Tissue Value: Whole Plant
  misc_feature: MA Experiment 20000527 PARAMETER Experiment Name: At_10percent_PEG_P Parameter: Treatment Value: 10percent PEG vs. No Treatment
  misc_feature: MA Experiment ID: 20001905 Result: Up-regulated in Transcription
  misc_feature: MA Experiment 20001905 PARAMETER Experiment Name: At_Drought_Reproduction_P Parameter: Age (day) Value: 40
  misc_feature: MA Experiment 20001905 PARAMETER Experiment Name: At_Drought_Reproduction_P Parameter: Organism Value: A. thaliana
  misc_feature: MA Experiment 20001905 PARAMETER Experiment Name: At_Drought_Reproduction_P Parameter: Plant Line Value: WS
  misc_feature: MA Experiment 20001905 PARAMETER Experiment Name: At_Drought_Reproduction_P Parameter: Timepoint (day) Value: 10
  misc_feature: MA Experiment 20001905 PARAMETER Experiment Name: At_Drought_Reproduction_P Parameter: Tissue Value: Rosettes
  misc_feature: MA Experiment 20001905 PARAMETER Experiment Name: At_Drought_Reproduction_P Parameter: Treatment Value: Drought vs. No Drought
gtctacatatctttttgaagccgtcataacttgcaagtaaagaatggtcagtctaatgttctttagttcggcctcacctttatgctcttctccatcaaaaattcccaaggctagtttggacttcgagatgaagaaacttggtggcagcacaaaacttgttcggaacgtgaatttggagaaactaaagaacaattatttgtttcctgaaatcaacagacgtgaacttgagcacattgaaaagcatccaaatgtacaattgataagccttgggactggtgatacaacagagcctattccagagcaaataacctcacatatgtctaacttcgcacatggcctatcgaccgtagaaggatatagagggtatgggttggaacaaggaaataagaccctgcgaaaagctattgctgaaacgttttatagagatttgcacgtaaaaagcaatgaagtttttgtatcagatggtgcacaaagtgatatttctcgtcttcagctactcttaggctccaacgtcacaattgctgtgcaagatcctaccttcccggcttacatagattcaagtgtgataatcggtcagactggtcatttccatgaaaaaaccaagaagtaccaaaatgttgtttacatgccatgtgggcctaacaatagtttcttccctgatctggctatgaccccaaggaccgatgtcatcttcttttgttctcctaataaccctactggttatgttgcatccagaaaacaactacatcaactagttgattttgcaaagaccaatgggtccattattatatttgactccgcatatgctgcttttatcgaagatggtagtccacgttctatatatgaaattcctggtgctagagaggtcgcgattgaagtttcatcattctctaagtttgcgggtttcaccggtgttcggcttggttggtctatcatccctgatgagctcttgtactctaatggttttcccattatcaacgatttccatcgtattgtgaccacttccttcaacggagcttcaaatattgctcaggctggtggattggcatgcctttcttctggtggccttaaggagatacggtcggtgaacaactactacaaagagaacaggaagatactgatggacactctagtctcgcttggcctcaaggtttatggtggtgtaaatgctccatacttgtgggttcactttaagggatcaaaatcgtgggacgtttttaatgagattcttgaaaacactcatataataacagtaccaggctcaggttttggacccggtggagaagagtatttgaggattagtgggtttggacgcagagatcacattgttgaagcatcaaagaggttgcagaatttctttaacacacgaaccaaacattttacttatctctcttccacttctaataccaattaggataaatacatctcgtgttatgtgcatcgtcttgaataatttcttccacctcttgtaccataatgtatattattgaaataataaaagctacgagaccatggaccatggtagtgtttttcat

SEQ ID NO: 83702 - protein, 456 aa, Arabidopsis thaliana
  peptide (1)..(456): Ceres Seq. ID no. 12671476
  misc_feature (124)..(439): Pfam Name: Aminotransferase class I and II Pfam Description: Aminotransferase class I and II
  misc_feature (1)..(456): Homolog of NCBI NO: 18397344 NR Description: putative aspartate aminotransferase; protein id: supported by cDNA: gi_15982837 [Arabidopsis thaliana] At2g13810/F13J11.16 [Arabidopsis thaliana]
  misc_feature (33)..(456): Homolog of NCBI NO: 25315768 NR Description: probable aspartate aminotransferase [imported] -
  misc_feature (36)..(439): Homolog of NCBI NO: 37703720 NR Description: putative aminotransferase AGD2 [Oryza sativa
  misc_feature (30)..(439): Homolog of NCBI NO: 7447845 NR Description: probable transaminase (EC 2.6.1.-) T16L1.170 - Arabidopsis thaliana >gi|3549670|emb|CAA20581.1| putative [Arabidopsis thaliana] >gi|7270317|emb|CAB80085.1| putative
  misc_feature (30)..(439): Homolog of NCBI NO: 18418270 NR Description: putative protein; protein id: At4g33680.1, by cDNA: gi_15912290, supported by cDNA: gi_17529043 [Arabidopsis >gi|15912291|gb|AAL08279.1| AT4g33680/T16L1_170 [Arabidopsis
  misc_feature (31)..(438): Homolog of NCBI NO: 37703722 NR Description: putative aminotransferase ALD1 [Oryza sativa
  misc_feature (31)..(438): Homolog of NCBI NO: 24414269 NR Description: Putative transaminase [Oryza sativa (japonica
  misc_feature (41)..(435): Homolog of NCBI NO: 24213476 NR Description: aminotransferase [Leptospira interrogans serovar str. 56601] >gi|24194250|gb|AAN47975.1|AE011264_3
  misc_feature (41)..(435): Homolog of NCBI NO: 15678081 NR Description: aspartate aminotransferase related protein
  misc_feature (41)..(436): Homolog of NCBI NO: 23055537 NR Description: hypothetical protein [Geobacter metallireducens]
MVSLMFFSSASPLCSSPSKIPKASLDFEMKKLGGSTKLVRNVNLEKLKNNYLFPEINRRELEHIEKHPNVQLISLGTGDTTEPIPEQITSHMSNFAHGLSTVEGYRGYGLEQGNKTLRKAIAETFYRDLHVKSNEVFVSDGAQSDISRLQLLLGSNVTIAVQDPTFPAYIDSSVIIGQTGHFHEKTKKYQNVVYMPCGPNNSFFPDLAMTPRTDVIFFCSPNNPTGYVASRKQLHQLVDFAKTNGSIIIFDSAYAAFIEDGSPRSIYEIPGAREVAIEVSSFSKFAGFTGVRLGWSIIPDELLYSNGFPIINDFHRIVTTSFNGASNIAQAGGLACLSSGGLKEIRSVNNYYKENRKILMDTLVSLGLKVYGGVNAPYLWVHFKGSKSWDVFNEILENTHIITVPGSGFGPGGEEYLRISGFGRRDHIVEASKRLQNFFNTRTKHFTYLSSTSNTN

SEQ ID NO: 83703 - protein, 452 aa, Arabidopsis thaliana
  peptide (1)..(452): Ceres Seq. ID no. 12671477
  misc_feature (120)..(435): Pfam Name: Aminotransferase class I and II Pfam Description: Aminotransferase class I and II
  misc_feature (1)..(452): Homolog of NCBI NO: 18397344 NR Description: putative aspartate aminotransferase; protein id: supported by cDNA: gi_15982837 [Arabidopsis thaliana] At2g13810/F13J11.16 [Arabidopsis thaliana]
  misc_feature (29)..(452): Homolog of NCBI NO: 25315768 NR Description: probable aspartate aminotransferase [imported] -
  misc_feature (32)..(435): Homolog of NCBI NO: 37703720 NR Description: putative aminotransferase AGD2 [Oryza sativa
  misc_feature (26)..(435): Homolog of NCBI NO: 7447845 NR Description: probable transaminase (EC 2.6.1.-) T16L1.170 - Arabidopsis thaliana >gi|3549670|emb|CAA20581.1| putative [Arabidopsis thaliana] >gi|7270317|emb|CAB80085.1| putative
  misc_feature (26)..(435): Homolog of NCBI NO: 18418270 NR Description: putative protein; protein id: At4g33680.1, by cDNA: gi_15912290, supported by cDNA: gi_17529043 [Arabidopsis >gi|15912291|gb|AAL08279.1| AT4g33680/T16L1_170 [Arabidopsis
  misc_feature (27)..(434): Homolog of NCBI NO: 37703722 NR Description: putative aminotransferase ALD1 [Oryza sativa
  misc_feature (27)..(434): Homolog of NCBI NO: 24414269 NR Description: Putative transaminase [Oryza sativa (japonica
  misc_feature (37)..(431): Homolog of NCBI NO: 24213476 NR Description: aminotransferase [Leptospira interrogans serovar str. 56601] >gi|24194250|gb|AAN47975.1|AE011264_3
  misc_feature (37)..(431): Homolog of NCBI NO: 15678081 NR Description: aspartate aminotransferase related protein
  misc_feature (37)..(432): Homolog of NCBI NO: 23055537 NR Description: hypothetical protein [Geobacter metallireducens]
MFFSSASPLCSSPSKIPKASLDFEMKKLGGSTKLVRNVNLEKLKNNYLFPEINRRELEHIEKHPNVQLISLGTGDTTEPIPEQITSHMSNFAHGLSTVEGYRGYGLEQGNKTLRKAIAETFYRDLHVKSNEVFVSDGAQSDISRLQLLLGSNVTIAVQDPTFPAYIDSSVIIGQTGHFHEKTKKYQNVVYMPCGPNNSFFPDLAMTPRTDVIFFCSPNNPTGYVASRKQLHQLVDFAKTNGSIIIFDSAYAAFIEDGSPRSIYEIPGAREVAIEVSSFSKFAGFTGVRLGWSIIPDELLYSNGFPIINDFHRIVTTSFNGASNIAQAGGLACLSSGGLKEIRSVNNYYKENRKILMDTLVSLGLKVYGGVNAPYLWVHFKGSKSWDVFNEILENTHIITVPGSGFGPGGEEYLRISGFGRRDHIVEASKRLQNFFNTRTKHFTYLSSTSNTN

SEQ ID NO: 83704 - protein, 428 aa, Arabidopsis thaliana
  peptide (1)..(428): Ceres Seq. ID no. 12671478
  misc_feature (96)..(411): Pfam Name: Aminotransferase class I and II Pfam Description: Aminotransferase class I and II
  misc_feature (1)..(428): Homolog of NCBI NO: 18397344 NR Description: putative aspartate aminotransferase; protein id: supported by cDNA: gi_15982837 [Arabidopsis thaliana] At2g13810/F13J11.16 [Arabidopsis thaliana]
  misc_feature (5)..(428): Homolog of NCBI NO: 25315768 NR Description: probable aspartate aminotransferase [imported] -
  misc_feature (8)..(411): Homolog of NCBI NO: 37703720 NR Description: putative aminotransferase AGD2 [Oryza sativa
  misc_feature (2)..(411): Homolog of NCBI NO: 7447845 NR Description: probable transaminase (EC 2.6.1.-) T16L1.170 - Arabidopsis thaliana >gi|3549670|emb|CAA20581.1| putative [Arabidopsis thaliana] >gi|7270317|emb|CAB80085.1| putative
  misc_feature (2)..(411): Homolog of NCBI NO: 18418270 NR Description: putative protein; protein id: At4g33680.1, by cDNA: gi_15912290, supported by cDNA: gi_17529043 [Arabidopsis >gi|15912291|gb|AAL08279.1| AT4g33680/T16L1_170 [Arabidopsis
  misc_feature (3)..(410): Homolog of NCBI NO: 37703722 NR Description: putative aminotransferase ALD1 [Oryza sativa
  misc_feature (3)..(410): Homolog of NCBI NO: 24414269 NR Description: Putative transaminase [Oryza sativa (japonica
  misc_feature (13)..(407): Homolog of NCBI NO: 24213476 NR Description: aminotransferase [Leptospira interrogans serovar str. 56601] >gi|24194250|gb|AAN47975.1|AE011264_3
  misc_feature (13)..(407): Homolog of NCBI NO: 15678081 NR Description: aspartate aminotransferase related protein
  misc_feature (13)..(408): Homolog of NCBI NO: 23055537 NR Description: hypothetical protein [Geobacter metallireducens]
MKKLGGSTKLVRNVNLEKLKNNYLFPEINRRELEHIEKHPNVQLISLGTGDTTEPIPEQITSHMSNFAHGLSTVEGYRGYGLEQGNKTLRKAIAETFYRDLHVKSNEVFVSDGAQSDISRLQLLLGSNVTIAVQDPTFPAYIDSSVIIGQTGHFHEKTKKYQNVVYMPCGPNNSFFPDLAMTPRTDVIFFCSPNNPTGYVASRKQLHQLVDFAKTNGSIIIFDSAYAAFIEDGSPRSIYEIPGAREVAIEVSSFSKFAGFTGVRLGWSIIPDELLYSNGFPIINDFHRIVTTSFNGASNIAQAGGLACLSSGGLKEIRSVNNYYKENRKILMDTLVSLGLKVYGGVNAPYLWVHFKGSKSWDVFNEILENTHIITVPGSGFGPGGEEYLRISGFGRRDHIVEASKRLQNFFNTRTKHFTYLSSTSNTN

SEQ ID NO: 83705 - DNA, 2628 bp, Arabidopsis thaliana
  misc_feature (1)..(2628): Ceres Seq. ID no. 12671489
  misc_feature: MA Experiment ID: 20000184 Result: Down-regulated in Transcription
  misc_feature: MA Experiment 20000184 PARAMETER Experiment Name: At_Shoots__P Parameter: Age (day) Value: 7
  misc_feature: MA Experiment 20000184 PARAMETER Experiment Name: At_Shoots__P Parameter: Tissue Value: Shoots vs. Whole Plant
ctcaaaaccctaacccctttttcaaattacttccatctttagatcgaatcaaatcaatgtccgtcgacgatctccctccgtcgtcggcctccgccgtaacgccactaggctcctccgtgattccgattgtgaacaagctccaagacatattcgctcagctaggaagtcaatcgacgatcgctcttccgcaagtagctgtcgtcggaagtcaaagcagtggcaaatccagcgttctagaagctctcgtcggccgtgactttcttcctcgtggcaatgatatttgcacgcgccgacctctccgtctccagcttgttcagacgaaacctagctctgatggtggatccgatgaagagtggggcgagtttcttcaccacgatcctgttagacgtatctacgatttctctgagattcgccgtgagattgaggcggagactaatagagtatcaggagagaacaaaggtgtatcagatattccgattggtttgaagatattttcacctaatgttttggatattagtcttgtggatcttcctggtatcactaaggttcctgttggtgatcagccaagtgatatcgaagcgcgtataagaacgatgatcttgacttacattaaggaacctagttgcttgatacttgctgttagccctgctaatactgatttagcaaattcagatgcattacaaatcgcaggaaatgctgatcctgatggtcatagaaccataggtgtaatcacaaagttggatattatggacagaggtactgatgctcggaatcaccttctgggaaaaacaattcctcttcgacttggatacgtgggagttgtaaatcgtagtcaagaggatattttgatgaaccgtagcatcaaggatgctcttgttgcagaggaaaagttctttcgtagtcgtccagtttacagcggtctcacagatcgtttgggtgtccctcaactggcaaagaaattaaatcaggtccttgttcaacacatcaaggcactgcttcctagtttaaagtcacgtatcaacaatgcattgtttgctacagcaaaggagtatgagagctatggggatataacagagtctaggggtggtcaaggagctcttctcctcagttttattacaaaatactgcgaagcatactcctctaccctggaagggaaaagtaaagaaatgtcaacatctgagctctcgggtggagcaagaattctctacattttccaatcagtatttgttaagagcttagaggaggttgatccatgtgaagacttaacagctgatgatattcggactgcaatacaaaatgcaactggtcccagatctgcattatttgttccagatgttccatttgaagttcttgtcaggaggcaaatatctcgtttattagatcccagccttcagtgcgctaggttcatcttcgatgagctagtaaagattagtcatcagtgtatgatgaaagagttacagcggtttccagtcctgcaaaagcgcatggatgaggttattgggaactttctgcgagaaggtcttgaaccttcgcaggcaatgatccgagatcttattgaaatggagatggattatataaacacctcacacccaaattttatcgggggaactaaagccgtggagcaagcaatgcaaacagtcaaatcttctaggattccgcatcctgttgcgcggccaagggatactgtggagcctgagaggacggcttcttccgggagtcaaataaaaacccgatcttttctcggccgacaagctaatggaatcatcactgatcaggcagttccaactgcagcagatgctgaaagacctgcaccagctggaagcacaagctggagtggtttctcatcaatttttcgggggagtgatggtcaggcagctgctaaaaacaacctattaaacaaaccattcagcgaaactactcaagaagtgtatcagaacttgtcaacaatctatttaaaggagcctccaactattttgaagtcatctgaaactcattcagaacaggagtcagttgagattgagataacaaagctattattgaaatcctactatgacattgtaaggaagaatgtcgaggacttggtcccaaaagcaatcatgcattttctggtaaattacacgaaacgtgagctgcacaatgttttcatcgagaagctttacagggagaacttaattgaagaactgttgaaagagcccgatgagttagcgataaagaggaaacgcacgcaagagactcttcgcattcttcagcaggctaatcggacgttagacgagctgccgttagaagctgaatcggtcgagagaggttacaaaattggttcagaagcgaaacatgaggagttaccgggcacaagaagatcaaggacagaaactaatgggaacggacggcttcatatgtaaattcaaattgtgattgcacgcatgactcattcatttggtgatggaaaagatttgttttcttccctttaaatcggttgtgcgtggggaaagaaaggtgttcttaggtatagtgaaacgtgatgataaacagaggttttgttgtgagggtattatcaacctactggaaaatgtgacttaatatttgtttctcaaaaccgagaagaataatcaattcctaattttacttttc

SEQ ID NO: 83706 - protein, 798 aa, Arabidopsis thaliana
  peptide (1)..(798): Ceres Seq. ID no. 12671490
  misc_feature (255)..(548): Pfam Name: Dynamin central region Pfam Description: Dynamin central region
  misc_feature (14)..(376): Homolog of NCBI NO: 19386736 NR Description: putative dynamin-like protein ADL2 [Oryza sativa
  misc_feature (379)..(578): Homolog of NCBI NO: 19386736 NR Description: putative dynamin-like protein ADL2 [Oryza sativa
  misc_feature (586)..(775): Homolog of NCBI NO: 19386736 NR Description: putative dynamin-like protein ADL2 [Oryza sativa
  misc_feature (27)..(769): Homolog of NCBI NO: 38346632 NR Description: OSJNBa0072D21.2 [Oryza sativa (japonica
  misc_feature (25)..(477): Homolog of NCBI NO: 14334428 NR Description: putative dynamin protein ADL2 [Arabidopsis >gi|17104743|gb|AAL34260.1| putative dynamin protein ADL2
  misc_feature (19)..(360): Homolog of NCBI NO: 18397442 NR Description: dynamin-like protein; protein id: At2g14120.2
  misc_feature (25)..(547): Homolog of NCBI NO: 30048092 NR Description: DNM1 protein [Homo sapiens]
  misc_feature (664)..(790): Homolog of NCBI NO: 30048092 NR Description: DNM1 protein [Homo sapiens]
  misc_feature (39)..(547): Homolog of NCBI NO: 539581 NR Description: dynamin, internal form 2, short C-terminal form -
  misc_feature (39)..(547): Homolog of NCBI NO: 4758182 NR Description: dynamin 1; dynamin; dynamin1; Dynamin-1 [Homo
QNPNPFFKLLPSLDRIKSMSVDDLPPSSASAVTPLGSSVIPIVNKLQDIFAQLGSQSTIALPQVAVVGSQSSGKSSVLEALVGRDFLPRGNDICTRRPLRLQLVQTKPSSDGGSDEEWGEFLHHDPVRRIYDFSEIRREIEAETNRVSGENKGVSDIPIGLKIFSPNVLDISLVDLPGITKVPVGDQPSDIEARIRTMILTYIKEPSCLILAVSPANTDLANSDALQIAGNADPDGHRTIGVITKLDIMDRGTDARNHLLGKTIPLRLGYVGVVNRSQEDILMNRSIKDALVAEEKFFRSRPVYSGLTDRLGVPQLAKKLNQVLVQHIKALLPSLKSRINNALFATAKEYESYGDITESRGGQGALLLSFITKYCEAYSSTLEGKSKEMSTSELSGGARILYIFQSVFVKSLEEVDPCEDLTADDIRTAIQNATGPRSALFVPDVPFEVLVRRQISRLLDPSLQCARFIFDELVKISHQCMMKELQRFPVLQKRMDEVIGNFLREGLEPSQAMIRDLIEMEMDYINTSHPNFIGGTKAVEQAMQTVKSSRIPHPVARPRDTVEPERTASSGSQIKTRSFLGRQANGIITDQAVPTAADAERPAPAGSTSWSGFSSIFRGSDGQAAAKNNLLNKPFSETTQEVYQNLSTIYLKEPPTILKSSETHSEQESVEIEITKLLLKSYYDIVRKNVEDLVPKAIMHFLVNYTKRELHNVFIEKLYRENLIEELLKEPDELAIKRKRTQETLRILQQANRTLDELPLEAESVERGYKIGSEAKHEELPGTRRSRTETNGNGRLHM

SEQ ID NO: 83707 - protein, 780 aa, Arabidopsis thaliana
  peptide (1)..(780): Ceres Seq. ID no. 12671491
  misc_feature (237)..(530): Pfam Name: Dynamin central region Pfam Description: Dynamin central region
  misc_feature (1)..(358): Homolog of NCBI NO: 19386736 NR Description: putative dynamin-like protein ADL2 [Oryza sativa
  misc_feature (361)..(560): Homolog of NCBI NO: 19386736 NR Description: putative dynamin-like protein ADL2 [Oryza sativa
  misc_feature (568)..(757): Homolog of NCBI NO: 19386736 NR Description: putative dynamin-like protein ADL2 [Oryza sativa
  misc_feature (9)..(751): Homolog of NCBI NO: 38346632 NR Description: OSJNBa0072D21.2 [Oryza sativa (japonica
  misc_feature (7)..(459): Homolog of NCBI NO: 14334428 NR Description: putative dynamin protein ADL2 [Arabidopsis >gi|17104743|gb|AAL34260.1| putative dynamin protein ADL2
  misc_feature (1)..(342): Homolog of NCBI NO: 18397442 NR Description: dynamin-like protein; protein id: At2g14120.2
  misc_feature (7)..(529): Homolog of NCBI NO: 30048092 NR Description: DNM1 protein [Homo sapiens]
  misc_feature (646)..(772): Homolog of NCBI NO: 30048092 NR Description: DNM1 protein [Homo sapiens]
  misc_feature (21)..(529): Homolog of NCBI NO: 539581 NR Description: dynamin, internal form 2, short C-terminal form -
  misc_feature (21)..(529): Homolog of NCBI NO: 4758182 NR Description: dynamin 1; dynamin; dynamin1; Dynamin-1 [Homo
MSVDDLPPSSASAVTPLGSSVIPIVNKLQDIFAQLGSQSTIALPQVAVVGSQSSGKSSVLEALVGRDFLPRGNDICTRRPLRLQLVQTKPSSDGGSDEEWGEFLHHDPVRRIYDFSEIRREIEAETNRVSGENKGVSDIPIGLKIFSPNVLDISLVDLPGITKVPVGDQPSDIEARIRTMILTYIKEPSCLILAVSPANTDLANSDALQIAGNADPDGHRTIGVITKLDIMDRGTDARNHLLGKTIPLRLGYVGVVNRSQEDILMNRSIKDALVAEEKFFRSRPVYSGLTDRLGVPQLAKKLNQVLVQHIKALLPSLKSRINNALFATAKEYESYGDITESRGGQGALLLSFITKYCEAYSSTLEGKSKEMSTSELSGGARILYIFQSVFVKSLEEVDPCEDLTADDIRTAIQNATGPRSALFVPDVPFEVLVRRQISRLLDPSLQCARFIFDELVKISHQCMMKELQRFPVLQKRMDEVIGNFLREGLEPSQAMIRDLIEMEMDYINTSHPNFIGGTKAVEQAMQTVKSSRIPHPVARPRDTVEPERTASSGSQIKTRSFLGRQANGIITDQAVPTAADAERPAPAGSTSWSGFSSIFRGSDGQAAAKNNLLNKPFSETTQEVYQNLSTIYLKEPPTILKSSETHSEQESVEIEITKLLLKSYYDIVRKNVEDLVPKAIMHFLVNYTKRELHNVFIEKLYRENLIEELLKEPDELAIKRKRTQETLRILQQANRTLDELPLEAESVERGYKIGSEAKHEELPGTRRSRTETNGNGRLHM

SEQ ID NO: 83708 - protein, 601 aa, Arabidopsis thaliana
  peptide (1)..(601): Ceres Seq. ID no. 12671492
  misc_feature (58)..(351): Pfam Name: Dynamin central region Pfam Description: Dynamin central region
  misc_feature (1)..(179): Homolog of NCBI NO: 19386736 NR Description: putative dynamin-like protein ADL2 [Oryza sativa
  misc_feature (182)..(381): Homolog of NCBI NO: 19386736 NR Description: putative dynamin-like protein ADL2 [Oryza sativa
  misc_feature (389)..(578): Homolog of NCBI NO: 19386736 NR Description: putative dynamin-like protein ADL2 [Oryza sativa
  misc_feature (1)..(572): Homolog of NCBI NO: 38346632 NR Description: OSJNBa0072D21.2 [Oryza sativa (japonica
  misc_feature (1)..(280): Homolog of NCBI NO: 14334428 NR Description: putative dynamin protein ADL2 [Arabidopsis >gi|17104743|gb|AAL34260.1| putative dynamin protein ADL2
  misc_feature (1)..(163): Homolog of NCBI NO: 18397442 NR Description: dynamin-like protein; protein id: At2g14120.2
  misc_feature (1)..(350): Homolog of NCBI NO: 30048092 NR Description: DNM1 protein [Homo sapiens]
  misc_feature (467)..(593): Homolog of NCBI NO: 30048092 NR Description: DNM1 protein [Homo sapiens]
  misc_feature (1)..(350): Homolog of NCBI NO: 539581 NR Description: dynamin, internal form 2, short C-terminal form -
  misc_feature (1)..(350): Homolog of NCBI NO: 4758182 NR Description: dynamin 1; dynamin; dynamin1; Dynamin-1 [Homo
MILTYIKEPSCLILAVSPANTDLANSDALQIAGNADPDGHRTIGVITKLDIMDRGTDARNHLLGKTIPLRLGYVGVVNRSQEDILMNRSIKDALVAEEKFFRSRPVYSGLTDRLGVPQLAKKLNQVLVQHIKALLPSLKSRINNALFATAKEYESYGDITESRGGQGALLLSFITKYCEAYSSTLEGKSKEMSTSELSGGARILYIFQSVFVKSLEEVDPCEDLTADDIRTAIQNATGPRSALFVPDVPFEVLVRRQISRLLDPSLQCARFIFDELVKISHQCMMKELQRFPVLQKRMDEVIGNFLREGLEPSQAMIRDLIEMEMDYINTSHPNFIGGTKAVEQAMQTVKSSRIPHPVARPRDTVEPERTASSGSQIKTRSFLGRQANGIITDQAVPTAADAERPAPAGSTSWSGFSSIFRGSDGQAAAKNNLLNKPFSETTQEVYQNLSTIYLKEPPTILKSSETHSEQESVEIEITKLLLKSYYDIVRKNVEDLVPKAIMHFLVNYTKRELHNVFIEKLYRENLIEELLKEPDELAIKRKRTQETLRILQQANRTLDELPLEAESVERGYKIGSEAKHEELPGTRRSRTETNGNGRLHM

SEQ ID NO: 83709 - DNA, 1615 bp, Arabidopsis thaliana
  misc_feature (1)..(1615): Ceres Seq. ID no. 12671505
  misc_feature: MA Experiment ID: 20000179 Result: Down-regulated in Transcription
  misc_feature: MA Experiment 20000179 PARAMETER Experiment Name: At_Germinating_Seeds_P Parameter: Age (hr) Value: 6 vs. 0
  misc_feature: MA Experiment 20000179 PARAMETER Experiment Name: At_Germinating_Seeds_P Parameter: Tissue Value: Germinating Seeds
  misc_feature: MA Experiment ID: 20000180 Result: Down-regulated in Transcription
  misc_feature: MA Experiment 20000180 PARAMETER Experiment Name: At_Germinating_Seeds_P Parameter: Age (hr) Value: 24 vs. 0
  misc_feature: MA Experiment 20000180 PARAMETER Experiment Name: At_Germinating_Seeds_P Parameter: Tissue Value: Germinating Seeds
  misc_feature: MA Experiment ID: 20000182 Result: Up-regulated in Transcription
  misc_feature: MA Experiment 20000182 PARAMETER Experiment Name: At_2mM_SA_P Parameter: Age (day) Value: 14
  misc_feature: MA Experiment 20000182 PARAMETER Experiment Name: At_2mM_SA_P Parameter: Organism Value: A. thaliana
  misc_feature: MA Experiment 20000182 PARAMETER Experiment Name: At_2mM_SA_P Parameter: Plant Line Value: WS
  misc_feature: MA Experiment 20000182 PARAMETER Experiment Name: At_2mM_SA_P Parameter: Timepoint (hr) Value: 6
  misc_feature: MA Experiment 20000182 PARAMETER Experiment Name: At_2mM_SA_P Parameter: Tissue Value: Aerial
  misc_feature: MA Experiment 20000182 PARAMETER Experiment Name: At_2mM_SA_P Parameter: Treatment Value: 2mM SA vs. No Treatment
  misc_feature: MA Experiment ID: 20000184 Result: Down-regulated in Transcription
  misc_feature: MA Experiment 20000184 PARAMETER Experiment Name: At_Shoots__P Parameter: Age (day) Value: 7
  misc_feature: MA Experiment 20000184 PARAMETER Experiment Name: At_Shoots__P Parameter: Tissue Value: Shoots vs. Whole Plant
  misc_feature: MA Experiment ID: 20000234 Result: Down-regulated in Transcription
  misc_feature: MA Experiment 20000234 PARAMETER Experiment Name: At_Siliques_P Parameter: Age (day) Value: 21
  misc_feature: MA Experiment 20000234 PARAMETER Experiment Name: At_Siliques_P Parameter: Organism Value: A. thaliana
  misc_feature: MA Experiment 20000234 PARAMETER Experiment Name: At_Siliques_P Parameter: Plant Line Value: WS
  misc_feature: MA Experiment 20000234 PARAMETER Experiment Name: At_Siliques_P Parameter: Tissue Value: Less Than 5mm Siliques vs. Whole Plant
  misc_feature: MA Experiment ID: 20000235 Result: Down-regulated in Transcription
  misc_feature: MA Experiment 20000235 PARAMETER Experiment Name: At_Siliques_P Parameter: Age (day) Value: 21
  misc_feature: MA Experiment 20000235 PARAMETER Experiment Name: At_Siliques_P Parameter: Organism Value: A. thaliana
  misc_feature: MA Experiment 20000235 PARAMETER Experiment Name: At_Siliques_P Parameter: Plant Line Value: WS
  misc_feature: MA Experiment 20000235 PARAMETER Experiment Name: At_Siliques_P Parameter: Tissue Value: 5-10mm Siliques vs. Whole Plant
  misc_feature: MA Experiment ID: 20000264 Result: Down-regulated in Transcription
  misc_feature: MA Experiment 20000264 PARAMETER Experiment Name: At_Open_Flower_P Parameter: Age (day) Value: 21
  misc_feature: MA Experiment 20000264 PARAMETER Experiment Name: At_Open_Flower_P Parameter: Plant Line Value: WS
  misc_feature: MA Experiment 20000264 PARAMETER Experiment Name: At_Open_Flower_P Parameter: Tissue Value: Open Flower vs. Whole Plant
  misc_feature: MA Experiment ID: 20000265 Result: Down-regulated in Transcription
  misc_feature: MA Experiment 20000265 PARAMETER Experiment Name: At_Open_Flower_P Parameter: Age (day) Value: 21
  misc_feature: MA Experiment 20000265 PARAMETER Experiment Name: At_Open_Flower_P Parameter: Plant Line Value: WS
  misc_feature: MA Experiment 20000265 PARAMETER Experiment Name: At_Open_Flower_P Parameter: Tissue Value: Closed Flower vs. Whole Plant
  misc_feature: MA Experiment ID: 20000286 Result: Down-regulated in Transcription
  misc_feature: MA Experiment 20000286 PARAMETER Experiment Name: At_Open_Flower_P Parameter: Age (day) Value: 21
  misc_feature: MA Experiment 20000286 PARAMETER Experiment Name: At_Open_Flower_P Parameter: Plant Line Value: WS
  misc_feature: MA Experiment 20000286 PARAMETER Experiment Name: At_Open_Flower_P Parameter: Tissue Value: Half Open vs. Whole Plant
  misc_feature: MA Experiment ID: 20000437 Result: Up-regulated in Transcription
  misc_feature: MA Experiment 20000437 PARAMETER Experiment Name: At_Drought_P Parameter: Age (day) Value: 8
  misc_feature: MA Experiment 20000437 PARAMETER Experiment Name: At_Drought_P Parameter: Organism Value: A. thaliana
  misc_feature: MA Experiment 20000437 PARAMETER Experiment Name: At_Drought_P Parameter: Plant Line Value: WS
  misc_feature: MA Experiment 20000437 PARAMETER Experiment Name: At_Drought_P Parameter: Timepoint (hr) Value: 24
  misc_feature: MA Experiment 20000437 PARAMETER Experiment Name: At_Drought_P Parameter: Tissue Value: Whole Plant
  misc_feature: MA Experiment 20000437 PARAMETER Experiment Name: At_Drought_P Parameter: Treatment Value: Drought vs. No Drought
  misc_feature: MA Experiment ID: 20000438 Result: Down-regulated in Transcription
  misc_feature: MA Experiment 20000438 PARAMETER Experiment Name: At_Shoots__P Parameter: Age (day) Value: 14
  misc_feature: MA Experiment 20000438 PARAMETER Experiment Name: At_Shoots__P Parameter: Tissue Value: Shoots vs. Whole Plant
  misc_feature: MA Experiment ID: 20000445 Result: Up-regulated in Transcription
  misc_feature: MA Experiment 20000445 PARAMETER Experiment Name: At_100uM_NAA__P Parameter: Age (day) Value: 14
  misc_feature: MA Experiment 20000445 PARAMETER Experiment Name: At_100uM_NAA__P Parameter: Organism Value: A. thaliana
  misc_feature: MA Experiment 20000445 PARAMETER Experiment Name: At_100uM_NAA__P Parameter: Plant Line Value: WS
  misc_feature: MA Experiment 20000445 PARAMETER Experiment Name: At_100uM_NAA__P Parameter: Timepoint (hr) Value: 6
  misc_feature: MA Experiment 20000445 PARAMETER Experiment Name: At_100uM_NAA__P Parameter: Tissue Value: Aerial
  misc_feature: MA Experiment 20000445 PARAMETER Experiment Name: At_100uM_NAA__P Parameter: Treatment Value: 100uM NAA vs. No Treatment
  misc_feature: MA Experiment ID: 20000453 Result: Up-regulated in Transcription
  misc_feature: MA Experiment 20000453 PARAMETER Experiment Name: At_100uM_ABA_P Parameter: Age (day) Value: 15
  misc_feature: MA Experiment 20000453 PARAMETER Experiment Name: At_100uM_ABA_P Parameter: Organism Value: A. thaliana
  misc_feature: MA Experiment 20000453 PARAMETER Experiment Name: At_100uM_ABA_P Parameter: Plant Line Value: WS
  misc_feature: MA Experiment 20000453 PARAMETER Experiment Name: At_100uM_ABA_P Parameter: Timepoint (hr) Value: 24
  misc_feature: MA Experiment 20000453 PARAMETER Experiment Name: At_100uM_ABA_P Parameter: Tissue Value: Aerial
  misc_feature: MA Experiment 20000453 PARAMETER Experiment Name: At_100uM_ABA_P Parameter: Treatment Value: 100uM ABA vs. No Treatment
  misc_feature: MA Experiment ID: 20000456 Result: Up-regulated in Transcription
  misc_feature: MA Experiment 20000456 PARAMETER Experiment Name: At_100uM_BA_P Parameter: Age (day) Value: 14
  misc_feature: MA Experiment 20000456 PARAMETER Experiment Name: At_100uM_BA_P Parameter: Organism Value: A. thaliana
  misc_feature: MA Experiment 20000456 PARAMETER Experiment Name: At_100uM_BA_P Parameter: Plant Line Value: WS
  misc_feature: MA Experiment 20000456 PARAMETER Experiment Name: At_100uM_BA_P Parameter: Timepoint (hr) Value: 6
  misc_feature: MA Experiment 20000456 PARAMETER Experiment Name: At_100uM_BA_P Parameter: Tissue Value: Aerial
  misc_feature: MA Experiment 20000456 PARAMETER Experiment Name: At_100uM_BA_P Parameter: Treatment Value: 100uM BA vs. No Treatment
  misc_feature: MA Experiment ID: 20000496 Result: Down-regulated in Transcription
  misc_feature: MA Experiment 20000496 PARAMETER Experiment Name: At_Guard_Cells_P Parameter: Harvest Date Value: 7/19/2002
  misc_feature: MA Experiment 20000496 PARAMETER Experiment Name: At_Guard_Cells_P Parameter: Organism Value: Canola
  misc_feature: MA Experiment 20000496 PARAMETER Experiment Name: At_Guard_Cells_P Parameter: Tissue Value: Guard Cells vs. Leaves
  misc_feature: MA Experiment ID: 20000527 Result: Down-regulated in Transcription
  misc_feature: MA Experiment 20000527 PARAMETER Experiment Name: At_10percent_PEG_P Parameter: Age (day) Value: 20
  misc_feature: MA Experiment 20000527 PARAMETER Experiment Name: At_10percent_PEG_P Parameter: Organism Value: A. thaliana
  misc_feature: MA Experiment 20000527 PARAMETER Experiment Name: At_10percent_PEG_P Parameter: Plant Line Value: WS
  misc_feature: MA Experiment 20000527 PARAMETER Experiment Name: At_10percent_PEG_P Parameter: Timepoint (day) Value: 20
  misc_feature: MA Experiment 20000527 PARAMETER Experiment Name: At_10percent_PEG_P Parameter: Tissue Value: Whole Plant
  misc_feature: MA Experiment 20000527 PARAMETER Experiment Name: At_10percent_PEG_P Parameter: Treatment Value: 10percent PEG vs. No Treatment
  misc_feature: MA Experiment ID: 20000574 Result: Up-regulated in Transcription
  misc_feature: MA Experiment 20000574 PARAMETER Experiment Name: At_100uM_ABA_Mutants__P Parameter: Organism Value: A. thaliana
  misc_feature: MA Experiment 20000574 PARAMETER Experiment Name: At_100uM_ABA_Mutants__P Parameter: Plant Line Value: CS23 vs. Ler wt
  misc_feature: MA Experiment 20000574 PARAMETER Experiment Name: At_100uM_ABA_Mutants__P Parameter: Timepoint (hr) Value: N/A
  misc_feature: MA Experiment 20000574 PARAMETER Experiment Name: At_100uM_ABA_Mutants__P Parameter: Tissue Value: Whole Plant
  misc_feature: MA Experiment 20000574 PARAMETER Experiment Name: At_100uM_ABA_Mutants__P Parameter: Treatment Value: None
  misc_feature: MA Experiment ID: 20000709 Result: Up-regulated in Transcription
  misc_feature: MA Experiment 20000709 PARAMETER Experiment Name: At_15mM_NH4NO3_L-to-H_P Parameter: Age (hr) Value: 14
  misc_feature: MA Experiment 20000709 PARAMETER Experiment Name: At_15mM_NH4NO3_L-to-H_P Parameter: Organism Value: A. thaliana
  misc_feature: MA Experiment 20000709 PARAMETER Experiment Name: At_15mM_NH4NO3_L-to-H_P Parameter: Plant Line Value: WS
  misc_feature: MA Experiment 20000709 PARAMETER Experiment Name: At_15mM_NH4NO3_L-to-H_P Parameter: Timepoint (hr) Value: 4
  misc_feature: MA Experiment 20000709 PARAMETER Experiment Name: At_15mM_NH4NO3_L-to-H_P Parameter: Tissue Value: Aerial
  misc_feature: MA Experiment 20000709 PARAMETER Experiment Name: At_15mM_NH4NO3_L-to-H_P Parameter: Treatment Value: 15mM NH4NO3 vs. 30mM Mannitol
  misc_feature: MA Experiment ID: 20000794 Result: Down-regulated in Transcription
  misc_feature: MA Experiment 20000794 PARAMETER Experiment Name: At_Petals_P Parameter: Age (day) Value: 23-25 days
  misc_feature: MA Experiment 20000794 PARAMETER Experiment Name: At_Petals_P Parameter: Plant Line Value: WS
  misc_feature: MA Experiment 20000794 PARAMETER Experiment Name: At_Petals_P Parameter: Tissue Value: Petals vs. Whole plant
  misc_feature: MA Experiment ID: 20001451 Result: Down-regulated in Transcription
  misc_feature: MA Experiment 20001451 PARAMETER Experiment Name: At_Far-red-induction_P Parameter: Age (day) Value: 7
  misc_feature: MA Experiment 20001451 PARAMETER Experiment Name: At_Far-red-induction_P Parameter: Light Value: Far-red vs. White
  misc_feature: MA Experiment 20001451 PARAMETER Experiment Name: At_Far-red-induction_P Parameter: Organism Value: A. thaliana
  misc_feature: MA Experiment 20001451 PARAMETER Experiment Name: At_Far-red-induction_P Parameter: Plant Line Value: Columbia
  misc_feature: MA Experiment 20001451 PARAMETER Experiment Name: At_Far-red-induction_P Parameter: Timepoint (hr) Value: 24
  misc_feature: MA Experiment 20001451 PARAMETER Experiment Name: At_Far-red-induction_P Parameter: Tissue Value: Whole Plant
  misc_feature: MA Experiment ID: 20001557 Result: Up-regulated in Transcription
  misc_feature: MA Experiment 20001557 PARAMETER Experiment Name: At_Drought_Soil_Dry_P Parameter: Age (day) Value: 27
  misc_feature: MA Experiment 20001557 PARAMETER Experiment Name: At_Drought_Soil_Dry_P Parameter: Organism Value: A. thaliana
  misc_feature: MA Experiment 20001557 PARAMETER Experiment Name: At_Drought_Soil_Dry_P Parameter: Plant Line Value: WS
  misc_feature: MA Experiment 20001557 PARAMETER Experiment Name: At_Drought_Soil_Dry_P Parameter: Post Timepoint (hr) Value: 3
  misc_feature: MA Experiment 20001557 PARAMETER Experiment Name: At_Drought_Soil_Dry_P Parameter: Post-Treatment Value: Re-Water vs. No Drought
  misc_feature: MA Experiment 20001557 PARAMETER Experiment Name: At_Drought_Soil_Dry_P Parameter: Timepoint (day) Value: 13
  misc_feature: MA Experiment 20001557 PARAMETER Experiment Name: At_Drought_Soil_Dry_P Parameter: Treatment Value: Drought vs. No Drought
  misc_feature: MA Experiment ID: 20001904 Result: Up-regulated in Transcription
  misc_feature: MA Experiment 20001904 PARAMETER Experiment Name: At_Drought_Reproduction_P Parameter: Age (day) Value: 37
  misc_feature: MA Experiment 20001904 PARAMETER Experiment Name: At_Drought_Reproduction_P Parameter: Organism Value: A. thaliana
  misc_feature: MA Experiment 20001904 PARAMETER Experiment Name: At_Drought_Reproduction_P Parameter: Plant Line Value: WS
  misc_feature: MA Experiment 20001904 PARAMETER Experiment Name: At_Drought_Reproduction_P Parameter: Timepoint (day) Value: 7
  misc_feature: MA Experiment 20001904 PARAMETER Experiment Name: At_Drought_Reproduction_P Parameter: Tissue Value: Rosettes
  misc_feature: MA Experiment 20001904 PARAMETER Experiment Name: At_Drought_Reproduction_P Parameter: Treatment Value: Drought vs. No Drought
  misc_feature: MA Experiment ID: 20001905 Result: Up-regulated in Transcription
  misc_feature: MA Experiment 20001905 PARAMETER Experiment Name: At_Drought_Reproduction_P Parameter: Age (day) Value: 40
  misc_feature: MA Experiment 20001905 PARAMETER Experiment Name: At_Drought_Reproduction_P Parameter: Organism Value: A. thaliana
  misc_feature: MA Experiment 20001905 PARAMETER Experiment Name: At_Drought_Reproduction_P Parameter: Plant Line Value: WS
  misc_feature: MA Experiment 20001905 PARAMETER Experiment Name: At_Drought_Reproduction_P Parameter: Timepoint (day) Value: 10
  misc_feature: MA Experiment 20001905 PARAMETER Experiment Name: At_Drought_Reproduction_P Parameter: Tissue Value: Rosettes
  misc_feature: MA Experiment 20001905 PARAMETER Experiment Name: At_Drought_Reproduction_P Parameter: Treatment Value: Drought vs. No Drought
atgaacagagaagtctctgagagaattcatattttgttcttccccttcatggctcaaggccacatgattccaattttggacatggccaagcttttctcgaggagaggagccaagtcaacccttctcacaaccccaatcaacgctaagatcttcgagaaacctattgaagcattcaaaaatcaaaaccctgatctcgaaatcggaatcaagatcttcaatttcccttgtgtagagcttggattgcctgaaggatgcgagaacgctgactttatcaactcataccaaaaatctgactcaggtgacttgttcttgaagtttcttttctctaccaagtatatgaaacaacagttggagagtttcattgaaacaaccaaaccaagtgctcttgttgccgatatgttcttcccttgggcgacagaatctgctgagaagctcggtgtaccaagacttgtgttccacggtacatctttcttttctttgtgttgttcgtataacatgaggattcataagccacacaagaaagtcgctacgagttctactccttttgtaatccctggtctcccaggagacatagttattacagaagaccaagccaatgttgccaaagaagaaacgccaatgggaaagtttatgaaagaggttagggaatcagagaccaatagctttggtgtattggttaatagcttctacgagctggaatcagcttatgctgatttttatcgtagttttgtggcgaaaagagcttggcatatcggtccgctttcgctatctaacagagagttaggagagaaagccagaagagggaaaaaggctaacattgatgagcaagaatgcctaaaatggctggactctaagacacctggttcagtagtttacttgtcctttgggagcggaactaatttcaccaacgaccagctgttagagatcgcttttggtcttgaaggttctggacaaagtttcatctgggtggttaggaaaaatgaaaaccaaggtgacaatgaagagtggttgcctgaagggtttaaagagaggacaacagggaaagggctaataatacctggatgggcgccgcaagtgctgatacttgaccataaagcaattggaggatttgtgactcattgcggatggaactcggctatagagggcattgccgcggggctgcctatggtaacatggccaatgggggcagaacagttctacaatgagaagctattgacaaaagtgttgagaataggagtgaacgttggagctaccgagttggtgaaaaaaggaaagttgattagtagagcacaagtggagaaggcagtaagggaagtgattggtggtgagaaggcagaggaaaggcggctatgggctaagaagctgggcgagatggctaaagccgctgtggaagaaggagggtcctcttataatgatgtgaacaagtttatggaagagctgaatggtagaaagtagaggaagagaatatgtttaatgttctgagatagattattgactttgtgttcctctttggagttgttctttatgtcatcttagcttttgctactgtttagtaagagaaagtccattgtgtgtttctatataataaagaatagacctgaagataggcattttc

SEQ ID NO: 83710 - protein, 484 aa, Arabidopsis thaliana
  peptide (1)..(484): Ceres Seq. ID no. 12671506
  misc_feature (10)..(484): Pfam Name: UDP-glucoronosyl and UDP-glucosyl transferase Pfam Description: UDP-glucoronosyl and UDP-glucosyl transferase
  misc_feature (1)..(484): Homolog of NCBI NO: 25286796 NR Description: probable glucosyltransferase [imported] - thaliana >gi|4335714|gb|AAD17392.1| putative glucosyltransferase
  misc_feature (1)..(484): Homolog of NCBI NO: 30725312 NR Description: At2g15490 [Arabidopsis thaliana]
  misc_feature (28)..(484): Homolog of NCBI NO: 15226537 NR Description: putative glucosyltransferase; protein id: [Arabidopsis thaliana] >gi|25286797|pir||F84529 probable
  misc_feature (8)..(481): Homolog of NCBI NO: 18418380 NR Description: glucosyltransferase -like protein; protein id: supported by cDNA: gi_14334981 [Arabidopsis thaliana] putative glucosyltransferase [Arabidopsis thaliana]
  misc_feature (4)..(479): Homolog of NCBI NO: 7433898 NR Description: probable glucosyltransferase F28A23.110 (EC
  misc_feature (1)..(479): Homolog of NCBI NO: 18418378 NR Description: similar to glucosyltransferase -like protein; id: At4g34131.1, supported by cDNA: gi_17065353 [Arabidopsis >gi|17065354|gb|AAL32831.1| putative protein [Arabidopsis
  misc_feature (4)..(480): Homolog of NCBI NO: 18418382 NR Description: similar to glucosyltransferase -like protein; id: At4g34138.1, supported by cDNA: gi_18086384, supported by gi_19699135 [Arabidopsis thaliana] >gi|18086385|gb|AAL57652.1|
  misc_feature (9)..(482): Homolog of NCBI NO: 5918023 NR Description: betanidin-5-O-glucosyltransferase [Dorotheanthus
  misc_feature (8)..(481): Homolog of NCBI NO: 7433906 NR Description: glucosyltransferase IS5a (EC 2.4.1.-),
  misc_feature (8)..(481): Homolog of NCBI NO: 13492674 NR Description: phenylpropanoid:glucosyltransferase 1 [Nicotiana
MNREVSERIHILFFPFMAQGHMIPILDMAKLFSRRGAKSTLLTTPINAKIFEKPIEAFKNQNPDLEIGIKIFNFPCVELGLPEGCENADFINSYQKSDSGDLFLKFLFSTKYMKQQLESFIETTKPSALVADMFFPWATESAEKLGVPRLVFHGTSFFSLCCSYNMRIHKPHKKVATSSTPFVIPGLPGDIVITEDQANVAKEETPMGKFMKEVRESETNSFGVLVNSFYELESAYADFYRSFVAKRAWHIGPLSLSNRELGEKARRGKKANIDEQECLKWLDSKTPGSVVYLSFGSGTNFTNDQLLEIAFGLEGSGQSFIWVVRKNENQGDNEEWLPEGFKERTTGKGLIIPGWAPQVLILDHKAIGGFVTHCGWNSAIEGIAAGLPMVTWPMGAEQFYNEKLLTKVLRIGVNVGATELVKKGKLISRAQVEKAVREVIGGEKAEERRLWAKKLGEMAKAAVEEGGSSYNDVNKFMEELNGRK

SEQ ID NO: 83711 - protein, 468 aa, Arabidopsis thaliana
  peptide (1)..(468): Ceres Seq. ID no. 12671507
  misc_feature (1)..(468): Pfam Name: UDP-glucoronosyl and UDP-glucosyl transferase Pfam Description: UDP-glucoronosyl and UDP-glucosyl transferase
  misc_feature (1)..(468): Homolog of NCBI NO: 25286796 NR Description: probable glucosyltransferase [imported] - thaliana >gi|4335714|gb|AAD17392.1| putative glucosyltransferase
  misc_feature (1)..(468): Homolog of NCBI NO: 30725312 NR Description: At2g15490 [Arabidopsis thaliana]
  misc_feature (12)..(468): Homolog of NCBI NO: 15226537 NR Description: putative glucosyltransferase; protein id: [Arabidopsis thaliana] >gi|25286797|pir||F84529 probable
  misc_feature (1)..(465): Homolog of NCBI NO: 18418380 NR Description: glucosyltransferase -like protein; protein id: supported by cDNA: gi_14334981 [Arabidopsis thaliana] putative glucosyltransferase [Arabidopsis thaliana]
  misc_feature (1)..(463): Homolog of NCBI NO: 7433898 NR Description: probable glucosyltransferase F28A23.110 (EC
  misc_feature (1)..(463): Homolog of NCBI NO: 18418378 NR Description: similar to glucosyltransferase -like protein; id: At4g34131.1, supported by cDNA: gi_17065353 [Arabidopsis >gi|17065354|gb|AAL32831.1| putative protein [Arabidopsis
  misc_feature (1)..(464): Homolog of NCBI NO: 18418382 NR Description: similar to glucosyltransferase -like protein; id: At4g34138.1, supported by cDNA: gi_18086384, supported by gi_19699135 [Arabidopsis thaliana] >gi|18086385|gb|AAL57652.1|
  misc_feature (1)..(466): Homolog of NCBI NO: 5918023 NR Description: betanidin-5-O-glucosyltransferase [Dorotheanthus
  misc_feature (1)..(465): Homolog of NCBI NO: 7433906 NR Description: glucosyltransferase IS5a (EC 2.4.1.-),
  misc_feature (1)..(465): Homolog of NCBI NO: 13492674 NR Description: phenylpropanoid:glucosyltransferase 1 [Nicotiana
MAQGHMIPILDMAKLFSRRGAKSTLLTTPINAKIFEKPIEAFKNQNPDLEIGIKIFNFPCVELGLPEGCENADFINSYQKSDSGDLFLKFLFSTKYMKQQLESFIETTKPSALVADMFFPWATESAEKLGVPRLVFHGTSFFSLCCSYNMRIHKPHKKVATSSTPFVIPGLPGDIVITEDQANVAKEETPMGKFMKEVRESETNSFGVLVNSFYELESAYADFYRSFVAKRAWHIGPLSLSNRELGEKARRGKKANIDEQECLKWLDSKTPGSVVYLSFGSGTNFTNDQLLEIAFGLEGSGQSFIWVVRKNENQGDNEEWLPEGFKERTTGKGLIIPGWAPQVLILDHKAIGGFVTHCGWNSAIEGIAAGLPMVTWPMGAEQFYNEKLLTKVLRIGVNVGATELVKKGKLISRAQVEKAVREVIGGEKAEERRLWAKKLGEMAKAAVEEGGSSYNDVNKFMEELNGRK

SEQ ID NO: 83712 - protein, 463 aa, Arabidopsis thaliana
  peptide (1)..(463): Ceres Seq. ID no. 12671508
  misc_feature (1)..(463): Pfam Name: UDP-glucoronosyl and UDP-glucosyl transferase Pfam Description: UDP-glucoronosyl and UDP-glucosyl transferase
  misc_feature (1)..(463): Homolog of NCBI NO: 25286796 NR Description: probable glucosyltransferase [imported] - thaliana >gi|4335714|gb|AAD17392.1| putative glucosyltransferase
  misc_feature (1)..(463): Homolog of NCBI NO: 30725312 NR Description: At2g15490 [Arabidopsis thaliana]
  misc_feature (7)..(463): Homolog of NCBI NO: 15226537 NR Description: putative glucosyltransferase; protein id: [Arabidopsis thaliana] >gi|25286797|pir||F84529 probable
  misc_feature (1)..(460): Homolog of NCBI NO: 18418380 NR Description: glucosyltransferase -like protein; protein id: supported by cDNA: gi_14334981 [Arabidopsis thaliana] putative glucosyltransferase [Arabidopsis thaliana]
  misc_feature (1)..(458): Homolog of NCBI NO: 7433898 NR Description: probable glucosyltransferase F28A23.110 (EC
  misc_feature (1)..(458): Homolog of NCBI NO: 18418378 NR Description: similar to glucosyltransferase -like protein; id: At4g34131.1, supported by cDNA: gi_17065353 [Arabidopsis >gi|17065354|gb|AAL32831.1| putative protein [Arabidopsis
  misc_feature (1)..(459): Homolog of NCBI NO: 18418382 NR Description: similar to glucosyltransferase -like protein; id: At4g34138.1, supported by cDNA: gi_18086384, supported by gi_19699135 [Arabidopsis thaliana] >gi|18086385|gb|AAL57652.1|
  misc_feature (1)..(461): Homolog of NCBI NO: 5918023 NR Description: betanidin-5-O-glucosyltransferase [Dorotheanthus
  misc_feature (1)..(460): Homolog of NCBI NO: 7433906 NR Description: glucosyltransferase IS5a (EC 2.4.1.-),
  misc_feature (1)..(460): Homolog of NCBI NO: 13492674 NR Description: phenylpropanoid:glucosyltransferase 1 [Nicotiana
MIPILDMAKLFSRRGAKSTLLTTPINAKIFEKPIEAFKNQNPDLEIGIKIFNFPCVELGLPEGCENADFINSYQKSDSGDLFLKFLFSTKYMKQQLESFIETTKPSALVADMFFPWATESAEKLGVPRLVFHGTSFFSLCCSYNMRIHKPHKKVATSSTPFVIPGLPGDIVITEDQANVAKEETPMGKFMKEVRESETNSFGVLVNSFYELESAYADFYRSFVAKRAWHIGPLSLSNRELGEKARRGKKANIDEQECLKWLDSKTPGSVVYLSFGSGTNFTNDQLLEIAFGLEGSGQSFIWVVRKNENQGDNEEWLPEGFKERTTGKGLIIPGWAPQVLILDHKAIGGFVTHCGWNSAIEGIAAGLPMVTWPMGAEQFYNEKLLTKVLRIGVNVGATELVKKGKLISRAQVEKAVREVIGGEKAEERRLWAKKLGEMAKAAVEEGGSSYNDVNKFMEELNGRK

SEQ ID NO: 83713 - DNA, 1884 bp, Arabidopsis thaliana
  misc_feature (1)..(1884): Ceres Seq. ID no. 12671509
  misc_feature: MA Experiment ID: 20000180 Result: Down-regulated in Transcription
  misc_feature: MA Experiment 20000180 PARAMETER Experiment Name: At_Germinating_Seeds_P Parameter: Age (hr) Value: 24 vs. 0
  misc_feature: MA Experiment 20000180 PARAMETER Experiment Name: At_Germinating_Seeds_P Parameter: Tissue Value: Germinating Seeds
  misc_feature: MA Experiment ID: 20000227 Result: Up-regulated in Transcription
  misc_feature: MA Experiment 20000227 PARAMETER Experiment Name: At_Root-Tips-vs-Tops_P Parameter: Tissue Value: Root Tips vs. Root Tops
atgagacgtttcacagtcccctgtatcttacgccaccgaatctcaattctttccggcgccggctattctcctgccgccgctcgtctttcctctttagcacaaacatcaactcccgagtcagtattaccgccgataacttctgaaattttgctcgagtcgataagatcttctcagtggcatatcgtcgaacacgttgcagacaaactcacaccttcgcttgtatctacaactctactcagcctcgtcaagactcctaatttagccttcaatttcgtcaaccacatcgacctttatcgcctggactttcaaacacagtgtctagccatcgctgtcatctccaagctctcttctccaaaacccgttactcagttactgaaagaagtcgttacttctcgtaagaactcaataagaaaccttttcgatgaattagtgcttgcccatgatcgattagagacgaaaagcacgattcttttcgatctcttagtcagatgttgttgtcaattgagaatggttgatgaagccatagagtgcttttacttgatgaaggagaaaggtttttatcccaaaactgaaacttgtaatcacattttgactttgttatcaaggttgaatcgtatagagaacgcttgggtcttctatgctgatatgtataggatggagattaaatcgaatgtgtacactttcaatataatgatcaatgtattgtgtaaggaagggaagttgaagaaggctaagggttttttaggtatcatggaggtttttgggattaagccaactatagtgacttacaacactcttgttcaagggttttctttgagaggacgaatcgaaggagctcgtttgattatcagtgaaatgaaatctaaaggctttcaaccagatatgcagacgtataatccgattctgtcttggatgtgtaatgaaggaagagcttctgaggtgttgagggagatgaaggagattgggttggttccggattctgtttcgtacaatattttgatccgtggttgtagtaacaatggggatttggagatggcttttgcttacagggatgagatggtgaaacaaggtatggtgccgacgttttatacttacaacacgttgatacatggtttgtttatggagaataagatagaagctgctgagatattgattagggagattagagagaagggtatagttttggattctgtcacttacaatatactgataaatggttattgccagcatggagatgcaaagaaagcatttgctttgcatgacgaaatgatgaccgatggaattcagcctacgcagtttacttatacgtcgcttatttatgtcctgtgtagaaaaaataaaacgagggaagcggatgagttgtttgagaaagttgtgggaaagggaatgaagcctgatcttgtgatgatgaataccttgatggatggtcactgtgctataggcaacatggaccgtgcattttcgcttcttaaagagatggacatgatgagtatcaatcctgatgatgtgacatacaattgtttgatgcgagggctatgtggagaagggaaatttgaggaagctcgtgagctgatgggagagatgaagagaagaggaatcaaacctgaccacattagttacaacactctaataagtgggtatagtaagaaaggggatacaaagcatgctttcatggttcgtgatgagatgttgagtctcgggtttaatcctactcttctcacttacaatgctctgttaaaaggtttgagtaaaaaccaggagggtgaactagcagaggagctgctaagggaaatgaaaagtgaaggcatcgttcctaatgacagctccttttgctctgtcattgaggcaatgtctaatttggatgcaaaaaaatctgatagttga

SEQ ID NO: 83714 - protein, 627 aa, Arabidopsis thaliana
  peptide (1)..(627): Ceres Seq. ID no. 12671510
  misc_feature (156)..(190): Pfam Name: PPR repeat Pfam Description: PPR repeat
  misc_feature (108)..(626): Homolog of NCBI NO: 38605763 NR Description: OSJNBa0044K18.6 [Oryza sativa (japonica
  misc_feature (22)..(614): Homolog of NCBI NO: 15240891 NR Description: putative protein; protein id: At5g01110.1
  misc_feature (62)..(623): Homolog of NCBI NO: 15242446 NR Description: putative protein; protein id: At5g39710.1
  misc_feature (28)..(575): Homolog of NCBI NO: 15218284 NR Description: hypothetical protein; protein id: At1g09820.1
  misc_feature (62)..(584): Homolog of NCBI NO: 15218241 NR Description: hypothetical protein; protein id: At1g09680.1
  misc_feature (65)..(619): Homolog of NCBI NO: 15234269 NR Description: putative protein; protein id: At4g11690.1
  misc_feature (103)..(617): Homolog of NCBI NO: 15241049 NR Description: putative protein; protein id: At5g55840.1
  misc_feature (154)..(614): Homolog of NCBI NO: 34902570 NR Description: Putative indole-3-acetate
  misc_feature (158)..(610): Homolog of NCBI NO: 15221232 NR Description: putative indole-3-acetate protein id: At1g05670.1 [Arabidopsis thaliana]
  misc_feature (137)..(617): Homolog of NCBI NO: 34896698 NR Description: putative pentatricopeptide repeat protein [Oryza
MRRFTVPCILRHRISILSGAGYSPAAARLSSLAQTSTPESVLPPITSEILLESIRSSQWHIVEHVADKLTPSLVSTTLLSLVKTPNLAFNFVNHIDLYRLDFQTQCLAIAVISKLSSPKPVTQLLKEVVTSRKNSIRNLFDELVLAHDRLETKSTILFDLLVRCCCQLRMVDEAIECFYLMKEKGFYPKTETCNHILTLLSRLNRIENAWVFYADMYRMEIKSNVYTFNIMINVLCKEGKLKKAKGFLGIMEVFGIKPTIVTYNTLVQGFSLRGRIEGARLIISEMKSKGFQPDMQTYNPILSWMCNEGRASEVLREMKEIGLVPDSVSYNILIRGCSNNGDLEMAFAYRDEMVKQGMVPTFYTYNTLIHGLFMENKIEAAEILIREIREKGIVLDSVTYNILINGYCQHGDAKKAFALHDEMMTDGIQPTQFTYTSLIYVLCRKNKTREADELFEKVVGKGMKPDLVMMNTLMDGHCAIGNMDRAFSLLKEMDMMSINPDDVTYNCLMRGLCGEGKFEEARELMGEMKRRGIKPDHISYNTLISGYSKKGDTKHAFMVRDEMLSLGFNPTLLTYNALLKGLSKNQEGELAEELLREMKSEGIVPNDSSFCSVIEAMSNLDAKKSDS

SEQ ID NO: 83715 - protein, 458 aa, Arabidopsis thaliana
  peptide (1)..(458): Ceres Seq. ID no. 12671511
  misc_feature (1)..(457): Homolog of NCBI NO: 38605763 NR Description: OSJNBa0044K18.6 [Oryza sativa (japonica
  misc_feature (1)..(445): Homolog of NCBI NO: 15240891 NR Description: putative protein; protein id: At5g01110.1
  misc_feature (1)..(454): Homolog of NCBI NO: 15242446 NR Description: putative protein; protein id: At5g39710.1
  misc_feature (1)..(406): Homolog of NCBI NO: 15218284 NR Description: hypothetical protein; protein id: At1g09820.1
  misc_feature (1)..(415): Homolog of NCBI NO: 15218241 NR Description: hypothetical protein; protein id: At1g09680.1
  misc_feature (1)..(450): Homolog of NCBI NO: 15234269 NR Description: putative protein; protein id: At4g11690.1
  misc_feature (1)..(448): Homolog of NCBI NO: 15241049 NR Description: putative protein; protein id: At5g55840.1
  misc_feature (1)..(445): Homolog of NCBI NO: 34902570 NR Description: Putative indole-3-acetate
  misc_feature (1)..(441): Homolog of NCBI NO: 15221232 NR Description: putative indole-3-acetate protein id: At1g05670.1 [Arabidopsis thaliana]
  misc_feature (1)..(448): Homolog of NCBI NO: 34896698 NR Description: putative pentatricopeptide repeat protein [Oryza
MVDEAIECFYLMKEKGFYPKTETCNHILTLLSRLNRIENAWVFYADMYRMEIKSNVYTFNIMINVLCKEGKLKKAKGFLGIMEVFGIKPTIVTYNTLVQGFSLRGRIEGARLIISEMKSKGFQPDMQTYNPILSWMCNEGRASEVLREMKEIGLVPDSVSYNILIRGCSNNGDLEMAFAYRDEMVKQGMVPTFYTYNTLIHGLFMENKIEAAEILIREIREKGIVLDSVTYNILINGYCQHGDAKKAFALHDEMMTDGIQPTQFTYTSLIYVLCRKNKTREADELFEKVVGKGMKPDLVMMNTLMDGHCAIGNMDRAFSLLKEMDMMSINPDDVTYNCLMRGLCGEGKFEEARELMGEMKRRGIKPDHISYNTLISGYSKKGDTKHAFMVRDEMLSLGFNPTLLTYNALLKGLSKNQEGELAEELLREMKSEGIVPNDSSFCSVIEAMSNLDAKKSDS

SEQ ID NO: 83716 - protein, 447 aa, Arabidopsis thaliana
  peptide (1)..(447): Ceres Seq. ID no. 12671512
  misc_feature (1)..(446): Homolog of NCBI NO: 38605763 NR Description: OSJNBa0044K18.6 [Oryza sativa (japonica
  misc_feature (1)..(434): Homolog of NCBI NO: 15240891 NR Description: putative protein; protein id: At5g01110.1
  misc_feature (1)..(443): Homolog of NCBI NO: 15242446 NR Description: putative protein; protein id: At5g39710.1
  misc_feature (1)..(395): Homolog of NCBI NO: 15218284 NR Description: hypothetical protein; protein id: At1g09820.1
  misc_feature (1)..(404): Homolog of NCBI NO: 15218241 NR Description: hypothetical protein; protein id: At1g09680.1
  misc_feature (1)..(439): Homolog of NCBI NO: 15234269 NR Description: putative protein; protein id: At4g11690.1
  misc_feature (1)..(437): Homolog of NCBI NO: 15241049 NR Description: putative protein; protein id: At5g55840.1
  misc_feature (1)..(434): Homolog of NCBI NO: 34902570 NR Description: Putative indole-3-acetate
  misc_feature (1)..(430): Homolog of NCBI NO: 15221232 NR Description: putative indole-3-acetate protein id: At1g05670.1 [Arabidopsis thaliana]
  misc_feature (1)..(437): Homolog of NCBI NO: 34896698 NR Description: putative pentatricopeptide repeat protein [Oryza
MKEKGFYPKTETCNHILTLLSRLNRIENAWVFYADMYRMEIKSNVYTFNIMINVLCKEGKLKKAKGFLGIMEVFGIKPTIVTYNTLVQGFSLRGRIEGARLIISEMKSKGFQPDMQTYNPILSWMCNEGRASEVLREMKEIGLVPDSVSYNILIRGCSNNGDLEMAFAYRDEMVKQGMVPTFYTYNTLIHGLFMENKIEAAEILIREIREKGIVLDSVTYNILINGYCQHGDAKKAFALHDEMMTDGIQPTQFTYTSLIYVLCRKNKTREADELFEKVVGKGMKPDLVMMNTLMDGHCAIGNMDRAFSLLKEMDMMSINPDDVTYNCLMRGLCGEGKFEEARELMGEMKRRGIKPDHISYNTLISGYSKKGDTKHAFMVRDEMLSLGFNPTLLTYNALLKGLSKNQEGELAEELLREMKSEGIVPNDSSFCSVIEAMSNLDAKKSDS

SEQ ID NO: 83717 - DNA, 1300 bp, Arabidopsis thaliana
  misc_feature (1)..(1300): Ceres Seq. ID no. 12671513
  misc_feature: MA Experiment ID: 20000171 Result: Up-regulated in Transcription
  misc_feature: MA Experiment 20000171 PARAMETER Experiment Name: At_42deg_Heat_P Parameter: Age (day) Value: 14
  misc_feature: MA Experiment 20000171 PARAMETER Experiment Name: At_42deg_Heat_P Parameter: Organism Value: A. thaliana
  misc_feature: MA Experiment 20000171 PARAMETER Experiment Name: At_42deg_Heat_P Parameter: Plant Line Value: WS
  misc_feature: MA Experiment 20000171 PARAMETER Experiment Name: At_42deg_Heat_P Parameter: Temperature (deg C) Value: 42 vs. 22
  misc_feature: MA Experiment 20000171 PARAMETER Experiment Name: At_42deg_Heat_P Parameter: Timepoint (hr) Value: 1
  misc_feature: MA Experiment 20000171 PARAMETER Experiment Name: At_42deg_Heat_P Parameter: Tissue Value: Aerial
  misc_feature: MA Experiment ID: 20000173 Result: Up-regulated in Transcription
  misc_feature: MA Experiment 20000173 PARAMETER Experiment Name: At_42deg_Heat_P Parameter: Age (day) Value: 14
  misc_feature: MA Experiment 20000173 PARAMETER Experiment Name: At_42deg_Heat_P Parameter: Organism Value: A. thaliana
  misc_feature: MA Experiment 20000173 PARAMETER Experiment Name: At_42deg_Heat_P Parameter: Plant Line Value: WS
  misc_feature: MA Experiment 20000173 PARAMETER Experiment Name: At_42deg_Heat_P Parameter: Temperature (deg C) Value: 42 vs. 22
  misc_feature: MA Experiment 20000173 PARAMETER Experiment Name: At_42deg_Heat_P Parameter: Timepoint (hr) Value: 6
  misc_feature: MA Experiment 20000173 PARAMETER Experiment Name: At_42deg_Heat_P Parameter: Tissue Value: Aerial
  misc_feature: MA Experiment ID: 20000182 Result: Down-regulated in Transcription
  misc_feature: MA Experiment 20000182 PARAMETER Experiment Name: At_2mM_SA_P Parameter: Age (day) Value: 14
  misc_feature: MA Experiment 20000182 PARAMETER Experiment Name: At_2mM_SA_P Parameter: Organism Value: A. thaliana
  misc_feature: MA Experiment 20000182 PARAMETER Experiment Name: At_2mM_SA_P Parameter: Plant Line Value: WS
  misc_feature: MA Experiment 20000182 PARAMETER Experiment Name: At_2mM_SA_P Parameter: Timepoint (hr) Value: 6
  misc_feature: MA Experiment 20000182 PARAMETER Experiment Name: At_2mM_SA_P Parameter: Tissue Value: Aerial
  misc_feature: MA Experiment 20000182 PARAMETER Experiment Name: At_2mM_SA_P Parameter: Treatment Value: 2mM SA vs. No Treatment
  misc_feature: MA Experiment ID: 20000234 Result: Up-regulated in Transcription
  misc_feature: MA Experiment 20000234 PARAMETER Experiment Name: At_Siliques_P Parameter: Age (day) Value: 21
  misc_feature: MA Experiment 20000234 PARAMETER Experiment Name: At_Siliques_P Parameter: Organism Value: A. thaliana
  misc_feature: MA Experiment 20000234 PARAMETER Experiment Name: At_Siliques_P Parameter: Plant Line Value: WS
  misc_feature: MA Experiment 20000234 PARAMETER Experiment Name: At_Siliques_P Parameter: Tissue Value: Less Than 5mm Siliques vs. Whole Plant
  misc_feature: MA Experiment ID: 20000235 Result: Up-regulated in Transcription
  misc_feature: MA Experiment 20000235 PARAMETER Experiment Name: At_Siliques_P Parameter: Age (day) Value: 21
  misc_feature: MA Experiment 20000235 PARAMETER Experiment Name: At_Siliques_P Parameter: Organism Value: A. thaliana
  misc_feature: MA Experiment 20000235 PARAMETER Experiment Name: At_Siliques_P Parameter: Plant Line Value: WS
  misc_feature: MA Experiment 20000235 PARAMETER Experiment Name: At_Siliques_P Parameter: Tissue Value: 5-10mm Siliques vs. Whole Plant
  misc_feature: MA Experiment ID: 20000264 Result: Up-regulated in Transcription
  misc_feature: MA Experiment 20000264 PARAMETER Experiment Name: At_Open_Flower_P Parameter: Age (day) Value: 21
  misc_feature: MA Experiment 20000264 PARAMETER Experiment Name: At_Open_Flower_P Parameter: Plant Line Value: WS
  misc_feature: MA Experiment 20000264 PARAMETER Experiment Name: At_Open_Flower_P Parameter: Tissue Value: Open Flower vs. Whole Plant
  misc_feature: MA Experiment ID: 20000573 Result: Up-regulated in Transcription
  misc_feature: MA Experiment 20000573 PARAMETER Experiment Name: At_100uM_ABA_Mutants__P Parameter: Organism Value: A. thaliana
  misc_feature: MA Experiment 20000573 PARAMETER Experiment Name: At_100uM_ABA_Mutants__P Parameter: Plant Line Value: CS22 vs. Ler wt
  misc_feature: MA Experiment 20000573 PARAMETER Experiment Name: At_100uM_ABA_Mutants__P Parameter: Timepoint (hr) Value: N/A
  misc_feature: MA Experiment 20000573 PARAMETER Experiment Name: At_100uM_ABA_Mutants__P Parameter: Tissue Value: Whole Plant
  misc_feature: MA Experiment 20000573 PARAMETER Experiment Name: At_100uM_ABA_Mutants__P Parameter: Treatment Value: None
  misc_feature: MA Experiment ID: 20000574 Result: Up-regulated in Transcription
  misc_feature: MA Experiment 20000574 PARAMETER Experiment Name: At_100uM_ABA_Mutants__P Parameter: Organism Value: A. thaliana
  misc_feature: MA Experiment 20000574 PARAMETER Experiment Name: At_100uM_ABA_Mutants__P Parameter: Plant Line Value: CS23 vs. Ler wt
  misc_feature: MA Experiment 20000574 PARAMETER Experiment Name: At_100uM_ABA_Mutants__P Parameter: Timepoint (hr) Value: N/A
  misc_feature: MA Experiment 20000574 PARAMETER Experiment Name: At_100uM_ABA_Mutants__P Parameter: Tissue Value: Whole Plant
  misc_feature: MA Experiment 20000574 PARAMETER Experiment Name: At_100uM_ABA_Mutants__P Parameter: Treatment Value: None
  misc_feature: MA Experiment ID: 20000794 Result: Up-regulated in Transcription
  misc_feature: MA Experiment 20000794 PARAMETER Experiment Name: At_Petals_P Parameter: Age (day) Value: 23-25 days
  misc_feature: MA Experiment 20000794 PARAMETER Experiment Name: At_Petals_P Parameter: Plant Line Value: WS
  misc_feature: MA Experiment 20000794 PARAMETER Experiment Name: At_Petals_P Parameter: Tissue Value: Petals vs. Whole plant
tttgtctcttcctctgattctttctctctctctctctctctctctctctctctctctctctctctctctctctctctctctctctctctctctctctctctgtctcgtctttgtttcggtttcaagaaagcaagaggaagaagaagaagaagaagatgggtaggtcaaagtgtttcatggacattagcattggaggtgagcttgaaggaaggattgttattgagctttacgatgatgttgttcccaaaaccgctgagaattttcgattactctgtaccggtgagaagggtttaggtccaaatactggtgtacctctccattacaaggggaatcgatttcatcgtgttatcaaggggtttatgatacaaggtggggatatatcagctaatgatggtactggtggtgagtctatctatggcttgaagtttgacgatgagaattttgagctgaaacatgagaggaaagggatgctctctatggctaactctggtcccaacactaatggctctcagtttttcattacgacaactcgcacttctcatttagatgggaaacatgttgtgtttggaagggttacgaaaggaatgggtgttgttcggtcgattgagcatgttagcatagaggaacagtcttgtccttctcaggatgttgtgatccatgactgtggagaaatccctgagggtgcagatgatgggatttgtgactttttcaaggatggtgatgtgtaccctgactggcctattgatctgaatgaaagcccagctgagttatcttggtggatggagactgttgattttgtcaaggctcatgggaatgagcactttaagaaacaagactataagatggctcttagaaagtaccgtaaggctttacgctatctggatatttgctgggagaaagagggcattgatgaagagacgagtactgccttgcgtaagacaaagtcgcagatcttcactaatagtgctgcctgcaaactcaaattcggagatgcaaaaggagcgttgttggacactgaatttgctatgcgtgatgaagataacaatgttaaagcattgtttcgacaaggccaggcatacatggctcttaataacgtcgatgctgctgctgaaagccttgagaaagctcttcaattcgaacctaatgacgctggtatcaagaaagaatatgctgctgttatgaaaaagattgcctttagagacaacgaagagaaaaagcagtaccgcaaaatgttcgtataggggggggggggggtgctctgcttcatttagggtttggtcggatagtgaggaagaagact

SEQ ID NO: 83718 - protein, 361 aa, Arabidopsis thaliana
  peptide (1)..(361): Ceres Seq. ID no. 12671514
  misc_feature (212)..(245): Pfam Name: TPR Domain Pfam Description: TPR Domain
  misc_feature (1)..(353): Homolog of NCBI NO: 25411671 NR Description: hypothetical protein At2g15790 [imported] -
  misc_feature (1)..(361): Homolog of NCBI NO: 18397936 NR Description: expressed protein; protein id: At2g15790.1, by cDNA: gi_13442982 [Arabidopsis thaliana]
  misc_feature (1)..(360): Homolog of NCBI NO: 27806463 NR Description: peptidylprolyl isomerase D (cyclophilin D) [Bos
  misc_feature (5)..(360): Homolog of NCBI NO: 34857103 NR Description: similar to peptidylprolyl isomerase D
  misc_feature (5)..(360): Homolog of NCBI NO: 13385854 NR Description: peptidylprolyl isomerase D (cyclophilin D) [Mus
  misc_feature (1)..(360): Homolog of NCBI NO: 4826932 NR Description: peptidylprolyl isomerase D (cyclophilin D);
  misc_feature (5)..(360): Homolog of NCBI NO: 27687349 NR Description: similar to peptidylprolyl isomerase D
  misc_feature (1)..(360): Homolog of NCBI NO: 38174405 NR Description: Unknown (protein for MGC:75854) [Silurana
  misc_feature (5)..(361): Homolog of NCBI NO: 34873471 NR Description: similar to peptidylprolyl isomerase D
  misc_feature (25)..(335): Homolog of NCBI NO: 348725 NR Description: cyclophilin-40
MGRSKCFMDISIGGELEGRIVIELYDDVVPKTAENFRLLCTGEKGLGPNTGVPLHYKGNRFHRVIKGFMIQGGDISANDGTGGESIYGLKFDDENFELKHERKGMLSMANSGPNTNGSQFFITTTRTSHLDGKHVVFGRVTKGMGVVRSIEHVSIEEQSCPSQDVVIHDCGEIPEGADDGICDFFKDGDVYPDWPIDLNESPAELSWWMETVDFVKAHGNEHFKKQDYKMALRKYRKALRYLDICWEKEGIDEETSTALRKTKSQIFTNSAACKLKFGDAKGALLDTEFAMRDEDNNVKALFRQGQAYMALNNVDAAAESLEKALQFEPNDAGIKKEYAAVMKKIAFRDNEEKKQYRKMFV

SEQ ID NO: 83719 - protein, 354 aa, Arabidopsis thaliana
  peptide (1)..(354): Ceres Seq. ID no. 12671515
  misc_feature (205)..(238): Pfam Name: TPR Domain Pfam Description: TPR Domain
  misc_feature (1)..(346): Homolog of NCBI NO: 25411671 NR Description: hypothetical protein At2g15790 [imported] -
  misc_feature (1)..(354): Homolog of NCBI NO: 18397936 NR Description: expressed protein; protein id: At2g15790.1, by cDNA: gi_13442982 [Arabidopsis thaliana]
  misc_feature (1)..(353): Homolog of NCBI NO: 27806463 NR Description: peptidylprolyl isomerase D (cyclophilin D) [Bos
  misc_feature (1)..(353): Homolog of NCBI NO: 34857103 NR Description: similar to peptidylprolyl isomerase D
  misc_feature (1)..(353): Homolog of NCBI NO: 13385854 NR Description: peptidylprolyl isomerase D (cyclophilin D) [Mus
  misc_feature (1)..(353): Homolog of NCBI NO: 4826932 NR Description: peptidylprolyl isomerase D (cyclophilin D);
  misc_feature (1)..(353): Homolog of NCBI NO: 27687349 NR Description: similar to peptidylprolyl isomerase D
  misc_feature (1)..(353): Homolog of NCBI NO: 38174405 NR Description: Unknown (protein for MGC:75854) [Silurana
  misc_feature (1)..(354): Homolog of NCBI NO: 34873471 NR Description: similar to peptidylprolyl isomerase D
  misc_feature (18)..(328): Homolog of NCBI NO: 348725 NR Description: cyclophilin-40
MDISIGGELEGRIVIELYDDVVPKTAENFRLLCTGEKGLGPNTGVPLHYKGNRFHRVIKGFMIQGGDISANDGTGGESIYGLKFDDENFELKHERKGMLSMANSGPNTNGSQFFITTTRTSHLDGKHVVFGRVTKGMGVVRSIEHVSIEEQSCPSQDVVIHDCGEIPEGADDGICDFFKDGDVYPDWPIDLNESPAELSWWMETVDFVKAHGNEHFKKQDYKMALRKYRKALRYLDICWEKEGIDEETSTALRKTKSQIFTNSAACKLKFGDAKGALLDTEFAMRDEDNNVKALFRQGQAYMALNNVDAAAESLEKALQFEPNDAGIKKEYAAVMKKIAFRDNEEKKQYRKMFV

SEQ ID NO: 83720 - protein, 293 aa, Arabidopsis thaliana
  peptide (1)..(293): Ceres Seq. ID no. 12671516
  misc_feature (144)..(177): Pfam Name: TPR Domain Pfam Description: TPR Domain
  misc_feature (1)..(285): Homolog of NCBI NO: 25411671 NR Description: hypothetical protein At2g15790 [imported] -
  misc_feature (1)..(293): Homolog of NCBI NO: 18397936 NR Description: expressed protein; protein id: At2g15790.1, by cDNA: gi_13442982 [Arabidopsis thaliana]
  misc_feature (1)..(292): Homolog of NCBI NO: 27806463 NR Description: peptidylprolyl isomerase D (cyclophilin D) [Bos
  misc_feature (1)..(292): Homolog of NCBI NO: 34857103 NR Description: similar to peptidylprolyl isomerase D
  misc_feature (1)..(292): Homolog of NCBI NO: 13385854 NR Description: peptidylprolyl isomerase D (cyclophilin D) [Mus
  misc_feature (1)..(292): Homolog of NCBI NO: 4826932 NR Description: peptidylprolyl isomerase D (cyclophilin D);
  misc_feature (1)..(292): Homolog of NCBI NO: 27687349 NR Description: similar to peptidylprolyl isomerase D
  misc_feature (1)..(292): Homolog of NCBI NO: 38174405 NR Description: Unknown (protein for MGC:75854) [Silurana
  misc_feature (1)..(293): Homolog of NCBI NO: 34873471 NR Description: similar to peptidylprolyl isomerase D
  misc_feature (1)..(267): Homolog of NCBI NO: 348725 NR Description: cyclophilin-40
MIQGGDISANDGTGGESIYGLKFDDENFELKHERKGMLSMANSGPNTNGSQFFITTTRTSHLDGKHVVFGRVTKGMGVVRSIEHVSIEEQSCPSQDVVIHDCGEIPEGADDGICDFFKDGDVYPDWPIDLNESPAELSWWMETVDFVKAHGNEHFKKQDYKMALRKYRKALRYLDICWEKEGIDEETSTALRKTKSQIFTNSAACKLKFGDAKGALLDTEFAMRDEDNNVKALFRQGQAYMALNNVDAAAESLEKALQFEPNDAGIKKEYAAVMKKIAFRDNEEKKQYRKMFV

SEQ ID NO: 83721 - DNA, 776 bp, Arabidopsis thaliana
  misc_feature (1)..(776): Ceres Seq. ID no. 12671521
  misc_feature: MA Experiment ID: 20000171 Result: Down-regulated in Transcription
  misc_feature: MA Experiment 20000171 PARAMETER Experiment Name: At_42deg_Heat_P Parameter: Age (day) Value: 14
  misc_feature: MA Experiment 20000171 PARAMETER Experiment Name: At_42deg_Heat_P Parameter: Organism Value: A. thaliana
  misc_feature: MA Experiment 20000171 PARAMETER Experiment Name: At_42deg_Heat_P Parameter: Plant Line Value: WS
  misc_feature: MA Experiment 20000171 PARAMETER Experiment Name: At_42deg_Heat_P Parameter: Temperature (deg C) Value: 42 vs. 22
  misc_feature: MA Experiment 20000171 PARAMETER Experiment Name: At_42deg_Heat_P Parameter: Timepoint (hr) Value: 1
  misc_feature: MA Experiment 20000171 PARAMETER Experiment Name: At_42deg_Heat_P Parameter: Tissue Value: Aerial
  misc_feature: MA Experiment ID: 20000180 Result: Up-regulated in Transcription
  misc_feature: MA Experiment 20000180 PARAMETER Experiment Name: At_Germinating_Seeds_P Parameter: Age (hr) Value: 24 vs. 0
  misc_feature: MA Experiment 20000180 PARAMETER Experiment Name: At_Germinating_Seeds_P Parameter: Tissue Value: Germinating Seeds
  misc_feature: MA Experiment ID: 20000437 Result: Down-regulated in Transcription
  misc_feature: MA Experiment 20000437 PARAMETER Experiment Name: At_Drought_P Parameter: Age (day) Value: 8
  misc_feature: MA Experiment 20000437 PARAMETER Experiment Name: At_Drought_P Parameter: Organism Value: A. thaliana
  misc_feature: MA Experiment 20000437 PARAMETER Experiment Name: At_Drought_P Parameter: Plant Line Value: WS
  misc_feature: MA Experiment 20000437 PARAMETER Experiment Name: At_Drought_P Parameter: Timepoint (hr) Value: 24
  misc_feature: MA Experiment 20000437 PARAMETER Experiment Name: At_Drought_P Parameter: Tissue Value: Whole Plant
  misc_feature: MA Experiment 20000437 PARAMETER Experiment Name: At_Drought_P Parameter: Treatment Value: Drought vs. No Drought
  misc_feature: MA Experiment ID: 20000527 Result: Up-regulated in Transcription
  misc_feature: MA Experiment 20000527 PARAMETER Experiment Name: At_10percent_PEG_P Parameter: Age (day) Value: 20
  misc_feature: MA Experiment 20000527 PARAMETER Experiment Name: At_10percent_PEG_P Parameter: Organism Value: A. thaliana
  misc_feature: MA Experiment 20000527 PARAMETER Experiment Name: At_10percent_PEG_P Parameter: Plant Line Value: WS
  misc_feature: MA Experiment 20000527 PARAMETER Experiment Name: At_10percent_PEG_P Parameter: Timepoint (day) Value: 20
  misc_feature: MA Experiment 20000527 PARAMETER Experiment Name: At_10percent_PEG_P Parameter: Tissue Value: Whole Plant
  misc_feature: MA Experiment 20000527 PARAMETER Experiment Name: At_10percent_PEG_P Parameter: Treatment Value: 10percent PEG vs. No Treatment
  misc_feature: MA Experiment ID: 20000573 Result: Down-regulated in Transcription
  misc_feature: MA Experiment 20000573 PARAMETER Experiment Name: At_100uM_ABA_Mutants__P Parameter: Organism Value: A. thaliana
  misc_feature: MA Experiment 20000573 PARAMETER Experiment Name: At_100uM_ABA_Mutants__P Parameter: Plant Line Value: CS22 vs. Ler wt
  misc_feature: MA Experiment 20000573 PARAMETER Experiment Name: At_100uM_ABA_Mutants__P Parameter: Timepoint (hr) Value: N/A
  misc_feature: MA Experiment 20000573 PARAMETER Experiment Name: At_100uM_ABA_Mutants__P Parameter: Tissue Value: Whole Plant
  misc_feature: MA Experiment 20000573 PARAMETER Experiment Name: At_100uM_ABA_Mutants__P Parameter: Treatment Value: None
  misc_feature: MA Experiment ID: 20001248 Result: Down-regulated in Transcription
  misc_feature: MA Experiment 20001248 PARAMETER Experiment Name: At_Far-red-induction_P Parameter: Age (day) Value: 7
  misc_feature: MA Experiment 20001248 PARAMETER Experiment Name: At_Far-red-induction_P Parameter: Light Value: Far-red vs. White
  misc_feature: MA Experiment 20001248 PARAMETER Experiment Name: At_Far-red-induction_P Parameter: Organism Value: A. thaliana
  misc_feature: MA Experiment 20001248 PARAMETER Experiment Name: At_Far-red-induction_P Parameter: Plant Line Value: Columbia
  misc_feature: MA Experiment 20001248 PARAMETER Experiment Name: At_Far-red-induction_P Parameter: Timepoint (hr) Value: 4
  misc_feature: MA Experiment 20001248 PARAMETER Experiment Name: At_Far-red-induction_P Parameter: Tissue Value: Whole Plant
atgtcgaattttgaaatggctgggacaggatcatcaagaaacaacgaagaagacaatcaacaaaacacaaattgggtttggtacaaacacaccaataataacctaagtacgagccacaacaatcagatatggcagcagccaagcctcgatctatatccgggtcagatcgacgtctgtgatatgaccacgtcatcgagatctctaacgataagctgtcaagagtgtggaaaccaagccaagaaagggtgcacgcacgggcggtgtagaacttgctgcaagagtaacggactccactgtcccacccacgtgaggagcacgtggatccccattgccaaacgccgtgagcggcagcagcagctacagacgccaacctccaacccaaccggcggtagcggcagagttgggaagtatagagacattaatcaacatgctactttagactcatcagggttagagatgggagagacaagatttccagatgaagtgagctcggatgcacttttccgatgcgtcagaatgagtggtaccgatgatggagagggccaatacgcataccaaacgacggtgggcatagctggtcatctctttaaaggaattctctataaccaaggtccagaaaacaagtccatgcgcagtacacaattctacgagaacccaccaagatcttaattttttttatatcttctttatttttgtcgtatgcaataatctctattaaaactttgttgattcaagattatccaaaactcaatactttacagatgaagtaactcggt

SEQ ID NO: 83722 - protein, 222 aa, Arabidopsis thaliana
  peptide (1)..(222): Ceres Seq. ID no. 12671522
  misc_feature (63)..(208): Pfam Name: Domain of unknown function (DUF702) Pfam Description: Domain of unknown function (DUF702)
  misc_feature (1)..(222): Homolog of NCBI NO: 15224110 NR Description: unknown protein; protein id: At2g18120.1
  misc_feature (61)..(209): Homolog of NCBI NO: 15239350 NR Description: zinc finger protein SHI-like; protein id: supported by cDNA: gi_4929802 [Arabidopsis thaliana] putative zinc finger protein SHI [Arabidopsis thaliana]
  misc_feature (111)..(208): Homolog of NCBI NO: 15222285 NR Description: unknown protein; protein id: At1g75520.1
  misc_feature (63)..(120): Homolog of NCBI NO: 15222285 NR Description: unknown protein; protein id: At1g75520.1
  misc_feature (32)..(135): Homolog of NCBI NO: 15223669 NR Description: hypothetical protein; protein id: At1g19790.1
  misc_feature (129)..(211): Homolog of NCBI NO: 15223669 NR Description: hypothetical protein; protein id: At1g19790.1
  misc_feature (11)..(135): Homolog of NCBI NO: 15234365 NR Description: putative protein; protein id: At4g36260.1
  misc_feature (10)..(131): Homolog of NCBI NO: 18416839 NR Description: lateral root primordia (LRP1); protein id: [Arabidopsis thaliana] >gi|14586363|emb|CAC42894.1| lateral root
  misc_feature (116)..(208): Homolog of NCBI NO: 18416839 NR Description: lateral root primordia (LRP1); protein id: [Arabidopsis thaliana] >gi|14586363|emb|CAC42894.1| lateral root
  misc_feature (10)..(131): Homolog of NCBI NO: 882341 NR Description: LRP1
MSNFEMAGTGSSRNNEEDNQQNTNWVWYKHTNNNLSTSHNNQIWQQPSLDLYPGQIDVCDMTTSSRSLTISCQECGNQAKKGCTHGRCRTCCKSNGLHCPTHVRSTWIPIAKRRERQQQLQTPTSNPTGGSGRVGKYRDINQHATLDSSGLEMGETRFPDEVSSDALFRCVRMSGTDDGEGQYAYQTTVGIAGHLFKGILYNQGPENKSMRSTQFYENPPRS

SEQ ID NO: 83723 - protein, 217 aa, Arabidopsis thaliana
  peptide (1)..(217): Ceres Seq. ID no. 12671523
  misc_feature (58)..(203): Pfam Name: Domain of unknown function (DUF702) Pfam Description: Domain of unknown function (DUF702)
  misc_feature (1)..(217): Homolog of NCBI NO: 15224110 NR Description: unknown protein; protein id: At2g18120.1
  misc_feature (56)..(204): Homolog of NCBI NO: 15239350 NR Description: zinc finger protein SHI-like; protein id: supported by cDNA: gi_4929802 [Arabidopsis thaliana] putative zinc finger protein SHI [Arabidopsis thaliana]
  misc_feature (106)..(203): Homolog of NCBI NO: 15222285 NR Description: unknown protein; protein id: At1g75520.1
  misc_feature (58)..(115): Homolog of NCBI NO: 15222285 NR Description: unknown protein; protein id: At1g75520.1
  misc_feature (27)..(130): Homolog of NCBI NO: 15223669 NR Description: hypothetical protein; protein id: At1g19790.1
  misc_feature (124)..(206): Homolog of NCBI NO: 15223669 NR Description: hypothetical protein; protein id: At1g19790.1
  misc_feature (6)..(130): Homolog of NCBI NO: 15234365 NR Description: putative protein; protein id: At4g36260.1
  misc_feature (5)..(126): Homolog of NCBI NO: 18416839 NR Description: lateral root primordia (LRP1); protein id: [Arabidopsis thaliana] >gi|14586363|emb|CAC42894.1| lateral root
  misc_feature (111)..(203): Homolog of NCBI NO: 18416839 NR Description: lateral root primordia (LRP1); protein id: [Arabidopsis thaliana] >gi|14586363|emb|CAC42894.1| lateral root
  misc_feature (5)..(126): Homolog of NCBI NO: 882341 NR Description: LRP1
MAGTGSSRNNEEDNQQNTNWVWYKHTNNNLSTSHNNQIWQQPSLDLYPGQIDVCDMTTSSRSLTISCQECGNQAKKGCTHGRCRTCCKSNGLHCPTHVRSTWIPIAKRRERQQQLQTPTSNPTGGSGRVGKYRDINQHATLDSSGLEMGETRFPDEVSSDALFRCVRMSGTDDGEGQYAYQTTVGIAGHLFKGILYNQGPENKSMRSTQFYENPPRS

SEQ ID NO: 83724 - protein, 162 aa, Arabidopsis thaliana
  peptide (1)..(162): Ceres Seq. ID no. 12671524
  misc_feature (3)..(148): Pfam Name: Domain of unknown function (DUF702) Pfam Description: Domain of unknown function (DUF702)
  misc_feature (1)..(162): Homolog of NCBI NO: 15224110 NR Description: unknown protein; protein id: At2g18120.1
  misc_feature (1)..(149): Homolog of NCBI NO: 15239350 NR Description: zinc finger protein SHI-like; protein id: supported by cDNA: gi_4929802 [Arabidopsis thaliana] putative zinc finger protein SHI [Arabidopsis thaliana]
  misc_feature (51)..(148): Homolog of NCBI NO: 15222285 NR Description: unknown protein; protein id: At1g75520.1
  misc_feature (3)..(60): Homolog of NCBI NO: 15222285 NR Description: unknown protein; protein id: At1g75520.1
  misc_feature (1)..(75): Homolog of NCBI NO: 15223669 NR Description: hypothetical protein; protein id: At1g19790.1
  misc_feature (69)..(151): Homolog of NCBI NO: 15223669 NR Description: hypothetical protein; protein id: At1g19790.1
  misc_feature (1)..(75): Homolog of NCBI NO: 15234365 NR Description: putative protein; protein id: At4g36260.1
  misc_feature (1)..(71): Homolog of NCBI NO: 18416839 NR Description: lateral root primordia (LRP1); protein id: [Arabidopsis thaliana] >gi|14586363|emb|CAC42894.1| lateral root
  misc_feature (56)..(148): Homolog of NCBI NO: 18416839 NR Description: lateral root primordia (LRP1); protein id: [Arabidopsis thaliana] >gi|14586363|emb|CAC42894.1| lateral root
  misc_feature (1)..(71): Homolog of NCBI NO: 882341 NR Description: LRP1
MTTSSRSLTISCQECGNQAKKGCTHGRCRTCCKSNGLHCPTHVRSTWIPIAKRRERQQQLQTPTSNPTGGSGRVGKYRDINQHATLDSSGLEMGETRFPDEVSSDALFRCVRMSGTDDGEGQYAYQTTVGIAGHLFKGILYNQGPENKSMRSTQFYENPPRS

SEQ ID NO: 83725 - DNA, 1234 bp, Arabidopsis thaliana
  misc_feature (1)..(1234): Ceres Seq. ID no. 12671525
  misc_feature: MA Experiment ID: 20000267 Result: Up-regulated in Transcription
  misc_feature: MA Experiment 20000267 PARAMETER Experiment Name: At_Drought_P Parameter: Age (day) Value: 7
  misc_feature: MA Experiment 20000267 PARAMETER Experiment Name: At_Drought_P Parameter: Organism Value: A. thaliana
  misc_feature: MA Experiment 20000267 PARAMETER Experiment Name: At_Drought_P Parameter: Plant Line Value: WS
  misc_feature: MA Experiment 20000267 PARAMETER Experiment Name: At_Drought_P Parameter: Timepoint (hr) Value: 6
  misc_feature: MA Experiment 20000267 PARAMETER Experiment Name: At_Drought_P Parameter: Tissue Value: Whole Plant
  misc_feature: MA Experiment 20000267 PARAMETER Experiment Name: At_Drought_P Parameter: Treatment Value: Drought vs. No Drought
  misc_feature: MA Experiment ID: 20000437 Result: Up-regulated in Transcription
  misc_feature: MA Experiment 20000437 PARAMETER Experiment Name: At_Drought_P Parameter: Age (day) Value: 8
  misc_feature: MA Experiment 20000437 PARAMETER Experiment Name: At_Drought_P Parameter: Organism Value: A. thaliana
  misc_feature: MA Experiment 20000437 PARAMETER Experiment Name: At_Drought_P Parameter: Plant Line Value: WS
  misc_feature: MA Experiment 20000437 PARAMETER Experiment Name: At_Drought_P Parameter: Timepoint (hr) Value: 24
  misc_feature: MA Experiment 20000437 PARAMETER Experiment Name: At_Drought_P Parameter: Tissue Value: Whole Plant
  misc_feature: MA Experiment 20000437 PARAMETER Experiment Name: At_Drought_P Parameter: Treatment Value: Drought vs. No Drought
  misc_feature: MA Experiment ID: 20000573 Result: Down-regulated in Transcription
  misc_feature: MA Experiment 20000573 PARAMETER Experiment Name: At_100uM_ABA_Mutants__P Parameter: Organism Value: A. thaliana
  misc_feature: MA Experiment 20000573 PARAMETER Experiment Name: At_100uM_ABA_Mutants__P Parameter: Plant Line Value: CS22 vs. Ler wt
  misc_feature: MA Experiment 20000573 PARAMETER Experiment Name: At_100uM_ABA_Mutants__P Parameter: Timepoint (hr) Value: N/A
  misc_feature: MA Experiment 20000573 PARAMETER Experiment Name: At_100uM_ABA_Mutants__P Parameter: Tissue Value: Whole Plant
  misc_feature: MA Experiment 20000573 PARAMETER Experiment Name: At_100uM_ABA_Mutants__P Parameter: Treatment Value: None
gaatataaacaagaacccaacaccagatacattataattaatcccaactcaagaagctttaaaatcttcaccttccatttgctattgatcatcttcttacatctctctccctctaaatatatccaaacaagaacgaaaggaaaaagagtacatacaatggtgaactttgtggatttacaaaaaccattgttgtaccgcctcatgaaattggccggtgtcattccttacaccgtagagcttgaaccagggacaaagatgaacttctggatcccaaaagaaaccctaaaaaaaaccaaaaaatctgacaaaaactttgccgtggaaccccaaaaacctacgaaaccagtcctattgttcatccatggctttgcagccgaagggatcgtgacgtggcagttccaggtcggatcattagccaagaagtactcagtctatataccagacctcctcttctttggtgggtcctactccgacaacgcggatcgatcaccagcgtttcaagcccactgtttagtcaagtctcttcgtatcctcggtatcgaaaagtttactcttgtagggtttagttacggtggcatggttgctttcaagatcgccgaggagtaccctgagatggttcaagccatggtggtttcaggttcgatactcgcgatgactgatacgatcagtgagtctaatttgaaccagttaggatttaagtcgtcggcggatcttttgttaccaacttcggttaaagggctcaagactctcttcacccttgctgttcataaacccatgtggttcccgaaacggctcttcaaggatttcattgaggtgatgattaccaataggaaggaaagagcagaattgttagaagctttggtcatcagcaacaaagatgtgacaatccctcgttttcaacagaaaatacatcttctgtggggcgaaagtgatcaaatttttaaccttgaatttgccaagagcatgaaagagcaactaggcgaaaatgcaacaatggagagtataaaaaaagcaggtcacttggcacatttggagagaccttgtgtctataacagacgtctcaaaaagtttcttgcttcagtttactccgaaaactaatttggatgtaatcgattctcacatcaacaccgaatgaatttatttatcttatttctttggtttcagttcttctttcaaaataatgtaacctgatatattatatttcataaaataatctatggttcaattctatgtc

SEQ ID NO: 83726 - protein, 365 aa, Arabidopsis thaliana
  peptide (1)..(365): Ceres Seq. ID no. 12671526
  misc_feature (142)..(356): Pfam Name: alpha/beta hydrolase fold Pfam Description: alpha/beta hydrolase fold
  misc_feature (53)..(365): Homolog of NCBI NO: 18398716 NR Description: expressed protein; protein id: At2g18360.1, by cDNA: gi_13605610 [Arabidopsis thaliana] At2g18360/T30D6.13 [Arabidopsis thaliana]
  misc_feature (53)..(365): Homolog of NCBI NO: 25411863 NR Description: hypothetical protein At2g18360 [imported] -
  misc_feature (53)..(365): Homolog of NCBI NO: 15234460 NR Description: putative protein; protein id: At4g36610.1, by cDNA: 38141. [Arabidopsis thaliana] >gi|25407745|pir||C85432
  misc_feature (53)..(365): Homolog of NCBI NO: 21593332 NR Description: putative hydrolase [Arabidopsis thaliana]
  misc_feature (113)..(364): Homolog of NCBI NO: 19387256 NR Description: putative hydrolase [Oryza sativa (japonica
  misc_feature (53)..(98): Homolog of NCBI NO: 19387256 NR Description: putative hydrolase [Oryza sativa (japonica
  misc_feature (69)..(358): Homolog of NCBI NO: 18411865 NR Description: hypothetical protein; protein id: At1g78210.1, by cDNA: gi_19699018 [Arabidopsis thaliana] unknown protein [Arabidopsis thaliana]
  misc_feature (113)..(360): Homolog of NCBI NO: 18420566 NR Description: Expressed protein; protein id: At4g39955.1,
  misc_feature (113)..(360): Homolog of NCBI NO: 21536873 NR Description: putative hydrolase [Arabidopsis thaliana]
  misc_feature (63)..(358): Homolog of NCBI NO: 22326938 NR Description: similar to putative hydrolase; protein id: [Arabidopsis thaliana] >gi|29294062|gb|AAO73899.1| hydrolase,
EYKQEPNTRYIIINPNSRSFKIFTFHLLLIIFLHLSPSKYIQTRTKGKRVHTMVNFVDLQKPLLYRLMKLAGVIPYTVELEPGTKMNFWIPKETLKKTKKSDKNFAVEPQKPTKPVLLFIHGFAAEGIVTWQFQVGSLAKKYSVYIPDLLFFGGSYSDNADRSPAFQAHCLVKSLRILGIEKFTLVGFSYGGMVAFKIAEEYPEMVQAMVVSGSILAMTDTISESNLNQLGFKSSADLLLPTSVKGLKTLFTLAVHKPMWFPKRLFKDFIEVMITNRKERAELLEALVISNKDVTIPRFQQKIHLLWGESDQIFNLEFAKSMKEQLGENATMESIKKAGHLAHLERPCVYNRRLKKFLASVYSEN

SEQ ID NO: 83727 - protein, 313 aa, Arabidopsis thaliana
  peptide (1)..(313): Ceres Seq. ID no. 12671527
  misc_feature (90)..(304): Pfam Name: alpha/beta hydrolase fold Pfam Description: alpha/beta hydrolase fold
  misc_feature (1)..(313): Homolog of NCBI NO: 18398716 NR Description: expressed protein; protein id: At2g18360.1, by cDNA: gi_13605610 [Arabidopsis thaliana] At2g18360/T30D6.13 [Arabidopsis thaliana]
  misc_feature (1)..(313): Homolog of NCBI NO: 25411863 NR Description: hypothetical protein At2g18360 [imported] -
  misc_feature (1)..(313): Homolog of NCBI NO: 15234460 NR Description: putative protein; protein id: At4g36610.1, by cDNA: 38141. [Arabidopsis thaliana] >gi|25407745|pir||C85432
  misc_feature (1)..(313): Homolog of NCBI NO: 21593332 NR Description: putative hydrolase [Arabidopsis thaliana]
  misc_feature (61)..(312): Homolog of NCBI NO: 19387256 NR Description: putative hydrolase [Oryza sativa (japonica
  misc_feature (1)..(46): Homolog of NCBI NO: 19387256 NR Description: putative hydrolase [Oryza sativa (japonica
  misc_feature (17)..(306): Homolog of NCBI NO: 18411865 NR Description: hypothetical protein; protein id: At1g78210.1, by cDNA: gi_19699018 [Arabidopsis thaliana] unknown protein [Arabidopsis thaliana]
  misc_feature (61)..(308): Homolog of NCBI NO: 18420566 NR Description: Expressed protein; protein id: At4g39955.1,
  misc_feature (61)..(308): Homolog of NCBI NO: 21536873 NR Description: putative hydrolase [Arabidopsis thaliana]
  misc_feature (11)..(306): Homolog of NCBI NO: 22326938 NR Description: similar to putative hydrolase; protein id: [Arabidopsis thaliana] >gi|29294062|gb|AAO73899.1| hydrolase,
MVNFVDLQKPLLYRLMKLAGVIPYTVELEPGTKMNFWIPKETLKKTKKSDKNFAVEPQKPTKPVLLFIHGFAAEGIVTWQFQVGSLAKKYSVYIPDLLFFGGSYSDNADRSPAFQAHCLVKSLRILGIEKFTLVGFSYGGMVAFKIAEEYPEMVQAMVVSGSILAMTDTISESNLNQLGFKSSADLLLPTSVKGLKTLFTLAVHKPMWFPKRLFKDFIEVMITNRKERAELLEALVISNKDVTIPRFQQKIHLLWGESDQIFNLEFAKSMKEQLGENATMESIKKAGHLAHLERPCVYNRRLKKFLASVYSEN

SEQ ID NO: 83728 - protein, 298 aa, Arabidopsis thaliana
  peptide (1)..(298): Ceres Seq. ID no. 12671528
  misc_feature (75)..(289): Pfam Name: alpha/beta hydrolase fold Pfam Description: alpha/beta hydrolase fold
  misc_feature (1)..(298): Homolog of NCBI NO: 18398716 NR Description: expressed protein; protein id: At2g18360.1, by cDNA: gi_13605610 [Arabidopsis thaliana] At2g18360/T30D6.13 [Arabidopsis thaliana]
  misc_feature (1)..(298): Homolog of NCBI NO: 25411863 NR Description: hypothetical protein At2g18360 [imported] -
  misc_feature (1)..(298): Homolog of NCBI NO: 15234460 NR Description: putative protein; protein id: At4g36610.1, by cDNA: 38141. [Arabidopsis thaliana] >gi|25407745|pir||C85432
  misc_feature (1)..(298): Homolog of NCBI NO: 21593332 NR Description: putative hydrolase [Arabidopsis thaliana]
  misc_feature (46)..(297): Homolog of NCBI NO: 19387256 NR Description: putative hydrolase [Oryza sativa (japonica
  misc_feature (1)..(31): Homolog of NCBI NO: 19387256 NR Description: putative hydrolase [Oryza sativa (japonica
  misc_feature (2)..(291): Homolog of NCBI NO: 18411865 NR Description: hypothetical protein; protein id: At1g78210.1, by cDNA: gi_19699018 [Arabidopsis thaliana] unknown protein [Arabidopsis thaliana]
  misc_feature (46)..(293): Homolog of NCBI NO: 18420566 NR Description: Expressed protein; protein id: At4g39955.1,
  misc_feature (46)..(293): Homolog of NCBI NO: 21536873 NR Description: putative hydrolase [Arabidopsis thaliana]
  misc_feature (1)..(291): Homolog of NCBI NO: 22326938 NR Description: similar to putative hydrolase; protein id: [Arabidopsis thaliana] >gi|29294062|gb|AAO73899.1| hydrolase,
MKLAGVIPYTVELEPGTKMNFWIPKETLKKTKKSDKNFAVEPQKPTKPVLLFIHGFAAEGIVTWQFQVGSLAKKYSVYIPDLLFFGGSYSDNADRSPAFQAHCLVKSLRILGIEKFTLVGFSYGGMVAFKIAEEYPEMVQAMVVSGSILAMTDTISESNLNQLGFKSSADLLLPTSVKGLKTLFTLAVHKPMWFPKRLFKDFIEVMITNRKERAELLEALVISNKDVTIPRFQQKIHLLWGESDQIFNLEFAKSMKEQLGENATMESIKKAGHLAHLERPCVYNRRLKKFLASVYSEN

SEQ ID NO: 83729 - DNA, 804 bp, Arabidopsis thaliana
  misc_feature (1)..(804): Ceres Seq. ID no. 12671537
  misc_feature: MA Experiment ID: 20000315 Result: Down-regulated in Transcription
  misc_feature: MA Experiment 20000315 PARAMETER Experiment Name: At_14day_Shoots-Roots_Sub_P Parameter: Age (day) Value: 14
  misc_feature: MA Experiment 20000315 PARAMETER Experiment Name: At_14day_Shoots-Roots_Sub_P Parameter: Organism Value: A. thaliana
  misc_feature: MA Experiment 20000315 PARAMETER Experiment Name: At_14day_Shoots-Roots_Sub_P Parameter: Plant Line Value: WS
  misc_feature: MA Experiment 20000315 PARAMETER Experiment Name: At_14day_Shoots-Roots_Sub_P Parameter: Tissue Value: Shoots vs. Whole Plant
  misc_feature: MA Experiment ID: 20000327 Result: Down-regulated in Transcription
  misc_feature: MA Experiment 20000327 PARAMETER Experiment Name: At_42deg_Heat_Sub_P Parameter: Age (day) Value: 14
  misc_feature: MA Experiment 20000327 PARAMETER Experiment Name: At_42deg_Heat_Sub_P Parameter: Organism Value: A. thaliana
  misc_feature: MA Experiment 20000327 PARAMETER Experiment Name: At_42deg_Heat_Sub_P Parameter: Plant Line Value: WS
  misc_feature: MA Experiment 20000327 PARAMETER Experiment Name: At_42deg_Heat_Sub_P Parameter: Temperature (deg C) Value: 42 vs. 22
  misc_feature: MA Experiment 20000327 PARAMETER Experiment Name: At_42deg_Heat_Sub_P Parameter: Timepoint (hr) Value: 1
  misc_feature: MA Experiment 20000327 PARAMETER Experiment Name: At_42deg_Heat_Sub_P Parameter: Tissue Value: Aerial
  misc_feature: MA Experiment ID: 20000328 Result: Down-regulated in Transcription
  misc_feature: MA Experiment 20000328 PARAMETER Experiment Name: At_42deg_Heat_Sub_P Parameter: Age (day) Value: 14
  misc_feature: MA Experiment 20000328 PARAMETER Experiment Name: At_42deg_Heat_Sub_P Parameter: Organism Value: A. thaliana
  misc_feature: MA Experiment 20000328 PARAMETER Experiment Name: At_42deg_Heat_Sub_P Parameter: Plant Line Value: WS
  misc_feature: MA Experiment 20000328 PARAMETER Experiment Name: At_42deg_Heat_Sub_P Parameter: Temperature (deg C) Value: 42 vs. 22
  misc_feature: MA Experiment 20000328 PARAMETER Experiment Name: At_42deg_Heat_Sub_P Parameter: Timepoint (hr) Value: 6
  misc_feature: MA Experiment 20000328 PARAMETER Experiment Name: At_42deg_Heat_Sub_P Parameter: Tissue Value: Aerial
  misc_feature: MA Experiment ID: 20000347 Result: Down-regulated in Transcription
  misc_feature: MA Experiment 20000347 PARAMETER Experiment Name: At_2mM_SA_Sub_P Parameter: Age (day) Value: 14
  misc_feature: MA Experiment 20000347 PARAMETER Experiment Name: At_2mM_SA_Sub_P Parameter: Organism Value: A. thaliana
  misc_feature: MA Experiment 20000347 PARAMETER Experiment Name: At_2mM_SA_Sub_P Parameter: Plant Line Value: WS
  misc_feature: MA Experiment 20000347 PARAMETER Experiment Name: At_2mM_SA_Sub_P Parameter: Timepoint (hr) Value: 6
  misc_feature: MA Experiment 20000347 PARAMETER Experiment Name: At_2mM_SA_Sub_P Parameter: Tissue Value: Aerial
  misc_feature: MA Experiment 20000347 PARAMETER Experiment Name: At_2mM_SA_Sub_P Parameter: Treatment Value: 2mM SA vs. No Treatment
  misc_feature: MA Experiment ID: 20000355 Result: Down-regulated in Transcription
  misc_feature: MA Experiment 20000355 PARAMETER Experiment Name: At_Siliques_Sub_P Parameter: Age (day) Value: 21
  misc_feature: MA Experiment 20000355 PARAMETER Experiment Name: At_Siliques_Sub_P Parameter: Organism Value: A. thaliana
  misc_feature: MA Experiment 20000355 PARAMETER Experiment Name: At_Siliques_Sub_P Parameter: Plant Line Value: WS
  misc_feature: MA Experiment 20000355 PARAMETER Experiment Name: At_Siliques_Sub_P Parameter: Tissue Value: Less Than 5mm Siliques vs. Whole Plant
  misc_feature: MA Experiment ID: 20000440 Result: Down-regulated in Transcription
  misc_feature: MA Experiment 20000440 PARAMETER Experiment Name: At_Closed-Flower__Sub_P Parameter: Tissue Value: Closed Flower vs. Whole Plant
atgagcgatggtgttttggtaaatacttgggaggagttacaaggaaacactctcgctgcgcttagagaggacgaagaattgagccgggtcatgaaagtaccggtttatcctattgggccaattgttaggactaaccagcatgtagacaaacccaatagtatattcgagtggctagacgagcaacgggaaaggtcagtggtgtttgtgtgtttagggagcggtggaacgttgacgtttgagcaaacagtggaactcgctttgggtttagagttaagtggtcaaaggttcgtttgggttctacgtaggcccgcttcatatctcggggcgatctccagcgatgatgaacaggtaagtgccagtctacctgaaggtttcttggaccgcacgcgtggtgtggggattgtggttacgcaatgggcaccacaagttgagatcttgagccatagatcgatcggtgggttcttgtctcactgcggttggagttcggctttggaaagtttgactaaaggagttccgatcatcgcttggcctctttatgcggagcagtggatgaatgccacgttattgactgaggagatcggtgtggccgttcgtacatcggagttaccgtcggagagagtcatcggaagggaagaagtggcatctctggtgagaaagattatggcggaagaggatgaagaaggacagaaaattagggctaaagctgaggaggtgagggttagctccgaacgagcttggagtaaagacgggtcatcttataattctctattcgaatgggcaaaacgatgttatcttgtaccgtga

SEQ ID NO: 83730 - protein, 267 aa, Arabidopsis thaliana
  peptide (1)..(267): Ceres Seq. ID no. 12671538
  misc_feature (1)..(264): Pfam Name: UDP-glucoronosyl and UDP-glucosyl transferase Pfam Description: UDP-glucoronosyl and UDP-glucosyl transferase
  misc_feature (1)..(267): Homolog of NCBI NO: 25286819 NR Description: probable flavonol 3-O-glucosyltransferase
  misc_feature (1)..(267): Homolog of NCBI NO: 30680415 NR Description: glycosyltransferase family [Arabidopsis thaliana]
  misc_feature (1)..(266): Homolog of NCBI NO: 25286815 NR Description: probable flavonol 3-O-glucosyltransferase
  misc_feature (1)..(266): Homolog of NCBI NO: 30680413 NR Description: UDP-glucosyltransferase family [Arabidopsis
  misc_feature (1)..(266): Homolog of NCBI NO: 39104603 NR Description: putative flavonol 3-O-glucosyltransferase
  misc_feature (2)..(261): Homolog of NCBI NO: 2501494 NR Description: Flavonol 3-O-glucosyltransferase 5 (UDP-glucose
  misc_feature (3)..(256): Homolog of NCBI NO: 7433913 NR Description: UTP-glucose glucosyltransferase-like protein -
  misc_feature (3)..(256): Homolog of NCBI NO: 18409172 NR Description: UTP-glucose glucosyltransferase - like protein; id: At3g50740.1, supported by cDNA: gi_15146271 [Arabidopsis >gi|15146272|gb|AAK83619.1| AT3g50740/T3A5_120 [Arabidopsis
  misc_feature (2)..(263): Homolog of NCBI NO: 15240051 NR Description: UTP-glucose glucosyltransferase; protein id: supported by cDNA: 151441., supported by cDNA: gi_17065119,
  misc_feature (2)..(263): Homolog of NCBI NO: 15240305 NR Description: UTP-glucose glucosyltransferase - like protein;
MSDGVLVNTWEELQGNTLAALREDEELSRVMKVPVYPIGPIVRTNQHVDKPNSIFEWLDEQRERSVVFVCLGSGGTLTFEQTVELALGLELSGQRFVWVLRRPASYLGAISSDDEQVSASLPEGFLDRTRGVGIVVTQWAPQVEILSHRSIGGFLSHCGWSSALESLTKGVPIIAWPLYAEQWMNATLLTEEIGVAVRTSELPSERVIGREEVASLVRKIMAEEDEEGQKIRAKAEEVRVSSERAWSKDGSSYNSLFEWAKRCYLVP

SEQ ID NO: 83731 - protein, 237 aa, Arabidopsis thaliana
  peptide (1)..(237): Ceres Seq. ID no. 12671539
  misc_feature (1)..(234): Pfam Name: UDP-glucoronosyl and UDP-glucosyl transferase Pfam Description: UDP-glucoronosyl and UDP-glucosyl transferase
  misc_feature (1)..(237): Homolog of NCBI NO: 25286819 NR Description: probable flavonol 3-O-glucosyltransferase
  misc_feature (1)..(237): Homolog of NCBI NO: 30680415 NR Description: glycosyltransferase family [Arabidopsis thaliana]
  misc_feature (1)..(236): Homolog of NCBI NO: 25286815 NR Description: probable flavonol 3-O-glucosyltransferase
  misc_feature (1)..(236): Homolog of NCBI NO: 30680413 NR Description: UDP-glucosyltransferase family [Arabidopsis
  misc_feature (1)..(236): Homolog of NCBI NO: 39104603 NR Description: putative flavonol 3-O-glucosyltransferase
  misc_feature (1)..(231): Homolog of NCBI NO: 2501494 NR Description: Flavonol 3-O-glucosyltransferase 5 (UDP-glucose
  misc_feature (1)..(226): Homolog of NCBI NO: 7433913 NR Description: UTP-glucose glucosyltransferase-like protein -
  misc_feature (1)..(226): Homolog of NCBI NO: 18409172 NR Description: UTP-glucose glucosyltransferase - like protein; id: At3g50740.1, supported by cDNA: gi_15146271 [Arabidopsis >gi|15146272|gb|AAK83619.1| AT3g50740/T3A5_120 [Arabidopsis
  misc_feature (1)..(233): Homolog of NCBI NO: 15240051 NR Description: UTP-glucose glucosyltransferase; protein id: supported by cDNA: 151441., supported by cDNA: gi_17065119,
  misc_feature (1)..(233): Homolog of NCBI NO: 15240305 NR Description: UTP-glucose glucosyltransferase - like protein;
MKVPVYPIGPIVRTNQHVDKPNSIFEWLDEQRERSVVFVCLGSGGTLTFEQTVELALGLELSGQRFVWVLRRPASYLGAISSDDEQVSASLPEGFLDRTRGVGIVVTQWAPQVEILSHRSIGGFLSHCGWSSALESLTKGVPIIAWPLYAEQWMNATLLTEEIGVAVRTSELPSERVIGREEVASLVRKIMAEEDEEGQKIRAKAEEVRVSSERAWSKDGSSYNSLFEWAKRCYLVP

SEQ ID NO: 83732 - DNA, 2666 bp, Arabidopsis thaliana
  misc_feature (1)..(2666): Ceres Seq. ID no. 12671548
  misc_feature: MA Experiment ID: 20000437 Result: Down-regulated in Transcription
  misc_feature: MA Experiment 20000437 PARAMETER Experiment Name: At_Drought_P Parameter: Age (day) Value: 8
  misc_feature: MA Experiment 20000437 PARAMETER Experiment Name: At_Drought_P Parameter: Organism Value: A. thaliana
  misc_feature: MA Experiment 20000437 PARAMETER Experiment Name: At_Drought_P Parameter: Plant Line Value: WS
  misc_feature: MA Experiment 20000437 PARAMETER Experiment Name: At_Drought_P Parameter: Timepoint (hr) Value: 24
  misc_feature: MA Experiment 20000437 PARAMETER Experiment Name: At_Drought_P Parameter: Tissue Value: Whole Plant
  misc_feature: MA Experiment 20000437 PARAMETER Experiment Name: At_Drought_P Parameter: Treatment Value: Drought vs. No Drought
  misc_feature: MA Experiment ID: 20000527 Result: Up-regulated in Transcription
  misc_feature: MA Experiment 20000527 PARAMETER Experiment Name: At_10percent_PEG_P Parameter: Age (day) Value: 20
  misc_feature: MA Experiment 20000527 PARAMETER Experiment Name: At_10percent_PEG_P Parameter: Organism Value: A. thaliana
  misc_feature: MA Experiment 20000527 PARAMETER Experiment Name: At_10percent_PEG_P Parameter: Plant Line Value: WS
  misc_feature: MA Experiment 20000527 PARAMETER Experiment Name: At_10percent_PEG_P Parameter: Timepoint (day) Value: 20
  misc_feature: MA Experiment 20000527 PARAMETER Experiment Name: At_10percent_PEG_P Parameter: Tissue Value: Whole Plant
  misc_feature: MA Experiment 20000527 PARAMETER Experiment Name: At_10percent_PEG_P Parameter: Treatment Value: 10percent PEG vs. No Treatment
aactttcactcactcttcttctccttcaatcccaatttcggataacgtctttcaatggacggagcactcttccctcacaaacctccatacccaattcaatccaagagacctccaccatctcaatcctctaaccaatctatcaaattcagttccgctactcttcacttacctcctccttctcctccttctttccctctcgattctcttcttcaccatctcgttcacctctcttccccgcctcctagacactccaactccgccgccgctcgtttcccttctctcgaagtctcgactgattcatcatcgtcgaaacccattctgggtattgaaattgagaacgagagaaatgggtctttgaaactcttgtgtaagaaagaagttgtcttggttaattccattgttgaacagcctttgactggtttgagtaggttttttgattctgtgaaatcggaattgcttagaactgatttggttagtttggttaagggtctagatgattctgggcattgggaaagagctgtttttttgtttgaatggttagttttgtcttcaaattctggagctttgaagctagatcatcaagttatcgaaatctttgttaggattttaggtagagaatctcagtactctgttgcagctaagttgctcgataaaattcctctacaagaatatctcctcgatgttcgggcttacacgacgatcttacatgcgtattcacggactgggaagtatgaaaaggctatcgatttgtttgagaggatgaaagagatgggtccttcacctactttggtgacttacaatgtgattctcgatgttttcgggaaaatgggtcgatcttggcggaaaattctaggggttttagatgaaatgagaagcaaaggattgaagtttgatgagtttacttgtagtactgtgctctctgcttgtgcaagagaaggtttgttaagagaggccaaggagtttttcgctgaacttaagtcatgcggctatgaacctggtactgttacgtacaatgctttgttgcaagtttttggtaaagcaggagtttatacagaagcgttgagtgttttgaaagagatggaggaaaatagctgcccagcagattctgtgacatataatgagcttgttgctgcttatgttagagctggttttagcaaggaagctgctggtgtcattgagatgatgacgaaaaagggtgtaatgccgaacgcaatcacttatactacagtgatagatgcatatggaaaggcgggaaaggaggacgaggctttgaagctgttttatagtatgaaagaagctggttgtgttccgaatacttgcacctacaatgcagtgcttagtctgttggggaagaagtcgagatccaacgaaatgataaagatgttatgtgatatgaagtctaatggatgttcccctaatcgtgccacttggaacacaatgcttgctctgtgtgggaataagggtatggataagtttgtgaaccgggtgttccgtgaaatgaagagctgcggatttgaacctgatagggacacattcaacacgctgatcagtgcctatgggcgatgtggttcagaggttgatgcatcgaaaatgtatggtgagatgacaagagcagggttcaacgcttgcgttacgacttacaacgcgttacttaatgccttggcaagaaaaggagattggagatcaggcgaaaatgtgatttccgacatgaaaagtaaaggtttcaaacctactgaaacatcttattccttgatgcttcagtgttatgctaaaggagggaactatctagggatagagagaatcgagaataggataaaggagggccaaatattcccgagctggatgcttttgagaacattactcctcgcaaactttaaatgccgagcactagcaggatcagagagagcattcacattgtttaaaaagcacggatacaaacccgacatggtgattttcaactcaatgctctccattttcacgaggaacaacatgtacgatcaagcagaggggattctcgagtctatccgcgaggatgggctaagcccggatcttgtaacctacaacagcctgatggacatgtacgtaagaagaggagagtgttggaaagccgaagaaatcctcaagactctagaaaaatcgcagttaaaaccggacctggtctcttacaacacggtgatcaaaggtttctgcagaagagggttgatgcaagaagcggttaggatgctgtctgagatgacagagcggggaatcagaccgtgcattttcacttacaacacgtttgtttcgggttacacggcgatgggaatgtttgcagagatagaagatgtgattgagtgcatggcgaagaatgattgcagaccaaatgagctgacttttaaaatggtagtagatggttattgcagagcagggaagtatagtgaagctatggattttgtgtccaagattaagacctttgatccttgcttcgatgatcagtctattcaacggcttgctctccgagtacgtgagaatttagaatcctaaatcaattatatatttttctttttttcttttgtagatttgggtttcttctttttttgtattgaatttatatttcattcactttaaattaatcaaaactttgaagatgaataactaaaagataataatacatgtttctactcttt

SEQ ID NO: 83733 - protein, 822 aa, Arabidopsis thaliana
  peptide (1)..(822): Ceres Seq. ID no. 12671549
  misc_feature (457)..(491): Pfam Name: PPR repeat Pfam Description: PPR repeat
  misc_feature (13)..(802): Homolog of NCBI NO: 15242557 NR Description: putative protein; protein id: At5g02860.1
  misc_feature (36)..(812): Homolog of NCBI NO: 34393454 NR Description: putative pentatricopeptide (PPR)
  misc_feature (111)..(743): Homolog of NCBI NO: 15221411 NR Description: hypothetical protein; protein id: At1g74850.1
  misc_feature (166)..(734): Homolog of NCBI NO: 15240891 NR Description: putative protein; protein id: At5g01110.1
  misc_feature (225)..(780): Homolog of NCBI NO: 15221691 NR Description: unknown protein; protein id: At1g63130.1
  misc_feature (225)..(780): Homolog of NCBI NO: 15221674 NR Description: unknown protein; protein id: At1g63080.1
  misc_feature (212)..(793): Homolog of NCBI NO: 34900768 NR Description: hypothetical protein~similar to Arabidopsis
  misc_feature (212)..(793): Homolog of NCBI NO: 33146978 NR Description: putative pentatricopeptide (PPR)
  misc_feature (209)..(797): Homolog of NCBI NO: 15241491 NR Description: putative protein; protein id: At5g14770.1
  misc_feature (149)..(792): Homolog of NCBI NO: 37572999 NR Description: putative fertility restorer homologue [Oryza
MDGALFPHKPPYPIQSKRPPPSQSSNQSIKFSSATLHLPPPSPPSFPLDSLLHHLVHLSSPPPRHSNSAAARFPSLEVSTDSSSSKPILGIEIENERNGSLKLLCKKEVVLVNSIVEQPLTGLSRFFDSVKSELLRTDLVSLVKGLDDSGHWERAVFLFEWLVLSSNSGALKLDHQVIEIFVRILGRESQYSVAAKLLDKIPLQEYLLDVRAYTTILHAYSRTGKYEKAIDLFERMKEMGPSPTLVTYNVILDVFGKMGRSWRKILGVLDEMRSKGLKFDEFTCSTVLSACAREGLLREAKEFFAELKSCGYEPGTVTYNALLQVFGKAGVYTEALSVLKEMEENSCPADSVTYNELVAAYVRAGFSKEAAGVIEMMTKKGVMPNAITYTTVIDAYGKAGKEDEALKLFYSMKEAGCVPNTCTYNAVLSLLGKKSRSNEMIKMLCDMKSNGCSPNRATWNTMLALCGNKGMDKFVNRVFREMKSCGFEPDRDTFNTLISAYGRCGSEVDASKMYGEMTRAGFNACVTTYNALLNALARKGDWRSGENVISDMKSKGFKPTETSYSLMLQCYAKGGNYLGIERIENRIKEGQIFPSWMLLRTLLLANFKCRALAGSERAFTLFKKHGYKPDMVIFNSMLSIFTRNNMYDQAEGILESIREDGLSPDLVTYNSLMDMYVRRGECWKAEEILKTLEKSQLKPDLVSYNTVIKGFCRRGLMQEAVRMLSEMTERGIRPCIFTYNTFVSGYTAMGMFAEIEDVIECMAKNDCRPNELTFKMVVDGYCRAGKYSEAMDFVSKIKTFDPCFDDQSIQRLALRVRENLES

SEQ ID NO: 83734 - protein, 587 aa, Arabidopsis thaliana
  peptide (1)..(587): Ceres Seq. ID no. 12671550
  misc_feature (222)..(256): Pfam Name: PPR repeat Pfam Description: PPR repeat
  misc_feature (1)..(567): Homolog of NCBI NO: 15242557 NR Description: putative protein; protein id: At5g02860.1
  misc_feature (1)..(577): Homolog of NCBI NO: 34393454 NR Description: putative pentatricopeptide (PPR)
  misc_feature (1)..(508): Homolog of NCBI NO: 15221411 NR Description: hypothetical protein; protein id: At1g74850.1
  misc_feature (1)..(499): Homolog of NCBI NO: 15240891 NR Description: putative protein; protein id: At5g01110.1
  misc_feature (1)..(545): Homolog of NCBI NO: 15221691 NR Description: unknown protein; protein id: At1g63130.1
  misc_feature (1)..(545): Homolog of NCBI NO: 15221674 NR Description: unknown protein; protein id: At1g63080.1
  misc_feature (1)..(558): Homolog of NCBI NO: 34900768 NR Description: hypothetical protein~similar to Arabidopsis
  misc_feature (1)..(558): Homolog of NCBI NO: 33146978 NR Description: putative pentatricopeptide (PPR)
  misc_feature (1)..(562): Homolog of NCBI NO: 15241491 NR Description: putative protein; protein id: At5g14770.1
  misc_feature (1)..(557): Homolog of NCBI NO: 37572999 NR Description: putative fertility restorer homologue [Oryza
MKEMGPSPTLVTYNVILDVFGKMGRSWRKILGVLDEMRSKGLKFDEFTCSTVLSACAREGLLREAKEFFAELKSCGYEPGTVTYNALLQVFGKAGVYTEALSVLKEMEENSCPADSVTYNELVAAYVRAGFSKEAAGVIEMMTKKGVMPNAITYTTVIDAYGKAGKEDEALKLFYSMKEAGCVPNTCTYNAVLSLLGKKSRSNEMIKMLCDMKSNGCSPNRATWNTMLALCGNKGMDKFVNRVFREMKSCGFEPDRDTFNTLISAYGRCGSEVDASKMYGEMTRAGFNACVTTYNALLNALARKGDWRSGENVISDMKSKGFKPTETSYSLMLQCYAKGGNYLGIERIENRIKEGQIFPSWMLLRTLLLANFKCRALAGSERAFTLFKKHGYKPDMVIFNSMLSIFTRNNMYDQAEGILESIREDGLSPDLVTYNSLMDMYVRRGECWKAEEILKTLEKSQLKPDLVSYNTVIKGFCRRGLMQEAVRMLSEMTERGIRPCIFTYNTFVSGYTAMGMFAEIEDVIECMAKNDCRPNELTFKMVVDGYCRAGKYSEAMDFVSKIKTFDPCFDDQSIQRLALRVRENLES

SEQ ID NO: 83735 - protein, 584 aa, Arabidopsis thaliana
  peptide (1)..(584): Ceres Seq. ID no. 12671551
  misc_feature (219)..(253): Pfam Name: PPR repeat Pfam Description: PPR repeat
  misc_feature (1)..(564): Homolog of NCBI NO: 15242557 NR Description: putative protein; protein id: At5g02860.1
  misc_feature (1)..(574): Homolog of NCBI NO: 34393454 NR Description: putative pentatricopeptide (PPR)
  misc_feature (1)..(505): Homolog of NCBI NO: 15221411 NR Description: hypothetical protein; protein id: At1g74850.1
  misc_feature (1)..(496): Homolog of NCBI NO: 15240891 NR Description: putative protein; protein id: At5g01110.1
  misc_feature (1)..(542): Homolog of NCBI NO: 15221691 NR Description: unknown protein; protein id: At1g63130.1
  misc_feature (1)..(542): Homolog of NCBI NO: 15221674 NR Description: unknown protein; protein id: At1g63080.1
  misc_feature (1)..(555): Homolog of NCBI NO: 34900768 NR Description: hypothetical protein~similar to Arabidopsis
  misc_feature (1)..(555): Homolog of NCBI NO: 33146978 NR Description: putative pentatricopeptide (PPR)
  misc_feature (1)..(559): Homolog of NCBI NO: 15241491 NR Description: putative protein; protein id: At5g14770.1
  misc_feature (1)..(554): Homolog of NCBI NO: 37572999 NR Description: putative fertility restorer homologue [Oryza
MGPSPTLVTYNVILDVFGKMGRSWRKILGVLDEMRSKGLKFDEFTCSTVLSACAREGLLREAKEFFAELKSCGYEPGTVTYNALLQVFGKAGVYTEALSVLKEMEENSCPADSVTYNELVAAYVRAGFSKEAAGVIEMMTKKGVMPNAITYTTVIDAYGKAGKEDEALKLFYSMKEAGCVPNTCTYNAVLSLLGKKSRSNEMIKMLCDMKSNGCSPNRATWNTMLALCGNKGMDKFVNRVFREMKSCGFEPDRDTFNTLISAYGRCGSEVDASKMYGEMTRAGFNACVTTYNALLNALARKGDWRSGENVISDMKSKGFKPTETSYSLMLQCYAKGGNYLGIERIENRIKEGQIFPSWMLLRTLLLANFKCRALAGSERAFTLFKKHGYKPDMVIFNSMLSIFTRNNMYDQAEGILESIREDGLSPDLVTYNSLMDMYVRRGECWKAEEILKTLEKSQLKPDLVSYNTVIKGFCRRGLMQEAVRMLSEMTERGIRPCIFTYNTFVSGYTAMGMFAEIEDVIECMAKNDCRPNELTFKMVVDGYCRAGKYSEAMDFVSKIKTFDPCFDDQSIQRLALRVRENLES

SEQ ID NO: 83736 - DNA, 1083 bp, Arabidopsis thaliana
  misc_feature (1)..(1083): Ceres Seq. ID no. 12671552
  misc_feature: MA Experiment ID: 20000306 Result: Up-regulated in Transcription
  misc_feature: MA Experiment 20000306 PARAMETER Experiment Name: At_Germinating_Seeds_Sub_P Parameter: Age (hr) Value: 6 vs. 0
  misc_feature: MA Experiment 20000306 PARAMETER Experiment Name: At_Germinating_Seeds_Sub_P Parameter: Organism Value: A. thaliana
  misc_feature: MA Experiment 20000306 PARAMETER Experiment Name: At_Germinating_Seeds_Sub_P Parameter: Plant Line Value: WS
  misc_feature: MA Experiment 20000306 PARAMETER Experiment Name: At_Germinating_Seeds_Sub_P Parameter: Tissue Value: Germinating Seeds
  misc_feature: MA Experiment ID: 20000307 Result: Up-regulated in Transcription
  misc_feature: MA Experiment 20000307 PARAMETER Experiment Name: At_Germinating_Seeds_Sub_P Parameter: Age (hr) Value: 24 vs. 0
  misc_feature: MA Experiment 20000307 PARAMETER Experiment Name: At_Germinating_Seeds_Sub_P Parameter: Organism Value: A. thaliana
  misc_feature: MA Experiment 20000307 PARAMETER Experiment Name: At_Germinating_Seeds_Sub_P Parameter: Plant Line Value: WS
  misc_feature: MA Experiment 20000307 PARAMETER Experiment Name: At_Germinating_Seeds_Sub_P Parameter: Tissue Value: Germinating Seeds
  misc_feature: MA Experiment ID: 20000314 Result: Up-regulated in Transcription
  misc_feature: MA Experiment 20000314 PARAMETER Experiment Name: At_14day_Shoots-Roots_Sub_P Parameter: Age (day) Value: 14
  misc_feature: MA Experiment 20000314 PARAMETER Experiment Name: At_14day_Shoots-Roots_Sub_P Parameter: Organism Value: A. thaliana
  misc_feature: MA Experiment 20000314 PARAMETER Experiment Name: At_14day_Shoots-Roots_Sub_P Parameter: Plant Line Value: WS
  misc_feature: MA Experiment 20000314 PARAMETER Experiment Name: At_14day_Shoots-Roots_Sub_P Parameter: Tissue Value: Roots vs. Whole Plant
  misc_feature: MA Experiment ID: 20000315 Result: Up-regulated in Transcription
  misc_feature: MA Experiment 20000315 PARAMETER Experiment Name: At_14day_Shoots-Roots_Sub_P Parameter: Age (day) Value: 14
  misc_feature: MA Experiment 20000315 PARAMETER Experiment Name: At_14day_Shoots-Roots_Sub_P Parameter: Organism Value: A. thaliana
  misc_feature: MA Experiment 20000315 PARAMETER Experiment Name: At_14day_Shoots-Roots_Sub_P Parameter: Plant Line Value: WS
  misc_feature: MA Experiment 20000315 PARAMETER Experiment Name: At_14day_Shoots-Roots_Sub_P Parameter: Tissue Value: Shoots vs. Whole Plant
atgaagaaccaaagcagcttctccattgttgctcttcttctcattttcttttcctcatctgtctttgctcagctgcagacaaatttttaccggaagtcatgtcctaacgtggaaactattgtccgcaatgccgtccgccaaaagttccagcagacttttgttacggctccggccaccctccgccttttcttccatgattgcttcgtccgtggatgtgatgcttcgatattgctggcatcaccatctgagaaggatcaccctgatgacaagtcactagccggagacgggtttgatacggtggcaaaggcaaagcaggcccttgatagggaccccaactgccgtaacaaagtctcatgcgctgacattttggctctcgccactcgtgacgtcgtcgttttgaccggaggaccgaactatccggtagagctagggaggagagacggcagactatcgacagtggctagcgttcaacacagtctaccccagcctagtttcaaattggaccaacttaacactatgttcgctcgtcacggtctatcccaaaccgatatgattgcactctcaggagcacatactataggattcgcacattgtggcaagttttcgaaaagaatttacaattttagtcctaaacgtccaattgatccgactttgaatattcgttacgccttacaattgagacaaatgtgccccattcgggtcgacttgaggatcgcaattaacatggatcctacttctccaaatacatttgacaatgcttatttcaaaaacctccaaaaagggatgggtttgttcacgtcagatcaagttttgttctctgatgaacgatctagatcaactgtcaattcatttgcttctagtgaagcaacttttagacaagcttttatttcggctataacgaagttgggtcgggttggagttaaaaccggtaacgcgggtgagataagacgggattgttcacgtgttaattagtgatttgttgtttcttttatttaagaaattttgcttcttcttttttaagatttgttttctgaattgtatggttctttgacgaaaaaaaaagaaaaaaagaagaattgtttc

SEQ ID NO: 83737 - protein, 323 aa, Arabidopsis thaliana
  peptide (1)..(323): Ceres Seq. ID no. 12671553
  misc_feature (41)..(287): Pfam Name: Peroxidase Pfam Description: Peroxidase
  misc_feature (1)..(323): Homolog of NCBI NO: 15224266 NR Description: peroxidase, putative; protein id: At2g18980.1 thaliana] >gi|25453203|sp|Q96518|PE16_ARATH Peroxidase 16 (Atperox P16) (ATP22a) >gi|7433071|pir||T01626 peroxidase (EC
  misc_feature (2)..(323): Homolog of NCBI NO: 1620369 NR Description: peroxidase ATP22a [Arabidopsis thaliana]
  misc_feature (3)..(323): Homolog of NCBI NO: 15234648 NR Description: peroxidase, putative; protein id: At4g30170.1, by cDNA: 152094., supported by cDNA: gi_13878042, supported by gi_17104672 [Arabidopsis thaliana]
  misc_feature (6)..(323): Homolog of NCBI NO: 14485511 NR Description: putative peroxidase [Solanum tuberosum]
  misc_feature (12)..(320): Homolog of NCBI NO: 4138647 NR Description: peroxidase [Trifolium repens]
  misc_feature (7)..(323): Homolog of NCBI NO: 28629828 NR Description: peroxidase 1 [Artemisia annua]
  misc_feature (10)..(320): Homolog of NCBI NO: 2117624 NR Description: peroxidase (EC 1.11.1.7) 2 precursor - alfalfa
  misc_feature (10)..(320): Homolog of NCBI NO: 13992528 NR Description: peroxidase2 [Medicago sativa]
  misc_feature (9)..(320): Homolog of NCBI NO: 7433086 NR Description: peroxidase (EC 1.11.1.7) pxdD precursor - alfalfa
  misc_feature (10)..(323): Homolog of NCBI NO: 15229646 NR Description: peroxidase, putative; protein id: At3g49960.1 thaliana] >gi|25453201|sp|Q96510|PE35_ARATH Peroxidase 35
MKNQSSFSIVALLLIFFSSSVFAQLQTNFYRKSCPNVETIVRNAVRQKFQQTFVTAPATLRLFFHDCFVRGCDASILLASPSEKDHPDDKSLAGDGFDTVAKAKQALDRDPNCRNKVSCADILALATRDVVVLTGGPNYPVELGRRDGRLSTVASVQHSLPQPSFKLDQLNTMFARHGLSQTDMIALSGAHTIGFAHCGKFSKRIYNFSPKRPIDPTLNIRYALQLRQMCPIRVDLRIAINMDPTSPNTFDNAYFKNLQKGMGLFTSDQVLFSDERSRSTVNSFASSEATFRQAFISAITKLGRVGVKTGNAGEIRRDCSRVN

SEQ ID NO: 83738 - DNA, 813 bp, Arabidopsis thaliana
  misc_feature (1)..(813): Ceres Seq. ID no. 12671578
  misc_feature: MA Experiment ID: 20000171 Result: Up-regulated in Transcription
  misc_feature: MA Experiment 20000171 PARAMETER Experiment Name: At_42deg_Heat_P Parameter: Age (day) Value: 14
  misc_feature: MA Experiment 20000171 PARAMETER Experiment Name: At_42deg_Heat_P Parameter: Organism Value: A. thaliana
  misc_feature: MA Experiment 20000171 PARAMETER Experiment Name: At_42deg_Heat_P Parameter: Plant Line Value: WS
  misc_feature: MA Experiment 20000171 PARAMETER Experiment Name: At_42deg_Heat_P Parameter: Temperature (deg C) Value: 42 vs. 22
  misc_feature: MA Experiment 20000171 PARAMETER Experiment Name: At_42deg_Heat_P Parameter: Timepoint (hr) Value: 1
  misc_feature: MA Experiment 20000171 PARAMETER Experiment Name: At_42deg_Heat_P Parameter: Tissue Value: Aerial
  misc_feature: MA Experiment ID: 20000173 Result: Up-regulated in Transcription
  misc_feature: MA Experiment 20000173 PARAMETER Experiment Name: At_42deg_Heat_P Parameter: Age (day) Value: 14
  misc_feature: MA Experiment 20000173 PARAMETER Experiment Name: At_42deg_Heat_P Parameter: Organism Value: A. thaliana
  misc_feature: MA Experiment 20000173 PARAMETER Experiment Name: At_42deg_Heat_P Parameter: Plant Line Value: WS
  misc_feature: MA Experiment 20000173 PARAMETER Experiment Name: At_42deg_Heat_P Parameter: Temperature (deg C) Value: 42 vs. 22
  misc_feature: MA Experiment 20000173 PARAMETER Experiment Name: At_42deg_Heat_P Parameter: Timepoint (hr) Value: 6
  misc_feature: MA Experiment 20000173 PARAMETER Experiment Name: At_42deg_Heat_P Parameter: Tissue Value: Aerial
  misc_feature: MA Experiment ID: 20000179 Result: Up-regulated in Transcription
  misc_feature: MA Experiment 20000179 PARAMETER Experiment Name: At_Germinating_Seeds_P Parameter: Age (hr) Value: 6 vs. 0
  misc_feature: MA Experiment 20000179 PARAMETER Experiment Name: At_Germinating_Seeds_P Parameter: Tissue Value: Germinating Seeds
  misc_feature: MA Experiment ID: 20000180 Result: Up-regulated in Transcription
  misc_feature: MA Experiment 20000180 PARAMETER Experiment Name: At_Germinating_Seeds_P Parameter: Age (hr) Value: 24 vs. 0
  misc_feature: MA Experiment 20000180 PARAMETER Experiment Name: At_Germinating_Seeds_P Parameter: Tissue Value: Germinating Seeds
  misc_feature: MA Experiment ID: 20000227 Result: Down-regulated in Transcription
  misc_feature: MA Experiment 20000227 PARAMETER Experiment Name: At_Root-Tips-vs-Tops_P Parameter: Tissue Value: Root Tips vs. Root Tops
  misc_feature: MA Experiment ID: 20000234 Result: Up-regulated in Transcription
  misc_feature: MA Experiment 20000234 PARAMETER Experiment Name: At_Siliques_P Parameter: Age (day) Value: 21
  misc_feature: MA Experiment 20000234 PARAMETER Experiment Name: At_Siliques_P Parameter: Organism Value: A. thaliana
  misc_feature: MA Experiment 20000234 PARAMETER Experiment Name: At_Siliques_P Parameter: Plant Line Value: WS
  misc_feature: MA Experiment 20000234 PARAMETER Experiment Name: At_Siliques_P Parameter: Tissue Value: Less Than 5mm Siliques vs. Whole Plant
  misc_feature: MA Experiment ID: 20000235 Result: Up-regulated in Transcription
  misc_feature: MA Experiment 20000235 PARAMETER Experiment Name: At_Siliques_P Parameter: Age (day) Value: 21
  misc_feature: MA Experiment 20000235 PARAMETER Experiment Name: At_Siliques_P Parameter: Organism Value: A. thaliana
  misc_feature: MA Experiment 20000235 PARAMETER Experiment Name: At_Siliques_P Parameter: Plant Line Value: WS
  misc_feature: MA Experiment 20000235 PARAMETER Experiment Name: At_Siliques_P Parameter: Tissue Value: 5-10mm Siliques vs. Whole Plant
  misc_feature: MA Experiment ID: 20000439 Result: Up-regulated in Transcription
  misc_feature: MA Experiment 20000439 PARAMETER Experiment Name: At_Roots__P Parameter: Age (day) Value: 14 vs. 21
  misc_feature: MA Experiment 20000439 PARAMETER Experiment Name: At_Roots__P Parameter: Organism Value: A. thaliana
  misc_feature: MA Experiment 20000439 PARAMETER Experiment Name: At_Roots__P Parameter: Tissue Value: Roots vs. Whole Plant
atggcgttagcgaataacttaacggcgatactcaacttactagcgttactctgttccataccaataacggcgtcaggtatatggctagcttcaaagccagacaacgagtgtgtcaatctcctccgttggcccgttgtcgtcctcggcgttctcatcctcgtcgtctccgccacaggcttcatcggcgcctacaagtacaaggaaactctactggcggtttacttgtgctgtatggcgatattgatcggacttttgctggtggttcttatatttgcattcgtcgtgacccggcccgatggatcgtatcgggttccgggtagaggttataaagagtataggcttgaagggttctcgaattggcttaaggagaacgttgtggattccaagaactggggaaggctaagggcttgtttggctgatactaatgtttgtcctaaactcaaccaagaattcatcaccgccgatcagttcttctcctcctctaagatcactcctctccagtccggctgctgcaaaccaccaaccgcatgtggctacaactttgtgaacccaacactgtggctaaatccaaccaatatggctgcagacgcagactgttacttatggagcaatgaccaaagccagctttgttacaattgcaactcatgcaaagctggtttattgggaaaccttagaaaagaatggcgtaaagcaaatctcatacttatcatcacagtcgttgttctcatatgggtttatgttattgcttgtagcgcgtttaggaatgctcagactgaggatctcttccgcaaatacaaacaaggttgggtctaa

SEQ ID NO: 83739 - protein, 270 aa, Arabidopsis thaliana
  peptide (1)..(270): Ceres Seq. ID no. 12671579
  misc_feature (3)..(242): Pfam Name: Tetraspanin family Pfam Description: Tetraspanin family
  misc_feature (1)..(270): Homolog of NCBI NO: 15224802 NR Description: putative senescence-associated protein 5; protein
  misc_feature (1)..(269): Homolog of NCBI NO: 15237490 NR Description: senescence-associated protein 5-like protein; id: At5g46700.1, supported by cDNA: gi_17979385 [Arabidopsis
  misc_feature (1)..(269): Homolog of NCBI NO: 17979386 NR Description: putative senescence-associated protein 5
  misc_feature (1)..(260): Homolog of NCBI NO: 15231187 NR Description: putative protein; protein id: At3g45600.1, by cDNA: 11427., supported by cDNA: gi_14423445 [Arabidopsis
  misc_feature (4)..(265): Homolog of NCBI NO: 20197174 NR Description: hypothetical protein [Arabidopsis thaliana]
  misc_feature (3)..(260): Homolog of NCBI NO: 29367553 NR Description: senescence-associated protein-like protein [Oryza
  misc_feature (3)..(266): Homolog of NCBI NO: 3551954 NR Description: senescence-associated protein 5 [Hemerocallis
  misc_feature (1)..(257): Homolog of NCBI NO: 15238641 NR Description: senescence-associated protein - like; protein id:
  misc_feature (4)..(255): Homolog of NCBI NO: 15234374 NR Description: senescence-associated protein -like; protein id: supported by cDNA: 39831., supported by cDNA: gi_17065395, by cDNA: gi_20148628 [Arabidopsis thaliana]
  misc_feature (4)..(262): Homolog of NCBI NO: 21537169 NR Description: senescence-associated protein-like protein
MALANNLTAILNLLALLCSIPITASGIWLASKPDNECVNLLRWPVVVLGVLILVVSATGFIGAYKYKETLLAVYLCCMAILIGLLLVVLIFAFVVTRPDGSYRVPGRGYKEYRLEGFSNWLKENVVDSKNWGRLRACLADTNVCPKLNQEFITADQFFSSSKITPLQSGCCKPPTACGYNFVNPTLWLNPTNMAADADCYLWSNDQSQLCYNCNSCKAGLLGNLRKEWRKANLILIITVVVLIWVYVIACSAFRNAQTEDLFRKYKQGWV

SEQ ID NO: 83740 - protein, 193 aa, Arabidopsis thaliana
  peptide (1)..(193): Ceres Seq. ID no. 12671580
  misc_feature (1)..(165): Pfam Name: Tetraspanin family Pfam Description: Tetraspanin family
  misc_feature (1)..(193): Homolog of NCBI NO: 15224802 NR Description: putative senescence-associated protein 5; protein
  misc_feature (1)..(192): Homolog of NCBI NO: 15237490 NR Description: senescence-associated protein 5-like protein; id: At5g46700.1, supported by cDNA: gi_17979385 [Arabidopsis
  misc_feature (1)..(192): Homolog of NCBI NO: 17979386 NR Description: putative senescence-associated protein 5
  misc_feature (1)..(183): Homolog of NCBI NO: 15231187 NR Description: putative protein; protein id: At3g45600.1, by cDNA: 11427., supported by cDNA: gi_14423445 [Arabidopsis
  misc_feature (1)..(188): Homolog of NCBI NO: 20197174 NR Description: hypothetical protein [Arabidopsis thaliana]
  misc_feature (1)..(183): Homolog of NCBI NO: 29367553 NR Description: senescence-associated protein-like protein [Oryza
  misc_feature (1)..(189): Homolog of NCBI NO: 3551954 NR Description: senescence-associated protein 5 [Hemerocallis
  misc_feature (1)..(180): Homolog of NCBI NO: 15238641 NR Description: senescence-associated protein - like; protein id:
  misc_feature (1)..(178): Homolog of NCBI NO: 15234374 NR Description: senescence-associated protein -like; protein id: supported by cDNA: 39831., supported by cDNA: gi_17065395, by cDNA: gi_20148628 [Arabidopsis thaliana]
  misc_feature (1)..(185): Homolog of NCBI NO: 21537169 NR Description: senescence-associated protein-like protein
MAILIGLLLVVLIFAFVVTRPDGSYRVPGRGYKEYRLEGFSNWLKENVVDSKNWGRLRACLADTNVCPKLNQEFITADQFFSSSKITPLQSGCCKPPTACGYNFVNPTLWLNPTNMAADADCYLWSNDQSQLCYNCNSCKAGLLGNLRKEWRKANLILIITVVVLIWVYVIACSAFRNAQTEDLFRKYKQGWV

SEQ ID NO: 83741 - DNA, 1059 bp, Arabidopsis thaliana
  misc_feature (1)..(1059): Ceres Seq. ID no. 12671585
  misc_feature: MA Experiment ID: 20000171 Result: Up-regulated in Transcription
  misc_feature: MA Experiment 20000171 PARAMETER Experiment Name: At_42deg_Heat_P Parameter: Age (day) Value: 14
  misc_feature: MA Experiment 20000171 PARAMETER Experiment Name: At_42deg_Heat_P Parameter: Organism Value: A. thaliana
  misc_feature: MA Experiment 20000171 PARAMETER Experiment Name: At_42deg_Heat_P Parameter: Plant Line Value: WS
  misc_feature: MA Experiment 20000171 PARAMETER Experiment Name: At_42deg_Heat_P Parameter: Temperature (deg C) Value: 42 vs. 22
  misc_feature: MA Experiment 20000171 PARAMETER Experiment Name: At_42deg_Heat_P Parameter: Timepoint (hr) Value: 1
  misc_feature: MA Experiment 20000171 PARAMETER Experiment Name: At_42deg_Heat_P Parameter: Tissue Value: Aerial
atgggactttataaaacgaagtccaaacgttcaattgctaactatcatcatatcataatcatcaatattttcatcctctcttcaatcacatcttcttccatggcttcttcttcttctccatcttccattgatttttcgactgcaattctaataagagttgatcaatcgggcaaaggagacttcagtaagattcaagaagcaattgaatctatccctcccaatctaaacaactctcaactctatttcatttgggttaagcctggaatttaccgagaaaaagtggtgatacctgcggagaaaccctacataacattgagtgggacacaagcttccaacacttttctcatatggagcgatggcgaagacattttggaatcacccactctcactatctttgcatccgattttgtatgccgatttctcactattcagaataagtttggaacggcgggacgtgcggttgcactgagggtggcggcggataaggcagcgttctacggatgcgtgataacgtcgtaccaagacactctccttgacgacaatggaaaccattacttcaagaactgctatattgaaggagccaccgatttcatttgtggaagcgcttcttctctatatgaaaggtgtcatttacactcgttgtcgccgaataatgggtctataacggcgcaaatgagaacgtcggccacagagaaatcaggctttacattcttgggatgcaagttaactggatcaggttccacatttttgggaagaccatggggagcttattctagggttgtctttgcttattccttcttctccaatgtcgtcgcacctcaaggatggaaccaatggggagattcaaccaaagaaaatactgtatattatggtgaatacaaatgttatggtcccggagcagacagggaacaaagagtagaatggtcaaaacagttatcggatgaagaagctaccgtcttcttgagcaaggactttatcggcggcaaagactggctccgacctgccccttctcacttcaagaatgctcccaaacaaacccaaaataaagaaattaattaa

SEQ ID NO: 83742 - protein, 352 aa, Arabidopsis thaliana
  peptide (1)..(352): Ceres Seq. ID no. 12671586
  misc_feature (53)..(329): Pfam Name: Pectinesterase Pfam Description: Pectinesterase
  misc_feature (1)..(352): Homolog of NCBI NO: 15226598 NR Description: pectinesterase family; protein id: At2g21610.1
  misc_feature (48)..(333): Homolog of NCBI NO: 34913006 NR Description: pectin methylesterase-like protein [Oryza sativa
  misc_feature (55)..(333): Homolog of NCBI NO: 15241163 NR Description: pectinesterase family; protein id: At5g19730.1, by cDNA: gi_17529289, supported by cDNA: gi_20465498 [Arabidopsis >gi|17529290|gb|AAL38872.1| putative pectin methylesterase
  misc_feature (45)..(333): Homolog of NCBI NO: 15228023 NR Description: pectinesterase family; protein id: At2g36710.1
  misc_feature (45)..(333): Homolog of NCBI NO: 27754550 NR Description: putative pectinesterase family protein
  misc_feature (50)..(334): Homolog of NCBI NO: 15238111 NR Description: pectinesterase family; protein id: At5g47500.1, by cDNA: gi_20856814 [Arabidopsis thaliana] AT5g47500/MNJ7_9 [Arabidopsis thaliana]
  misc_feature (50)..(338): Homolog of NCBI NO: 15240792 NR Description: pectinesterase family; protein id: At5g07430.1
  misc_feature (50)..(334): Homolog of NCBI NO: 9758778 NR Description: pectin methylesterase-like [Arabidopsis thaliana]
  misc_feature (51)..(334): Homolog of NCBI NO: 38345478 NR Description: OSJNBa0010H02.16 [Oryza sativa (japonica
  misc_feature (50)..(338): Homolog of NCBI NO: 15240781 NR Description: pectinesterase family; protein id: At5g07420.1,
MGLYKTKSKRSIANYHHIIIINIFILSSITSSSMASSSSPSSIDFSTAILIRVDQSGKGDFSKIQEAIESIPPNLNNSQLYFIWVKPGIYREKVVIPAEKPYITLSGTQASNTFLIWSDGEDILESPTLTIFASDFVCRFLTIQNKFGTAGRAVALRVAADKAAFYGCVITSYQDTLLDDNGNHYFKNCYIEGATDFICGSASSLYERCHLHSLSPNNGSITAQMRTSATEKSGFTFLGCKLTGSGSTFLGRPWGAYSRVVFAYSFFSNVVAPQGWNQWGDSTKENTVYYGEYKCYGPGADREQRVEWSKQLSDEEATVFLSKDFIGGKDWLRPAPSHFKNAPKQTQNKEIN

SEQ ID NO: 83743 - protein, 319 aa, Arabidopsis thaliana
  peptide (1)..(319): Ceres Seq. ID no. 12671587
  misc_feature (20)..(296): Pfam Name: Pectinesterase Pfam Description: Pectinesterase
  misc_feature (1)..(319): Homolog of NCBI NO: 15226598 NR Description: pectinesterase family; protein id: At2g21610.1
  misc_feature (15)..(300): Homolog of NCBI NO: 34913006 NR Description: pectin methylesterase-like protein [Oryza sativa
  misc_feature (22)..(300): Homolog of NCBI NO: 15241163 NR Description: pectinesterase family; protein id: At5g19730.1, by cDNA: gi_17529289, supported by cDNA: gi_20465498 [Arabidopsis >gi|17529290|gb|AAL38872.1| putative pectin methylesterase
  misc_feature (12)..(300): Homolog of NCBI NO: 15228023 NR Description: pectinesterase family; protein id: At2g36710.1
  misc_feature (12)..(300): Homolog of NCBI NO: 27754550 NR Description: putative pectinesterase family protein
  misc_feature (17)..(301): Homolog of NCBI NO: 15238111 NR Description: pectinesterase family; protein id: At5g47500.1, by cDNA: gi_20856814 [Arabidopsis thaliana] AT5g47500/MNJ7_9 [Arabidopsis thaliana]
  misc_feature (17)..(305): Homolog of NCBI NO: 15240792 NR Description: pectinesterase family; protein id: At5g07430.1
  misc_feature (17)..(301): Homolog of NCBI NO: 9758778 NR Description: pectin methylesterase-like [Arabidopsis thaliana]
  misc_feature (18)..(301): Homolog of NCBI NO: 38345478 NR Description: OSJNBa0010H02.16 [Oryza sativa (japonica
  misc_feature (17)..(305): Homolog of NCBI NO: 15240781 NR Description: pectinesterase family; protein id: At5g07420.1,
MASSSSPSSIDFSTAILIRVDQSGKGDFSKIQEAIESIPPNLNNSQLYFIWVKPGIYREKVVIPAEKPYITLSGTQASNTFLIWSDGEDILESPTLTIFASDFVCRFLTIQNKFGTAGRAVALRVAADKAAFYGCVITSYQDTLLDDNGNHYFKNCYIEGATDFICGSASSLYERCHLHSLSPNNGSITAQMRTSATEKSGFTFLGCKLTGSGSTFLGRPWGAYSRVVFAYSFFSNVVAPQGWNQWGDSTKENTVYYGEYKCYGPGADREQRVEWSKQLSDEEATVFLSKDFIGGKDWLRPAPSHFKNAPKQTQNKEIN

SEQ ID NO: 83744 - DNA, 951 bp, Arabidopsis thaliana
  misc_feature (1)..(951): Ceres Seq. ID no. 12671614
  misc_feature: MA Experiment ID: 20000184 Result: Up-regulated in Transcription
  misc_feature: MA Experiment 20000184 PARAMETER Experiment Name: At_Shoots__P Parameter: Age (day) Value: 7
  misc_feature: MA Experiment 20000184 PARAMETER Experiment Name: At_Shoots__P Parameter: Tissue Value: Shoots vs. Whole Plant
  misc_feature: MA Experiment ID: 20000185 Result: Up-regulated in Transcription
  misc_feature: MA Experiment 20000185 PARAMETER Experiment Name: At_Roots__P Parameter: Age (day) Value: 7 vs. 21
  misc_feature: MA Experiment 20000185 PARAMETER Experiment Name: At_Roots__P Parameter: Organism Value: A. thaliana
  misc_feature: MA Experiment 20000185 PARAMETER Experiment Name: At_Roots__P Parameter: Tissue Value: Roots vs. Whole Plant
  misc_feature: MA Experiment ID: 20000227 Result: Down-regulated in Transcription
  misc_feature: MA Experiment 20000227 PARAMETER Experiment Name: At_Root-Tips-vs-Tops_P Parameter: Tissue Value: Root Tips vs. Root Tops
  misc_feature: MA Experiment ID: 20000439 Result: Up-regulated in Transcription
  misc_feature: MA Experiment 20000439 PARAMETER Experiment Name: At_Roots__P Parameter: Age (day) Value: 14 vs. 21
  misc_feature: MA Experiment 20000439 PARAMETER Experiment Name: At_Roots__P Parameter: Organism Value: A. thaliana
  misc_feature: MA Experiment 20000439 PARAMETER Experiment Name: At_Roots__P Parameter: Tissue Value: Roots vs. Whole Plant
atggaacaaggagatcatcagcagcataagaaagaagaagaagctttgccaccgggtttcagatttcatccgacggatgaggagctaatctcatattacttggttaataagattgccgatcaaaacttcaccgggaaagcaatcgctgacgttgatcttaacaagtccgagccatgggagcttcctgagaaggcgaaaatgggaggaaaagaatggtacttttttagcctccgggaccggaagtacccgacgggagtgaggacgaatagggcgacgaatacaggatattggaaaaccacaggaaaagacaaagagatattcaatagcacaacctcggagttggtcgggatgaagaagactttggtcttttacagaggacgagctcctcgtggggagaagacttgttgggtcatgcatgagtatcgacttcactccaagtcctcatatagaacctccaagcaagacgagtgggtagtgtgtagagtgttcaagaaaacagaagcaaccaagaaatacataagcaccagtagcagcagcacaagtcatcaccacaacaaccacacaagagcctcaatactatcaaccaacaacaataatcctaattactcatcagacctccttcaactcccaccgcatctacaaccacacccgagcctcaatattaaccaatccctcatggcaaacgccgttcacctagctgagctctcaagagtcttccgtgcctctacaagcaccaccatggactcttctcatcagcagctaatgaactacacccacatgcctgtctcagggctcaacctcaaccttggcggtgcactggtccagccgcctcctgttgtgtctcttgaggatgttgccgcggttagtgcttcgtacaatggcgaaaacgggtttggaaatgtggagatgagccagtgcatggacttggatggatactggccatcttattga

SEQ ID NO: 83745 - protein, 316 aa, Arabidopsis thaliana
  peptide (1)..(316): Ceres Seq. ID no. 12671615
  misc_feature (16)..(144): Pfam Name: No apical meristem (NAM) protein Pfam Description: No apical meristem (NAM) protein
  misc_feature (1)..(316): Homolog of NCBI NO: 15224139 NR Description: NAM (no apical meristem)-like protein; protein At2g24430.1 [Arabidopsis thaliana] >gi|25352290|pir||E84636 NAM
  misc_feature (5)..(261): Homolog of NCBI NO: 1279640 NR Description: NAM [Petunia x hybrida]
  misc_feature (13)..(276): Homolog of NCBI NO: 15229637 NR Description: organ separation protein, putative; protein id: [Arabidopsis thaliana] >gi|11994103|dbj|BAB01106.1| contains to NAM (no apical meristem) protein~gene_id:MYF24.12 [Arabidopsis
  misc_feature (6)..(279): Homolog of NCBI NO: 15238882 NR Description: CUC2 (dbj|BAA19529.1); protein id: At5g53950.1 thaliana] >gi|1944132|dbj|BAA19529.1| CUC2 [Arabidopsis thaliana]
  misc_feature (10)..(244): Homolog of NCBI NO: 15223043 NR Description: unknown protein; protein id: At1g76420.1
  misc_feature (11)..(181): Homolog of NCBI NO: 11994506 NR Description: contains similarity to NAM (no apical meristem)
  misc_feature (11)..(181): Homolog of NCBI NO: 15232511 NR Description: NAM-like protein; protein id: At3g15170.1, by cDNA: gi_12060421 [Arabidopsis thaliana]
  misc_feature (13)..(167): Homolog of NCBI NO: 40737029 NR Description: putative OsNAC1 protein [Oryza sativa (japonica
MEQGDHQQHKKEEEALPPGFRFHPTDEELISYYLVNKIADQNFTGKAIADVDLNKSEPWELPEKAKMGGKEWYFFSLRDRKYPTGVRTNRATNTGYWKTTGKDKEIFNSTTSELVGMKKTLVFYRGRAPRGEKTCWVMHEYRLHSKSSYRTSKQDEWVVCRVFKKTEATKKYISTSSSSTSHHHNNHTRASILSTNNNNPNYSSDLLQLPPHLQPHPSLNINQSLMANAVHLAELSRVFRASTSTTMDSSHQQLMNYTHMPVSGLNLNLGGALVQPPPVVSLEDVAAVSASYNGENGFGNVEMSQCMDLDGYWPSY

SEQ ID NO: 83746 - protein, 250 aa, Arabidopsis thaliana
  peptide (1)..(250): Ceres Seq. ID no. 12671616
  misc_feature (1)..(78): Pfam Name: No apical meristem (NAM) protein Pfam Description: No apical meristem (NAM) protein
  misc_feature (1)..(250): Homolog of NCBI NO: 15224139 NR Description: NAM (no apical meristem)-like protein; protein At2g24430.1 [Arabidopsis thaliana] >gi|25352290|pir||E84636 NAM
  misc_feature (1)..(195): Homolog of NCBI NO: 1279640 NR Description: NAM [Petunia x hybrida]
  misc_feature (1)..(210): Homolog of NCBI NO: 15229637 NR Description: organ separation protein, putative; protein id: [Arabidopsis thaliana] >gi|11994103|dbj|BAB01106.1| contains to NAM (no apical meristem) protein~gene_id:MYF24.12 [Arabidopsis
  misc_feature (1)..(213): Homolog of NCBI NO: 15238882 NR Description: CUC2 (dbj|BAA19529.1); protein id: At5g53950.1 thaliana] >gi|1944132|dbj|BAA19529.1| CUC2 [Arabidopsis thaliana]
  misc_feature (1)..(178): Homolog of NCBI NO: 15223043 NR Description: unknown protein; protein id: At1g76420.1
  misc_feature (1)..(115): Homolog of NCBI NO: 11994506 NR Description: contains similarity to NAM (no apical meristem)
  misc_feature (1)..(115): Homolog of NCBI NO: 15232511 NR Description: NAM-like protein; protein id: At3g15170.1, by cDNA: gi_12060421 [Arabidopsis thaliana]
  misc_feature (1)..(101): Homolog of NCBI NO: 40737029 NR Description: putative OsNAC1 protein [Oryza sativa (japonica
MGGKEWYFFSLRDRKYPTGVRTNRATNTGYWKTTGKDKEIFNSTTSELVGMKKTLVFYRGRAPRGEKTCWVMHEYRLHSKSSYRTSKQDEWVVCRVFKKTEATKKYISTSSSSTSHHHNNHTRASILSTNNNNPNYSSDLLQLPPHLQPHPSLNINQSLMANAVHLAELSRVFRASTSTTMDSSHQQLMNYTHMPVSGLNLNLGGALVQPPPVVSLEDVAAVSASYNGENGFGNVEMSQCMDLDGYWPSY

SEQ ID NO: 83747 - protein, 200 aa, Arabidopsis thaliana
  peptide (1)..(200): Ceres Seq. ID no. 12671617
  misc_feature (1)..(200): Homolog of NCBI NO: 15224139 NR Description: NAM (no apical meristem)-like protein; protein At2g24430.1 [Arabidopsis thaliana] >gi|25352290|pir||E84636 NAM
  misc_feature (1)..(145): Homolog of NCBI NO: 1279640 NR Description: NAM [Petunia x hybrida]
  misc_feature (1)..(160): Homolog of NCBI NO: 15229637 NR Description: organ separation protein, putative; protein id: [Arabidopsis thaliana] >gi|11994103|dbj|BAB01106.1| contains to NAM (no apical meristem) protein~gene_id:MYF24.12 [Arabidopsis
  misc_feature (1)..(163): Homolog of NCBI NO: 15238882 NR Description: CUC2 (dbj|BAA19529.1); protein id: At5g53950.1 thaliana] >gi|1944132|dbj|BAA19529.1| CUC2 [Arabidopsis thaliana]
  misc_feature (1)..(128): Homolog of NCBI NO: 15223043 NR Description: unknown protein; protein id: At1g76420.1
  misc_feature (1)..(65): Homolog of NCBI NO: 11994506 NR Description: contains similarity to NAM (no apical meristem)
  misc_feature (1)..(65): Homolog of NCBI NO: 15232511 NR Description: NAM-like protein; protein id: At3g15170.1, by cDNA: gi_12060421 [Arabidopsis thaliana]
  misc_feature (1)..(51): Homolog of NCBI NO: 40737029 NR Description: putative OsNAC1 protein [Oryza sativa (japonica
MKKTLVFYRGRAPRGEKTCWVMHEYRLHSKSSYRTSKQDEWVVCRVFKKTEATKKYISTSSSSTSHHHNNHTRASILSTNNNNPNYSSDLLQLPPHLQPHPSLNINQSLMANAVHLAELSRVFRASTSTTMDSSHQQLMNYTHMPVSGLNLNLGGALVQPPPVVSLEDVAAVSASYNGENGFGNVEMSQCMDLDGYWPSY

SEQ ID NO: 83748 - DNA, 2607 bp, Arabidopsis thaliana
  misc_feature (1)..(2607): Ceres Seq. ID no. 12671636
  misc_feature: MA Experiment ID: 20000307 Result: Down-regulated in Transcription
  misc_feature: MA Experiment 20000307 PARAMETER Experiment Name: At_Germinating_Seeds_Sub_P Parameter: Age (hr) Value: 24 vs. 0
  misc_feature: MA Experiment 20000307 PARAMETER Experiment Name: At_Germinating_Seeds_Sub_P Parameter: Organism Value: A. thaliana
  misc_feature: MA Experiment 20000307 PARAMETER Experiment Name: At_Germinating_Seeds_Sub_P Parameter: Plant Line Value: WS
  misc_feature: MA Experiment 20000307 PARAMETER Experiment Name: At_Germinating_Seeds_Sub_P Parameter: Tissue Value: Germinating Seeds
  misc_feature: MA Experiment ID: 20000328 Result: Down-regulated in Transcription
  misc_feature: MA Experiment 20000328 PARAMETER Experiment Name: At_42deg_Heat_Sub_P Parameter: Age (day) Value: 14
  misc_feature: MA Experiment 20000328 PARAMETER Experiment Name: At_42deg_Heat_Sub_P Parameter: Organism Value: A. thaliana
  misc_feature: MA Experiment 20000328 PARAMETER Experiment Name: At_42deg_Heat_Sub_P Parameter: Plant Line Value: WS
  misc_feature: MA Experiment 20000328 PARAMETER Experiment Name: At_42deg_Heat_Sub_P Parameter: Temperature (deg C) Value: 42 vs. 22
  misc_feature: MA Experiment 20000328 PARAMETER Experiment Name: At_42deg_Heat_Sub_P Parameter: Timepoint (hr) Value: 6
  misc_feature: MA Experiment 20000328 PARAMETER Experiment Name: At_42deg_Heat_Sub_P Parameter: Tissue Value: Aerial
atgcgattcacaacgacaatatggcgacctccatctttggaaaatttcaaacccaagtttcgtatatacgcaaatggcgttgcccaagttcgaatctattgctttggtactgtatcatcctctcgtttatataatgcacacaacctgttcgacaaaagtcctggccgagatagggaaagttatataagcttgctttttgggttttctcgtgatggacgaactcaggaagcaaagagactcttcttgaatattcatcgtttggggatggagatggactgttctatcttttcctctgttttaaaggtttctgctactttatgtgatgagctttttggtagacagttgcattgccagtgtataaagtttgggtttttagatgatgtaagtgtgggaacatcgctggttgatacgtatatgaaaggtagtaactttaaggacggaaggaaagtttttgatgaaatgaaagagaggaatgttgttacttggactacattgataagcgggtatgctcggaattcgatgaatgatgaagttttgacattgtttatgagaatgcagaacgaagggactcagccgaactcatttacttttgcagctgctcttggagttttggctgaagaaggagtgggtgggaggggacttcaggtacatacagttgttgtaaagaacggtttagataaaacgattccggtttctaattctctgattaatctgtatctcaagtgtgggaatgttaggaaagctagaattttgtttgataaaacagaagtaaagagtgtggttacttggaatagtatgatttcgggatatgcagcgaacgggcttgatttagaagcgttgggaatgttttactctatgaggcttaattatgtgcggttatctgaatcgagctttgcttccgttatcaagctctgcgctaacctcaaagaactgaggtttacagaacagctccattgcagtgttgtaaaatacgggtttttgtttgatcagaatataaggacggctctaatggtagcgtatagtaaatgtacggcgatgcttgatgctcttaggctgttcaaagagataggatgcgtaggaaatgttgtgtcgtggacagcgatgattagtggtttcttgcagaatgatgggaaagaggaagcagtagatttattttctgaaatgaagaggaaaggtgttagaccaaacgaattcacttattctgtcattctcacagctcttcctgtgatttctccatcagaggtccacgcacaggttgtaaagactaactacgagagatcttcaactgttggaactgctcttttagatgcttatgtgaagttaggcaaagtagaagaggctgcaaaagtttttagcggtattgatgataaagacattgtggcttggtcagcgatgcttgcaggatatgctcagaccggagagacagaggcagctataaagatgtttggtgagctaacaaaaggagggataaaaccgaacgagttcacattctctagcatccttaacgtgtgtgcggctactaatgcgtctatgggacagggaaagcaattccacgggttcgctataaaatcaagactcgatagttctctgtgtgttagtagtgctcttctaaccatgtatgcaaagaaaggcaacatcgagagtgcggaagaagtctttaaaaggcagagagagaaagatctagtatcatggaattcgatgatctctgggtatgcacaacacgggcaagctatgaaggctctcgatgttttcaaggagatgaagaagagaaaggtgaaaatggatggtgtaacattcatcggagtatttgctgcttgtacacatgcggggttagtagaagaaggcgaaaaatatttcgatataatggtgagagactgcaagatagcacctacaaaggagcataatagttgtatggtggatctatacagccgagctgggcaacttgaaaaggctatgaaggtcatagaaaacatgccaaatccggctggttccaccatttggagaacaattctagctgcatgccgtgtgcacaagaaaacagagctagggagattagctgcagagaagatcattgcgatgaagccagaagattcagcggcatatgtattattgtctaacatgtatgcagagtcaggagattggcaagagagagccaaagtaaggaagctgatgaatgagaggaacgtgaagaaagaacctggttatagttggattgaggtcaagaacaagacttactcgttcttggcgggtgatcggtctcatcctctcaaagatcaaatctatatgaagctagaagatttaagtacacggctgaaggatttagggtatgagccagatacaagttatgtgcttcaagatattgatgatgagcataaagaagcagttcttgctcagcatagtgagagattagctattgctttcgggttgatagctacaccaaagggaagccctcttttgatcattaagaaccttagggtttgtggagattgtcatttagtgatcaaattaattgcaaagattgaagaaagagagatcgtagttagagattcaaatcggtttcatcactttagcagtgatggagtttgctcatgtggagacttttggtga

SEQ ID NO: 83749 - protein, 868 aa, Arabidopsis thaliana
  peptide (1)..(868): Ceres Seq. ID no. 12671637
  misc_feature (633)..(667): Pfam Name: PPR repeat Pfam Description: PPR repeat
  misc_feature (397)..(868): Homolog of NCBI NO: 20197649 NR Description: putative selenium-binding protein [Arabidopsis
  misc_feature (46)..(868): Homolog of NCBI NO: 15236324 NR Description: putative protein; protein id: At4g13650.1
  misc_feature (108)..(868): Homolog of NCBI NO: 34915012 NR Description: P0458A05.10 [Oryza sativa (japonica
  misc_feature (128)..(868): Homolog of NCBI NO: 15232837 NR Description: hypothetical protein; protein id: At3g02010.1 thaliana] >gi|6091739|gb|AAF03451.1|AC010797_27 hypothetical [Arabidopsis thaliana] >gi|6513930|gb|AAF14834.1|AC011664_16
  misc_feature (113)..(185): Homolog of NCBI NO: 15232837 NR Description: hypothetical protein; protein id: At3g02010.1 thaliana] >gi|6091739|gb|AAF03451.1|AC010797_27 hypothetical [Arabidopsis thaliana] >gi|6513930|gb|AAF14834.1|AC011664_16
  misc_feature (60)..(868): Homolog of NCBI NO: 15242550 NR Description: selenium-binding protein-like; protein id:
  misc_feature (91)..(868): Homolog of NCBI NO: 30693150 NR Description: pentatricopeptide (PPR) repeat-containing protein
  misc_feature (91)..(868): Homolog of NCBI NO: 15240583 NR Description: putative protein; protein id: At5g13230.1
  misc_feature (114)..(868): Homolog of NCBI NO: 15234831 NR Description: putative protein; protein id: At4g30700.1
  misc_feature (49)..(868): Homolog of NCBI NO: 18394615 NR Description: hypothetical protein; protein id: At1g18485.1
MRFTTTIWRPPSLENFKPKFRIYANGVAQVRIYCFGTVSSSRLYNAHNLFDKSPGRDRESYISLLFGFSRDGRTQEAKRLFLNIHRLGMEMDCSIFSSVLKVSATLCDELFGRQLHCQCIKFGFLDDVSVGTSLVDTYMKGSNFKDGRKVFDEMKERNVVTWTTLISGYARNSMNDEVLTLFMRMQNEGTQPNSFTFAAALGVLAEEGVGGRGLQVHTVVVKNGLDKTIPVSNSLINLYLKCGNVRKARILFDKTEVKSVVTWNSMISGYAANGLDLEALGMFYSMRLNYVRLSESSFASVIKLCANLKELRFTEQLHCSVVKYGFLFDQNIRTALMVAYSKCTAMLDALRLFKEIGCVGNVVSWTAMISGFLQNDGKEEAVDLFSEMKRKGVRPNEFTYSVILTALPVISPSEVHAQVVKTNYERSSTVGTALLDAYVKLGKVEEAAKVFSGIDDKDIVAWSAMLAGYAQTGETEAAIKMFGELTKGGIKPNEFTFSSILNVCAATNASMGQGKQFHGFAIKSRLDSSLCVSSALLTMYAKKGNIESAEEVFKRQREKDLVSWNSMISGYAQHGQAMKALDVFKEMKKRKVKMDGVTFIGVFAACTHAGLVEEGEKYFDIMVRDCKIAPTKEHNSCMVDLYSRAGQLEKAMKVIENMPNPAGSTIWRTILAACRVHKKTELGRLAAEKIIAMKPEDSAAYVLLSNMYAESGDWQERAKVRKLMNERNVKKEPGYSWIEVKNKTYSFLAGDRSHPLKDQIYMKLEDLSTRLKDLGYEPDTSYVLQDIDDEHKEAVLAQHSERLAIAFGLIATPKGSPLLIIKNLRVCGDCHLVIKLIAKIEEREIVVRDSNRFHHFSSDGVCSCGDFW

SEQ ID NO: 83750 - protein, 780 aa, Arabidopsis thaliana
  peptide (1)..(780): Ceres Seq. ID no. 12671638
  misc_feature (545)..(579): Pfam Name: PPR repeat Pfam Description: PPR repeat
  misc_feature (309)..(780): Homolog of NCBI NO: 20197649 NR Description: putative selenium-binding protein [Arabidopsis
  misc_feature (1)..(780): Homolog of NCBI NO: 15236324 NR Description: putative protein; protein id: At4g13650.1
  misc_feature (20)..(780): Homolog of NCBI NO: 34915012 NR Description: P0458A05.10 [Oryza sativa (japonica
  misc_feature (40)..(780): Homolog of NCBI NO: 15232837 NR Description: hypothetical protein; protein id: At3g02010.1 thaliana] >gi|6091739|gb|AAF03451.1|AC010797_27 hypothetical [Arabidopsis thaliana] >gi|6513930|gb|AAF14834.1|AC011664_16
  misc_feature (25)..(97): Homolog of NCBI NO: 15232837 NR Description: hypothetical protein; protein id: At3g02010.1 thaliana] >gi|6091739|gb|AAF03451.1|AC010797_27 hypothetical [Arabidopsis thaliana] >gi|6513930|gb|AAF14834.1|AC011664_16
  misc_feature (1)..(780): Homolog of NCBI NO: 15242550 NR Description: selenium-binding protein-like; protein id:
  misc_feature (3)..(780): Homolog of NCBI NO: 30693150 NR Description: pentatricopeptide (PPR) repeat-containing protein
  misc_feature (3)..(780): Homolog of NCBI NO: 15240583 NR Description: putative protein; protein id: At5g13230.1
  misc_feature (26)..(780): Homolog of NCBI NO: 15234831 NR Description: putative protein; protein id: At4g30700.1
  misc_feature (1)..(780): Homolog of NCBI NO: 18394615 NR Description: hypothetical protein; protein id: At1g18485.1
MEMDCSIFSSVLKVSATLCDELFGRQLHCQCIKFGFLDDVSVGTSLVDTYMKGSNFKDGRKVFDEMKERNVVTWTTLISGYARNSMNDEVLTLFMRMQNEGTQPNSFTFAAALGVLAEEGVGGRGLQVHTVVVKNGLDKTIPVSNSLINLYLKCGNVRKARILFDKTEVKSVVTWNSMISGYAANGLDLEALGMFYSMRLNYVRLSESSFASVIKLCANLKELRFTEQLHCSVVKYGFLFDQNIRTALMVAYSKCTAMLDALRLFKEIGCVGNVVSWTAMISGFLQNDGKEEAVDLFSEMKRKGVRPNEFTYSVILTALPVISPSEVHAQVVKTNYERSSTVGTALLDAYVKLGKVEEAAKVFSGIDDKDIVAWSAMLAGYAQTGETEAAIKMFGELTKGGIKPNEFTFSSILNVCAATNASMGQGKQFHGFAIKSRLDSSLCVSSALLTMYAKKGNIESAEEVFKRQREKDLVSWNSMISGYAQHGQAMKALDVFKEMKKRKVKMDGVTFIGVFAACTHAGLVEEGEKYFDIMVRDCKIAPTKEHNSCMVDLYSRAGQLEKAMKVIENMPNPAGSTIWRTILAACRVHKKTELGRLAAEKIIAMKPEDSAAYVLLSNMYAESGDWQERAKVRKLMNERNVKKEPGYSWIEVKNKTYSFLAGDRSHPLKDQIYMKLEDLSTRLKDLGYEPDTSYVLQDIDDEHKEAVLAQHSERLAIAFGLIATPKGSPLLIIKNLRVCGDCHLVIKLIAKIEEREIVVRDSNRFHHFSSDGVCSCGDFW

SEQ ID NO: 83751 - protein, 778 aa, Arabidopsis thaliana
  peptide (1)..(778): Ceres Seq. ID no. 12671639
  misc_feature (543)..(577): Pfam Name: PPR repeat Pfam Description: PPR repeat
  misc_feature (307)..(778): Homolog of NCBI NO: 20197649 NR Description: putative selenium-binding protein [Arabidopsis
  misc_feature (1)..(778): Homolog of NCBI NO: 15236324 NR Description: putative protein; protein id: At4g13650.1
  misc_feature (18)..(778): Homolog of NCBI NO: 34915012 NR Description: P0458A05.10 [Oryza sativa (japonica
  misc_feature (38)..(778): Homolog of NCBI NO: 15232837 NR Description: hypothetical protein; protein id: At3g02010.1 thaliana] >gi|6091739|gb|AAF03451.1|AC010797_27 hypothetical [Arabidopsis thaliana] >gi|6513930|gb|AAF14834.1|AC011664_16
  misc_feature (23)..(95): Homolog of NCBI NO: 15232837 NR Description: hypothetical protein; protein id: At3g02010.1 thaliana] >gi|6091739|gb|AAF03451.1|AC010797_27 hypothetical [Arabidopsis thaliana] >gi|6513930|gb|AAF14834.1|AC011664_16
  misc_feature (1)..(778): Homolog of NCBI NO: 15242550 NR Description: selenium-binding protein-like; protein id:
  misc_feature (1)..(778): Homolog of NCBI NO: 30693150 NR Description: pentatricopeptide (PPR) repeat-containing protein
  misc_feature (1)..(778): Homolog of NCBI NO: 15240583 NR Description: putative protein; protein id: At5g13230.1
  misc_feature (24)..(778): Homolog of NCBI NO: 15234831 NR Description: putative protein; protein id: At4g30700.1
  misc_feature (1)..(778): Homolog of NCBI NO: 18394615 NR Description: hypothetical protein; protein id: At1g18485.1
MDCSIFSSVLKVSATLCDELFGRQLHCQCIKFGFLDDVSVGTSLVDTYMKGSNFKDGRKVFDEMKERNVVTWTTLISGYARNSMNDEVLTLFMRMQNEGTQPNSFTFAAALGVLAEEGVGGRGLQVHTVVVKNGLDKTIPVSNSLINLYLKCGNVRKARILFDKTEVKSVVTWNSMISGYAANGLDLEALGMFYSMRLNYVRLSESSFASVIKLCANLKELRFTEQLHCSVVKYGFLFDQNIRTALMVAYSKCTAMLDALRLFKEIGCVGNVVSWTAMISGFLQNDGKEEAVDLFSEMKRKGVRPNEFTYSVILTALPVISPSEVHAQVVKTNYERSSTVGTALLDAYVKLGKVEEAAKVFSGIDDKDIVAWSAMLAGYAQTGETEAAIKMFGELTKGGIKPNEFTFSSILNVCAATNASMGQGKQFHGFAIKSRLDSSLCVSSALLTMYAKKGNIESAEEVFKRQREKDLVSWNSMISGYAQHGQAMKALDVFKEMKKRKVKMDGVTFIGVFAACTHAGLVEEGEKYFDIMVRDCKIAPTKEHNSCMVDLYSRAGQLEKAMKVIENMPNPAGSTIWRTILAACRVHKKTELGRLAAEKIIAMKPEDSAAYVLLSNMYAESGDWQERAKVRKLMNERNVKKEPGYSWIEVKNKTYSFLAGDRSHPLKDQIYMKLEDLSTRLKDLGYEPDTSYVLQDIDDEHKEAVLAQHSERLAIAFGLIATPKGSPLLIIKNLRVCGDCHLVIKLIAKIEEREIVVRDSNRFHHFSSDGVCSCGDFW

SEQ ID NO: 83752 - DNA, 2050 bp, Arabidopsis thaliana
  misc_feature (1)..(2050): Ceres Seq. ID no. 12671662
  misc_feature: MA Experiment ID: 20000169 Result: Up-regulated in Transcription
  misc_feature: MA Experiment 20000169 PARAMETER Experiment Name: At_100uM_ABA_P Parameter: Age (day) Value: 14
  misc_feature: MA Experiment 20000169 PARAMETER Experiment Name: At_100uM_ABA_P Parameter: Organism Value: A. thaliana
  misc_feature: MA Experiment 20000169 PARAMETER Experiment Name: At_100uM_ABA_P Parameter: Plant Line Value: WS
  misc_feature: MA Experiment 20000169 PARAMETER Experiment Name: At_100uM_ABA_P Parameter: Timepoint (hr) Value: 6
  misc_feature: MA Experiment 20000169 PARAMETER Experiment Name: At_100uM_ABA_P Parameter: Tissue Value: Aerial
  misc_feature: MA Experiment 20000169 PARAMETER Experiment Name: At_100uM_ABA_P Parameter: Treatment Value: 100uM ABA vs. No Treatment
  misc_feature: MA Experiment ID: 20000234 Result: Down-regulated in Transcription
  misc_feature: MA Experiment 20000234 PARAMETER Experiment Name: At_Siliques_P Parameter: Age (day) Value: 21
  misc_feature: MA Experiment 20000234 PARAMETER Experiment Name: At_Siliques_P Parameter: Organism Value: A. thaliana
  misc_feature: MA Experiment 20000234 PARAMETER Experiment Name: At_Siliques_P Parameter: Plant Line Value: WS
  misc_feature: MA Experiment 20000234 PARAMETER Experiment Name: At_Siliques_P Parameter: Tissue Value: Less Than 5mm Siliques vs. Whole Plant
  misc_feature: MA Experiment ID: 20000264 Result: Down-regulated in Transcription
  misc_feature: MA Experiment 20000264 PARAMETER Experiment Name: At_Open_Flower_P Parameter: Age (day) Value: 21
  misc_feature: MA Experiment 20000264 PARAMETER Experiment Name: At_Open_Flower_P Parameter: Plant Line Value: WS
  misc_feature: MA Experiment 20000264 PARAMETER Experiment Name: At_Open_Flower_P Parameter: Tissue Value: Open Flower vs. Whole Plant
  misc_feature: MA Experiment ID: 20000265 Result: Down-regulated in Transcription
  misc_feature: MA Experiment 20000265 PARAMETER Experiment Name: At_Open_Flower_P Parameter: Age (day) Value: 21
  misc_feature: MA Experiment 20000265 PARAMETER Experiment Name: At_Open_Flower_P Parameter: Plant Line Value: WS
  misc_feature: MA Experiment 20000265 PARAMETER Experiment Name: At_Open_Flower_P Parameter: Tissue Value: Closed Flower vs. Whole Plant
  misc_feature: MA Experiment ID: 20000268 Result: Down-regulated in Transcription
  misc_feature: MA Experiment 20000268 PARAMETER Experiment Name: At_100mM_NaCl__P Parameter: Age (day) Value: 14
  misc_feature: MA Experiment 20000268 PARAMETER Experiment Name: At_100mM_NaCl__P Parameter: Organism Value: A. thaliana
  misc_feature: MA Experiment 20000268 PARAMETER Experiment Name: At_100mM_NaCl__P Parameter: Plant Line Value: WS
  misc_feature: MA Experiment 20000268 PARAMETER Experiment Name: At_100mM_NaCl__P Parameter: Timepoint (hr) Value: 6
  misc_feature: MA Experiment 20000268 PARAMETER Experiment Name: At_100mM_NaCl__P Parameter: Tissue Value: Whole Plant
  misc_feature: MA Experiment 20000268 PARAMETER Experiment Name: At_100mM_NaCl__P Parameter: Treatment Value: 100mM NaCl vs. No Treatment
  misc_feature: MA Experiment ID: 20000286 Result: Down-regulated in Transcription
  misc_feature: MA Experiment 20000286 PARAMETER Experiment Name: At_Open_Flower_P Parameter: Age (day) Value: 21
  misc_feature: MA Experiment 20000286 PARAMETER Experiment Name: At_Open_Flower_P Parameter: Plant Line Value: WS
  misc_feature: MA Experiment 20000286 PARAMETER Experiment Name: At_Open_Flower_P Parameter: Tissue Value: Half Open vs. Whole Plant
  misc_feature: MA Experiment ID: 20000438 Result: Down-regulated in Transcription
  misc_feature: MA Experiment 20000438 PARAMETER Experiment Name: At_Shoots__P Parameter: Age (day) Value: 14
  misc_feature: MA Experiment 20000438 PARAMETER Experiment Name: At_Shoots__P Parameter: Tissue Value: Shoots vs. Whole Plant
  misc_feature: MA Experiment ID: 20000453 Result: Up-regulated in Transcription
  misc_feature: MA Experiment 20000453 PARAMETER Experiment Name: At_100uM_ABA_P Parameter: Age (day) Value: 15
  misc_feature: MA Experiment 20000453 PARAMETER Experiment Name: At_100uM_ABA_P Parameter: Organism Value: A. thaliana
  misc_feature: MA Experiment 20000453 PARAMETER Experiment Name: At_100uM_ABA_P Parameter: Plant Line Value: WS
  misc_feature: MA Experiment 20000453 PARAMETER Experiment Name: At_100uM_ABA_P Parameter: Timepoint (hr) Value: 24
  misc_feature: MA Experiment 20000453 PARAMETER Experiment Name: At_100uM_ABA_P Parameter: Tissue Value: Aerial
  misc_feature: MA Experiment 20000453 PARAMETER Experiment Name: At_100uM_ABA_P Parameter: Treatment Value: 100uM ABA vs. No Treatment
  misc_feature: MA Experiment ID: 20000794 Result: Down-regulated in Transcription
  misc_feature: MA Experiment 20000794 PARAMETER Experiment Name: At_Petals_P Parameter: Age (day) Value: 23-25 days
  misc_feature: MA Experiment 20000794 PARAMETER Experiment Name: At_Petals_P Parameter: Plant Line Value: WS
  misc_feature: MA Experiment 20000794 PARAMETER Experiment Name: At_Petals_P Parameter: Tissue Value: Petals vs. Whole plant
  misc_feature: MA Experiment ID: 20001247 Result: Up-regulated in Transcription
  misc_feature: MA Experiment 20001247 PARAMETER Experiment Name: At_Far-red-induction_P Parameter: Age (day) Value: 7
  misc_feature: MA Experiment 20001247 PARAMETER Experiment Name: At_Far-red-induction_P Parameter: Light Value: Far-red vs. White
  misc_feature: MA Experiment 20001247 PARAMETER Experiment Name: At_Far-red-induction_P Parameter: Organism Value: A. thaliana
  misc_feature: MA Experiment 20001247 PARAMETER Experiment Name: At_Far-red-induction_P Parameter: Plant Line Value: Columbia
  misc_feature: MA Experiment 20001247 PARAMETER Experiment Name: At_Far-red-induction_P Parameter: Timepoint (hr) Value: 1
  misc_feature: MA Experiment 20001247 PARAMETER Experiment Name: At_Far-red-induction_P Parameter: Tissue Value: Whole Plant
  misc_feature: MA Experiment ID: 20001248 Result: Up-regulated in Transcription
  misc_feature: MA Experiment 20001248 PARAMETER Experiment Name: At_Far-red-induction_P Parameter: Age (day) Value: 7
  misc_feature: MA Experiment 20001248 PARAMETER Experiment Name: At_Far-red-induction_P Parameter: Light Value: Far-red vs. White
  misc_feature: MA Experiment 20001248 PARAMETER Experiment Name: At_Far-red-induction_P Parameter: Organism Value: A. thaliana
  misc_feature: MA Experiment 20001248 PARAMETER Experiment Name: At_Far-red-induction_P Parameter: Plant Line Value: Columbia
  misc_feature: MA Experiment 20001248 PARAMETER Experiment Name: At_Far-red-induction_P Parameter: Timepoint (hr) Value: 4
  misc_feature: MA Experiment 20001248 PARAMETER Experiment Name: At_Far-red-induction_P Parameter: Tissue Value: Whole Plant
  misc_feature: MA Experiment ID: 20001450 Result: Up-regulated in Transcription
  misc_feature: MA Experiment 20001450 PARAMETER Experiment Name: At_Far-red-induction_P Parameter: Age (day) Value: 7
  misc_feature: MA Experiment 20001450 PARAMETER Experiment Name: At_Far-red-induction_P Parameter: Light Value: Far-red vs. White
  misc_feature: MA Experiment 20001450 PARAMETER Experiment Name: At_Far-red-induction_P Parameter: Organism Value: A. thaliana
  misc_feature: MA Experiment 20001450 PARAMETER Experiment Name: At_Far-red-induction_P Parameter: Plant Line Value: Columbia
  misc_feature: MA Experiment 20001450 PARAMETER Experiment Name: At_Far-red-induction_P Parameter: Timepoint (hr) Value: 8
  misc_feature: MA Experiment 20001450 PARAMETER Experiment Name: At_Far-red-induction_P Parameter: Tissue Value: Whole Plant
  misc_feature: MA Experiment ID: 20001451 Result: Up-regulated in Transcription
  misc_feature: MA Experiment 20001451 PARAMETER Experiment Name: At_Far-red-induction_P Parameter: Age (day) Value: 7
  misc_feature: MA Experiment 20001451 PARAMETER Experiment Name: At_Far-red-induction_P Parameter: Light Value: Far-red vs. White
  misc_feature: MA Experiment 20001451 PARAMETER Experiment Name: At_Far-red-induction_P Parameter: Organism Value: A. thaliana
  misc_feature: MA Experiment 20001451 PARAMETER Experiment Name: At_Far-red-induction_P Parameter: Plant Line Value: Columbia
  misc_feature: MA Experiment 20001451 PARAMETER Experiment Name: At_Far-red-induction_P Parameter: Timepoint (hr) Value: 24
  misc_feature: MA Experiment 20001451 PARAMETER Experiment Name: At_Far-red-induction_P Parameter: Tissue Value: Whole Plant
  misc_feature: MA Experiment ID: 20001557 Result: Up-regulated in Transcription
  misc_feature: MA Experiment 20001557 PARAMETER Experiment Name: At_Drought_Soil_Dry_P Parameter: Age (day) Value: 27
  misc_feature: MA Experiment 20001557 PARAMETER Experiment Name: At_Drought_Soil_Dry_P Parameter: Organism Value: A. thaliana
  misc_feature: MA Experiment 20001557 PARAMETER Experiment Name: At_Drought_Soil_Dry_P Parameter: Plant Line Value: WS
  misc_feature: MA Experiment 20001557 PARAMETER Experiment Name: At_Drought_Soil_Dry_P Parameter: Post Timepoint (hr) Value: 3
  misc_feature: MA Experiment 20001557 PARAMETER Experiment Name: At_Drought_Soil_Dry_P Parameter: Post-Treatment Value: Re-Water vs. No Drought
  misc_feature: MA Experiment 20001557 PARAMETER Experiment Name: At_Drought_Soil_Dry_P Parameter: Timepoint (day) Value: 13
  misc_feature: MA Experiment 20001557 PARAMETER Experiment Name: At_Drought_Soil_Dry_P Parameter: Treatment Value: Drought vs. No Drought
  misc_feature: MA Experiment ID: 20001558 Result: Up-regulated in Transcription
  misc_feature: MA Experiment 20001558 PARAMETER Experiment Name: At_Drought_Soil_Dry_P Parameter: Age (day) Value: 27
  misc_feature: MA Experiment 20001558 PARAMETER Experiment Name: At_Drought_Soil_Dry_P Parameter: Organism Value: A. thaliana
  misc_feature: MA Experiment 20001558 PARAMETER Experiment Name: At_Drought_Soil_Dry_P Parameter: Plant Line Value: WS
  misc_feature: MA Experiment 20001558 PARAMETER Experiment Name: At_Drought_Soil_Dry_P Parameter: Post Timepoint (hr) Value: 6
  misc_feature: MA Experiment 20001558 PARAMETER Experiment Name: At_Drought_Soil_Dry_P Parameter: Post-Treatment Value: Re-Water vs. No Drought
  misc_feature: MA Experiment 20001558 PARAMETER Experiment Name: At_Drought_Soil_Dry_P Parameter: Timepoint (day) Value: 13
  misc_feature: MA Experiment 20001558 PARAMETER Experiment Name: At_Drought_Soil_Dry_P Parameter: Treatment Value: Drought vs. No Drought
  misc_feature: MA Experiment ID: 20001911 Result: Up-regulated in Transcription
  misc_feature: MA Experiment 20001911 PARAMETER Experiment Name: At_Drought_Reproduction_P Parameter: Age (day) Value: 40
  misc_feature: MA Experiment 20001911 PARAMETER Experiment Name: At_Drought_Reproduction_P Parameter: Organism Value: A. thaliana
  misc_feature: MA Experiment 20001911 PARAMETER Experiment Name: At_Drought_Reproduction_P Parameter: Plant Line Value: WS
  misc_feature: MA Experiment 20001911 PARAMETER Experiment Name: At_Drought_Reproduction_P Parameter: Timepoint (day) Value: 10
  misc_feature: MA Experiment 20001911 PARAMETER Experiment Name: At_Drought_Reproduction_P Parameter: Tissue Value: Flowers
  misc_feature: MA Experiment 20001911 PARAMETER Experiment Name: At_Drought_Reproduction_P Parameter: Treatment Value: Drought vs. No Drought
acaatcagctctttgttccatactttacaattacatataaacaaattcccctattcctctgatctactttatagccctgagactctctttctgtactctaatcatttatctagctctctcattctcttattctggatcagccaagtttctccatttctcaatcaagaaaatcttgaaatactcaaatcttttcaagattcactttcaaagatatcttgataatagcctcaaactctggtttcaaagatgggaaacgacgagaccgtacgattcttgattcacttcttcaatggaagatggttcatggtgtttgcttcgtttctcatcatggcttgcgctggagccacctacctttttggtacttactctaaagatatcaaatctacacttggttacgatcagaccacgttgaacctcttaggtttctttaaagatcttggagcaaacgttggtgtcttgtccggtctaatagctgaggtcacaccgacttggttcgtcctcaccattggctcggcgatgaacttcgtcggttactttatgatctggcttaccgtaaccggcaaagtcgctaagccaaaggtttggcaaatgtgtctttatatttgtataggagccaactcgcagaactttgcaaacacaggagctttggttacttgtgttaagaatttccctgagagcagaggagttatgcttggtttgcttaagggttatgttggactaagtggtgcaatcttcacgcagctttattttgcgatctatggacacgattccaagtctttgatcttgttgatagcatggttgcctgctgcggtttctcttgtgtttgtgtatttgataagagagaagaaggttgtgaggcagaggaatgagcttagtgtgttttaccaattcctttatatttctatattcttggctttgttccttatggcaatgaacattgctgagaagcaagttcatttctcaaaagccgcttatgcggctagcgctacgatatgttgtgctttgctttttgtgcctcttacggtttccgttaagcaagagcttgaagtttggaacatgatgaagttacctatcgaagagccaagcgaggtcaaggttgagaaaccaaagaaagaacttgatcttgatcaggacaaagccgccaaggtgaatggagaagagaaggagacaaaatcttgtttctcgacggtgttttctccaccgccaagaggggaagattacacaatattacaagcattgttaagcaccgacatgataatcctatttgtcgcgacattctgtggtttaggatcgagcttgactgccgtagacaacctcgggcagataggagaatccctcggctacccgaaccacacggttagttcctttgtgtctctagtcagcatatggaactacttcggtcgagtgttctctggctttgtctcggaatacttacttgcaaagtataaattaccccggccgcttatgatgacattagtcctcttattgagttgtgctggccaccttctcatcgcgttcccggtaccaggctcggtatatatagcgtcaattctaatgggattctctttcggtgcacaacttcctctgctctttgccatcatctcagaactttttggactcaagtactactctacattgttcaattgtggacaacttgctagcccgctcgggtcttacatcctgaacgttcgtgtcacgggaatgctttacgataaagaggccttgaagcaactaacggctcgagggctaacccgaaaagacgtaaaggacttgacttgcttaggaagtcaatgttataagctgccgtttctgattttggcagcagtaacgttttttggagcacttgtatctttggggctagcgataaggacgagagagttttacaaaggtgatatttacaagaagtttagggagagtcctgagtccgagtctgaattagttcctgattcaagaaaagctgttgaatttgttggtaaataattatcacacaaattgtttttgttacttgaatcatagttgaataaattaatagaaaagagccgtttaattt

SEQ ID NO: 83753 - protein, 577 aa, Arabidopsis thaliana
  peptide (1)..(577): Ceres Seq. ID no. 12671663
  misc_feature (324)..(484): Pfam Name: Sugar (and other) transporter Pfam Description: Sugar (and other) transporter
  misc_feature (1)..(577): Homolog of NCBI NO: 15226338 NR Description: nodulin-like protein; protein id: At2g28120.1, by cDNA: gi_16209713, supported by cDNA: gi_17064921, supported
  misc_feature (11)..(564): Homolog of NCBI NO: 15225053 NR Description: nodulin-like protein; protein id: At2g39210.1,
  misc_feature (16)..(573): Homolog of NCBI NO: 34394606 NR Description: putative nodule-specific protein [Oryza sativa
  misc_feature (9)..(565): Homolog of NCBI NO: 3329366 NR Description: nodule-specific protein Nlj70 [Lotus japonicus]
  misc_feature (16)..(576): Homolog of NCBI NO: 37531482 NR Description: hypothetical protein [Oryza sativa (japonica group)] >gi|19881621|gb|AAM01022.1| Hypothetical protein [Oryza >gi|31430413|gb|AAP52330.1| hypothetical protein [Oryza sativa
  misc_feature (212)..(561): Homolog of NCBI NO: 34897160 NR Description: putative nodule-specific protein [Oryza sativa
  misc_feature (280)..(555): Homolog of NCBI NO: 18395988 NR Description: unknown protein; protein id: At3g01930.1 thaliana] >gi|6091732|gb|AAF03444.1|AC010797_20 unknown protein thaliana] >gi|6513938|gb|AAF14842.1|AC011664_24 unknown protein
  misc_feature (13)..(262): Homolog of NCBI NO: 18395988 NR Description: unknown protein; protein id: At3g01930.1 thaliana] >gi|6091732|gb|AAF03444.1|AC010797_20 unknown protein thaliana] >gi|6513938|gb|AAF14842.1|AC011664_24 unknown protein
  misc_feature (11)..(305): Homolog of NCBI NO: 15241312 NR Description: nodulin-like protein; protein id: At5g14120.1
  misc_feature (319)..(555): Homolog of NCBI NO: 15241312 NR Description: nodulin-like protein; protein id: At5g14120.1
MGNDETVRFLIHFFNGRWFMVFASFLIMACAGATYLFGTYSKDIKSTLGYDQTTLNLLGFFKDLGANVGVLSGLIAEVTPTWFVLTIGSAMNFVGYFMIWLTVTGKVAKPKVWQMCLYICIGANSQNFANTGALVTCVKNFPESRGVMLGLLKGYVGLSGAIFTQLYFAIYGHDSKSLILLIAWLPAAVSLVFVYLIREKKVVRQRNELSVFYQFLYISIFLALFLMAMNIAEKQVHFSKAAYAASATICCALLFVPLTVSVKQELEVWNMMKLPIEEPSEVKVEKPKKELDLDQDKAAKVNGEEKETKSCFSTVFSPPPRGEDYTILQALLSTDMIILFVATFCGLGSSLTAVDNLGQIGESLGYPNHTVSSFVSLVSIWNYFGRVFSGFVSEYLLAKYKLPRPLMMTLVLLLSCAGHLLIAFPVPGSVYIASILMGFSFGAQLPLLFAIISELFGLKYYSTLFNCGQLASPLGSYILNVRVTGMLYDKEALKQLTARGLTRKDVKDLTCLGSQCYKLPFLILAAVTFFGALVSLGLAIRTREFYKGDIYKKFRESPESESELVPDSRKAVEFVGK

SEQ ID NO: 83754 - protein, 558 aa, Arabidopsis thaliana
  peptide (1)..(558): Ceres Seq. ID no. 12671664
  misc_feature (305)..(465): Pfam Name: Sugar (and other) transporter Pfam Description: Sugar (and other) transporter
  misc_feature (1)..(558): Homolog of NCBI NO: 15226338 NR Description: nodulin-like protein; protein id: At2g28120.1, by cDNA: gi_16209713, supported by cDNA: gi_17064921, supported
  misc_feature (1)..(545): Homolog of NCBI NO: 15225053 NR Description: nodulin-like protein; protein id: At2g39210.1,
  misc_feature (1)..(554): Homolog of NCBI NO: 34394606 NR Description: putative nodule-specific protein [Oryza sativa
  misc_feature (1)..(546): Homolog of NCBI NO: 3329366 NR Description: nodule-specific protein Nlj70 [Lotus japonicus]
  misc_feature (1)..(557): Homolog of NCBI NO: 37531482 NR Description: hypothetical protein [Oryza sativa (japonica group)] >gi|19881621|gb|AAM01022.1| Hypothetical protein [Oryza >gi|31430413|gb|AAP52330.1| hypothetical protein [Oryza sativa
  misc_feature (193)..(542): Homolog of NCBI NO: 34897160 NR Description: putative nodule-specific protein [Oryza sativa
  misc_feature (261)..(536): Homolog of NCBI NO: 18395988 NR Description: unknown protein; protein id: At3g01930.1 thaliana] >gi|6091732|gb|AAF03444.1|AC010797_20 unknown protein thaliana] >gi|6513938|gb|AAF14842.1|AC011664_24 unknown protein
  misc_feature (1)..(243): Homolog of NCBI NO: 18395988 NR Description: unknown protein; protein id: At3g01930.1 thaliana] >gi|6091732|gb|AAF03444.1|AC010797_20 unknown protein thaliana] >gi|6513938|gb|AAF14842.1|AC011664_24 unknown protein
  misc_feature (1)..(286): Homolog of NCBI NO: 15241312 NR Description: nodulin-like protein; protein id: At5g14120.1
  misc_feature (300)..(536): Homolog of NCBI NO: 15241312 NR Description: nodulin-like protein; protein id: At5g14120.1
MVFASFLIMACAGATYLFGTYSKDIKSTLGYDQTTLNLLGFFKDLGANVGVLSGLIAEVTPTWFVLTIGSAMNFVGYFMIWLTVTGKVAKPKVWQMCLYICIGANSQNFANTGALVTCVKNFPESRGVMLGLLKGYVGLSGAIFTQLYFAIYGHDSKSLILLIAWLPAAVSLVFVYLIREKKVVRQRNELSVFYQFLYISIFLALFLMAMNIAEKQVHFSKAAYAASATICCALLFVPLTVSVKQELEVWNMMKLPIEEPSEVKVEKPKKELDLDQDKAAKVNGEEKETKSCFSTVFSPPPRGEDYTILQALLSTDMIILFVATFCGLGSSLTAVDNLGQIGESLGYPNHTVSSFVSLVSIWNYFGRVFSGFVSEYLLAKYKLPRPLMMTLVLLLSCAGHLLIAFPVPGSVYIASILMGFSFGAQLPLLFAIISELFGLKYYSTLFNCGQLASPLGSYILNVRVTGMLYDKEALKQLTARGLTRKDVKDLTCLGSQCYKLPFLILAAVTFFGALVSLGLAIRTREFYKGDIYKKFRESPESESELVPDSRKAVEFVGK

SEQ ID NO: 83755 - protein, 550 aa, Arabidopsis thaliana
  peptide (1)..(550): Ceres Seq. ID no. 12671665
  misc_feature (297)..(457): Pfam Name: Sugar (and other) transporter Pfam Description: Sugar (and other) transporter
  misc_feature (1)..(550): Homolog of NCBI NO: 15226338 NR Description: nodulin-like protein; protein id: At2g28120.1, by cDNA: gi_16209713, supported by cDNA: gi_17064921, supported
  misc_feature (1)..(537): Homolog of NCBI NO: 15225053 NR Description: nodulin-like protein; protein id: At2g39210.1,
  misc_feature (1)..(546): Homolog of NCBI NO: 34394606 NR Description: putative nodule-specific protein [Oryza sativa
  misc_feature (1)..(538): Homolog of NCBI NO: 3329366 NR Description: nodule-specific protein Nlj70 [Lotus japonicus]
  misc_feature (1)..(549): Homolog of NCBI NO: 37531482 NR Description: hypothetical protein [Oryza sativa (japonica group)] >gi|19881621|gb|AAM01022.1| Hypothetical protein [Oryza >gi|31430413|gb|AAP52330.1| hypothetical protein [Oryza sativa
  misc_feature (185)..(534): Homolog of NCBI NO: 34897160 NR Description: putative nodule-specific protein [Oryza sativa
  misc_feature (253)..(528): Homolog of NCBI NO: 18395988 NR Description: unknown protein; protein id: At3g01930.1 thaliana] >gi|6091732|gb|AAF03444.1|AC010797_20 unknown protein thaliana] >gi|6513938|gb|AAF14842.1|AC011664_24 unknown protein
  misc_feature (1)..(235): Homolog of NCBI NO: 18395988 NR Description: unknown protein; protein id: At3g01930.1 thaliana] >gi|6091732|gb|AAF03444.1|AC010797_20 unknown protein thaliana] >gi|6513938|gb|AAF14842.1|AC011664_24 unknown protein
  misc_feature (1)..(278): Homolog of NCBI NO: 15241312 NR Description: nodulin-like protein; protein id: At5g14120.1
  misc_feature (292)..(528): Homolog of NCBI NO: 15241312 NR Description: nodulin-like protein; protein id: At5g14120.1
MACAGATYLFGTYSKDIKSTLGYDQTTLNLLGFFKDLGANVGVLSGLIAEVTPTWFVLTIGSAMNFVGYFMIWLTVTGKVAKPKVWQMCLYICIGANSQNFANTGALVTCVKNFPESRGVMLGLLKGYVGLSGAIFTQLYFAIYGHDSKSLILLIAWLPAAVSLVFVYLIREKKVVRQRNELSVFYQFLYISIFLALFLMAMNIAEKQVHFSKAAYAASATICCALLFVPLTVSVKQELEVWNMMKLPIEEPSEVKVEKPKKELDLDQDKAAKVNGEEKETKSCFSTVFSPPPRGEDYTILQALLSTDMIILFVATFCGLGSSLTAVDNLGQIGESLGYPNHTVSSFVSLVSIWNYFGRVFSGFVSEYLLAKYKLPRPLMMTLVLLLSCAGHLLIAFPVPGSVYIASILMGFSFGAQLPLLFAIISELFGLKYYSTLFNCGQLASPLGSYILNVRVTGMLYDKEALKQLTARGLTRKDVKDLTCLGSQCYKLPFLILAAVTFFGALVSLGLAIRTREFYKGDIYKKFRESPESESELVPDSRKAVEFVGK

SEQ ID NO: 83756 - DNA, 2064 bp, Arabidopsis thaliana
  misc_feature (1)..(2064): Ceres Seq. ID no. 12671666
  misc_feature: MA Experiment ID: 20000185 Result: Up-regulated in Transcription
  misc_feature: MA Experiment 20000185 PARAMETER Experiment Name: At_Roots__P Parameter: Age (day) Value: 7 vs. 21
  misc_feature: MA Experiment 20000185 PARAMETER Experiment Name: At_Roots__P Parameter: Organism Value: A. thaliana
  misc_feature: MA Experiment 20000185 PARAMETER Experiment Name: At_Roots__P Parameter: Tissue Value: Roots vs. Whole Plant
  misc_feature: MA Experiment ID: 20000265 Result: Up-regulated in Transcription
  misc_feature: MA Experiment 20000265 PARAMETER Experiment Name: At_Open_Flower_P Parameter: Age (day) Value: 21
  misc_feature: MA Experiment 20000265 PARAMETER Experiment Name: At_Open_Flower_P Parameter: Plant Line Value: WS
  misc_feature: MA Experiment 20000265 PARAMETER Experiment Name: At_Open_Flower_P Parameter: Tissue Value: Closed Flower vs. Whole Plant
  misc_feature: MA Experiment ID: 20000439 Result: Up-regulated in Transcription
  misc_feature: MA Experiment 20000439 PARAMETER Experiment Name: At_Roots__P Parameter: Age (day) Value: 14 vs. 21
  misc_feature: MA Experiment 20000439 PARAMETER Experiment Name: At_Roots__P Parameter: Organism Value: A. thaliana
  misc_feature: MA Experiment 20000439 PARAMETER Experiment Name: At_Roots__P Parameter: Tissue Value: Roots vs. Whole Plant
  misc_feature: MA Experiment ID: 20000495 Result: Up-regulated in Transcription
  misc_feature: MA Experiment 20000495 PARAMETER Experiment Name: At_Guard_Cells_P Parameter: Harvest Date Value: 8/2/2002
  misc_feature: MA Experiment 20000495 PARAMETER Experiment Name: At_Guard_Cells_P Parameter: Organism Value: A. thaliana
  misc_feature: MA Experiment 20000495 PARAMETER Experiment Name: At_Guard_Cells_P Parameter: Tissue Value: Guard Cells vs. Leaves
  misc_feature: MA Experiment ID: 20000496 Result: Up-regulated in Transcription
  misc_feature: MA Experiment 20000496 PARAMETER Experiment Name: At_Guard_Cells_P Parameter: Harvest Date Value: 7/19/2002
  misc_feature: MA Experiment 20000496 PARAMETER Experiment Name: At_Guard_Cells_P Parameter: Organism Value: Canola
  misc_feature: MA Experiment 20000496 PARAMETER Experiment Name: At_Guard_Cells_P Parameter: Tissue Value: Guard Cells vs. Leaves
  misc_feature: MA Experiment ID: 20001248 Result: Down-regulated in Transcription
  misc_feature: MA Experiment 20001248 PARAMETER Experiment Name: At_Far-red-induction_P Parameter: Age (day) Value: 7
  misc_feature: MA Experiment 20001248 PARAMETER Experiment Name: At_Far-red-induction_P Parameter: Light Value: Far-red vs. White
  misc_feature: MA Experiment 20001248 PARAMETER Experiment Name: At_Far-red-induction_P Parameter: Organism Value: A. thaliana
  misc_feature: MA Experiment 20001248 PARAMETER Experiment Name: At_Far-red-induction_P Parameter: Plant Line Value: Columbia
  misc_feature: MA Experiment 20001248 PARAMETER Experiment Name: At_Far-red-induction_P Parameter: Timepoint (hr) Value: 4
  misc_feature: MA Experiment 20001248 PARAMETER Experiment Name: At_Far-red-induction_P Parameter: Tissue Value: Whole Plant
  misc_feature: MA Experiment ID: 20001450 Result: Down-regulated in Transcription
  misc_feature: MA Experiment 20001450 PARAMETER Experiment Name: At_Far-red-induction_P Parameter: Age (day) Value: 7
  misc_feature: MA Experiment 20001450 PARAMETER Experiment Name: At_Far-red-induction_P Parameter: Light Value: Far-red vs. White
  misc_feature: MA Experiment 20001450 PARAMETER Experiment Name: At_Far-red-induction_P Parameter: Organism Value: A. thaliana
  misc_feature: MA Experiment 20001450 PARAMETER Experiment Name: At_Far-red-induction_P Parameter: Plant Line Value: Columbia
  misc_feature: MA Experiment 20001450 PARAMETER Experiment Name: At_Far-red-induction_P Parameter: Timepoint (hr) Value: 8
  misc_feature: MA Experiment 20001450 PARAMETER Experiment Name: At_Far-red-induction_P Parameter: Tissue Value: Whole Plant
  misc_feature: MA Experiment ID: 20001911 Result: Down-regulated in Transcription
  misc_feature: MA Experiment 20001911 PARAMETER Experiment Name: At_Drought_Reproduction_P Parameter: Age (day) Value: 40
  misc_feature: MA Experiment 20001911 PARAMETER Experiment Name: At_Drought_Reproduction_P Parameter: Organism Value: A. thaliana
  misc_feature: MA Experiment 20001911 PARAMETER Experiment Name: At_Drought_Reproduction_P Parameter: Plant Line Value: WS
  misc_feature: MA Experiment 20001911 PARAMETER Experiment Name: At_Drought_Reproduction_P Parameter: Timepoint (day) Value: 10
  misc_feature: MA Experiment 20001911 PARAMETER Experiment Name: At_Drought_Reproduction_P Parameter: Tissue Value: Flowers
  misc_feature: MA Experiment 20001911 PARAMETER Experiment Name: At_Drought_Reproduction_P Parameter: Treatment Value: Drought vs. No Drought
attcattcacattacactgtagttttacctgtgaattctataaaaattctactctacttgtaatctggtctaatctaaacataacttgtttcaggttttagattcttgcactcttggaggttgagcttagttcgacatgaaggtctttatctaatctccactcgctggcaatgaagatgagagtggaaaccgcacttgcgatccttttggttctcatatcaattcaacaatgttatggaggtgtaagcaactatacatgtacgtgtttctcttcgggcaatcgaagtgatatcctggaatctaactgttccacatcatgtaattgcagaccagacagagatcaatgggtatgtttgtgtcctgcaaatggatttccggttatagccattggtggttcaaattcgtcatgcttcacttcatgcaactgctctgctggtgctacaaaatcttcaaagaagcaatatttatcgaggaaactcgttatagttatactactcttctgcggtgtactcatttcactagcattccttgcctctatgatttgttacatttgtagaaaggacaagttttctggacaaaccccttcagtctcttcagatagagaatctagctggcatagctctgctaacttaataaaccgtaaaagctcggtttcacaatcgaaaattagcatcagctcctcagtggcaggttgcttctttcagaatgcttctttgttttgtgtgagcaaacctgaaacaatccatggagctatctttcagttctcatacacagaattagagcaagcaaccaataaattctcaagtaacagtgtaataggacatggaggaagtagttgtgtttaccgtggacagctcaaagacggtaaaaccgctgcgatcaaacgtctaaatacccctaaaggagacgacactgacactctattctcaacagaggtagagttattatcaagactccatcattaccatgtggtaccgttaattggatattgttcggagtttcatggcaaacatgcagagaggcttctggtttttgagtacatgtcttatggaagtctaagagattgcttagatggagagttaggggagaaaatgacatggaacatccgaatctctgtcgctcttggagctgcaagaggacttgagtatcttcatgaagctgccgctccaagaatcttacaccgagatgtgaaatccacaaatattctccttgatgagaattggcatgcaaaaataacagatcttgggatggctaagtgtttgagtagcgatggtttacaaagcggttcaagctctccaaccacaggactacaaggaacatttggctactttgcacctgaatacgcaattgcaggatgtgcttcacagatgtcagatgttttcagctttggtgttgttctactcgagcttataaccggaaggaaaccgatacagaaaccaagcaacaacaaaggcgaagaaagcctagttatatgggctgtgccacggttacaagatagtaagcgggtgatcgaggaactgcctgatccgcggctaaacgggaagtttgcggaagaagagatgcagataatggcgtatcttgctaaagagtgtttgcttttggatccagaaagtagaccaacaatgagagaagttgttcagattctttcaaccatcacaccagacacatcatccagacgtagaaatttccccattaattatcttttccagagtaacgagaagaagaaagaaagcaaagtgggatggtcaagaggagggagcaagagtggacaggaagaggaaacagtggatctgactgagccacggttcgagtcattctgcttgccgaatgtgaagccggtcttgcttgaaccatctgcacatatttaaaaagtagatagaaaagcacagaacaaaaactgccatttcgcactgtgtagataaaaagctcactctgacgagagtgaagcgttgagacttgagagtttactacaagtgagagtgtcaagatttgttctaaactagaggacttttaattgataattttaataaatatatttaacaaaatgtacacaagagttattat

SEQ ID NO: 83757 - protein, 565 aa, Arabidopsis thaliana
  peptide (1)..(565): Ceres Seq. ID no. 12671667
  misc_feature (1)..(565): Homolog of NCBI NO: 30683822 NR Description: protein kinase family [Arabidopsis thaliana] putative protein kinase [Arabidopsis thaliana]
  misc_feature (52)..(513): Homolog of NCBI NO: 25407968 NR Description: probable protein kinase [imported] - Arabidopsis >gi|4803956|gb|AAD29828.1| putative protein kinase [Arabidopsis
  misc_feature (1)..(52): Homolog of NCBI NO: 25407968 NR Description: probable protein kinase [imported] - Arabidopsis >gi|4803956|gb|AAD29828.1| putative protein kinase [Arabidopsis
  misc_feature (74)..(494): Homolog of NCBI NO: 15218591 NR Description: protein kinase, putative; protein id: At1g10620.1
  misc_feature (112)..(523): Homolog of NCBI NO: 15240947 NR Description: putative protein; protein id: At5g38560.1, by cDNA: gi_15983496, supported by cDNA: gi_18700152 [Arabidopsis >gi|10176824|dbj|BAB10146.1| contains similarity to protein
  misc_feature (192)..(495): Homolog of NCBI NO: 7488203 NR Description: probable serine/threonine-specific protein kinase
  misc_feature (192)..(495): Homolog of NCBI NO: 30679031 NR Description: protein kinase family [Arabidopsis thaliana]
  misc_feature (199)..(495): Homolog of NCBI NO: 34902828 NR Description: unnamed protein product [Oryza sativa (japonica group)] >gi|6498464|dbj|BAA87853.1| unnamed protein product
  misc_feature (198)..(523): Homolog of NCBI NO: 15221470 NR Description: protein kinase, putative; protein id: supported by cDNA: gi_21280864 [Arabidopsis thaliana]
  misc_feature (198)..(495): Homolog of NCBI NO: 34894174 NR Description: putative protein kinase [Oryza sativa (japonica group)] >gi|13486635|dbj|BAB39873.1| putative protein kinase
MKMRVETALAILLVLISIQQCYGGVSNYTCTCFSSGNRSDILESNCSTSCNCRPDRDQWVCLCPANGFPVIAIGGSNSSCFTSCNCSAGATKSSKKQYLSRKLVIVILLFCGVLISLAFLASMICYICRKDKFSGQTPSVSSDRESSWHSSANLINRKSSVSQSKISISSSVAGCFFQNASLFCVSKPETIHGAIFQFSYTELEQATNKFSSNSVIGHGGSSCVYRGQLKDGKTAAIKRLNTPKGDDTDTLFSTEVELLSRLHHYHVVPLIGYCSEFHGKHAERLLVFEYMSYGSLRDCLDGELGEKMTWNIRISVALGAARGLEYLHEAAAPRILHRDVKSTNILLDENWHAKITDLGMAKCLSSDGLQSGSSSPTTGLQGTFGYFAPEYAIAGCASQMSDVFSFGVVLLELITGRKPIQKPSNNKGEESLVIWAVPRLQDSKRVIEELPDPRLNGKFAEEEMQIMAYLAKECLLLDPESRPTMREVVQILSTITPDTSSRRRNFPINYLFQSNEKKKESKVGWSRGGSKSGQEEETVDLTEPRFESFCLPNVKPVLLEPSAHI

SEQ ID NO: 83758 - protein, 563 aa, Arabidopsis thaliana
  peptide (1)..(563): Ceres Seq. ID no. 12671668
  misc_feature (1)..(563): Homolog of NCBI NO: 30683822 NR Description: protein kinase family [Arabidopsis thaliana] putative protein kinase [Arabidopsis thaliana]
  misc_feature (50)..(511): Homolog of NCBI NO: 25407968 NR Description: probable protein kinase [imported] - Arabidopsis >gi|4803956|gb|AAD29828.1| putative protein kinase [Arabidopsis
  misc_feature (1)..(50): Homolog of NCBI NO: 25407968 NR Description: probable protein kinase [imported] - Arabidopsis >gi|4803956|gb|AAD29828.1| putative protein kinase [Arabidopsis
  misc_feature (72)..(492): Homolog of NCBI NO: 15218591 NR Description: protein kinase, putative; protein id: At1g10620.1
  misc_feature (110)..(521): Homolog of NCBI NO: 15240947 NR Description: putative protein; protein id: At5g38560.1, by cDNA: gi_15983496, supported by cDNA: gi_18700152 [Arabidopsis >gi|10176824|dbj|BAB10146.1| contains similarity to protein
  misc_feature (190)..(493): Homolog of NCBI NO: 7488203 NR Description: probable serine/threonine-specific protein kinase
  misc_feature (190)..(493): Homolog of NCBI NO: 30679031 NR Description: protein kinase family [Arabidopsis thaliana]
  misc_feature (197)..(493): Homolog of NCBI NO: 34902828 NR Description: unnamed protein product [Oryza sativa (japonica group)] >gi|6498464|dbj|BAA87853.1| unnamed protein product
  misc_feature (196)..(521): Homolog of NCBI NO: 15221470 NR Description: protein kinase, putative; protein id: supported by cDNA: gi_21280864 [Arabidopsis thaliana]
  misc_feature (196)..(493): Homolog of NCBI NO: 34894174 NR Description: putative protein kinase [Oryza sativa (japonica group)] >gi|13486635|dbj|BAB39873.1| putative protein kinase
MRVETALAILLVLISIQQCYGGVSNYTCTCFSSGNRSDILESNCSTSCNCRPDRDQWVCLCPANGFPVIAIGGSNSSCFTSCNCSAGATKSSKKQYLSRKLVIVILLFCGVLISLAFLASMICYICRKDKFSGQTPSVSSDRESSWHSSANLINRKSSVSQSKISISSSVAGCFFQNASLFCVSKPETIHGAIFQFSYTELEQATNKFSSNSVIGHGGSSCVYRGQLKDGKTAAIKRLNTPKGDDTDTLFSTEVELLSRLHHYHVVPLIGYCSEFHGKHAERLLVFEYMSYGSLRDCLDGELGEKMTWNIRISVALGAARGLEYLHEAAAPRILHRDVKSTNILLDENWHAKITDLGMAKCLSSDGLQSGSSSPTTGLQGTFGYFAPEYAIAGCASQMSDVFSFGVVLLELITGRKPIQKPSNNKGEESLVIWAVPRLQDSKRVIEELPDPRLNGKFAEEEMQIMAYLAKECLLLDPESRPTMREVVQILSTITPDTSSRRRNFPINYLFQSNEKKKESKVGWSRGGSKSGQEEETVDLTEPRFESFCLPNVKPVLLEPSAHI

SEQ ID NO: 83759 - protein, 443 aa, Arabidopsis thaliana
  peptide (1)..(443): Ceres Seq. ID no. 12671669
  misc_feature (1)..(443): Homolog of NCBI NO: 30683822 NR Description: protein kinase family [Arabidopsis thaliana] putative protein kinase [Arabidopsis thaliana]
  misc_feature (1)..(391): Homolog of NCBI NO: 25407968 NR Description: probable protein kinase [imported] - Arabidopsis >gi|4803956|gb|AAD29828.1| putative protein kinase [Arabidopsis
  misc_feature (1)..(372): Homolog of NCBI NO: 15218591 NR Description: protein kinase, putative; protein id: At1g10620.1
  misc_feature (1)..(401): Homolog of NCBI NO: 15240947 NR Description: putative protein; protein id: At5g38560.1, by cDNA: gi_15983496, supported by cDNA: gi_18700152 [Arabidopsis >gi|10176824|dbj|BAB10146.1| contains similarity to protein
  misc_feature (70)..(373): Homolog of NCBI NO: 7488203 NR Description: probable serine/threonine-specific protein kinase
  misc_feature (70)..(373): Homolog of NCBI NO: 30679031 NR Description: protein kinase family [Arabidopsis thaliana]
  misc_feature (77)..(373): Homolog of NCBI NO: 34902828 NR Description: unnamed protein product [Oryza sativa (japonica group)] >gi|6498464|dbj|BAA87853.1| unnamed protein product
  misc_feature (76)..(401): Homolog of NCBI NO: 15221470 NR Description: protein kinase, putative; protein id: supported by cDNA: gi_21280864 [Arabidopsis thaliana]
  misc_feature (76)..(373): Homolog of NCBI NO: 34894174 NR Description: putative protein kinase [Oryza sativa (japonica group)] >gi|13486635|dbj|BAB39873.1| putative protein kinase
  misc_feature (76)..(372): Homolog of NCBI NO: 15223161 NR Description: putative protein kinase; protein id: At1g70460.1
MICYICRKDKFSGQTPSVSSDRESSWHSSANLINRKSSVSQSKISISSSVAGCFFQNASLFCVSKPETIHGAIFQFSYTELEQATNKFSSNSVIGHGGSSCVYRGQLKDGKTAAIKRLNTPKGDDTDTLFSTEVELLSRLHHYHVVPLIGYCSEFHGKHAERLLVFEYMSYGSLRDCLDGELGEKMTWNIRISVALGAARGLEYLHEAAAPRILHRDVKSTNILLDENWHAKITDLGMAKCLSSDGLQSGSSSPTTGLQGTFGYFAPEYAIAGCASQMSDVFSFGVVLLELITGRKPIQKPSNNKGEESLVIWAVPRLQDSKRVIEELPDPRLNGKFAEEEMQIMAYLAKECLLLDPESRPTMREVVQILSTITPDTSSRRRNFPINYLFQSNEKKKESKVGWSRGGSKSGQEEETVDLTEPRFESFCLPNVKPVLLEPSAHI

SEQ ID NO: 83760 - DNA, 885 bp, Arabidopsis thaliana
  misc_feature (1)..(885): Ceres Seq. ID no. 12671678
  misc_feature: MA Experiment ID: 20000184 Result: Down-regulated in Transcription
  misc_feature: MA Experiment 20000184 PARAMETER Experiment Name: At_Shoots__P Parameter: Age (day) Value: 7
  misc_feature: MA Experiment 20000184 PARAMETER Experiment Name: At_Shoots__P Parameter: Tissue Value: Shoots vs. Whole Plant
  misc_feature: MA Experiment ID: 20000214 Result: Down-regulated in Transcription
  misc_feature: MA Experiment 20000214 PARAMETER Experiment Name: At_4deg_Cold_P Parameter: Timepoint (hr) Value: 6
  misc_feature: MA Experiment ID: 20001911 Result: Up-regulated in Transcription
  misc_feature: MA Experiment 20001911 PARAMETER Experiment Name: At_Drought_Reproduction_P Parameter: Age (day) Value: 40
  misc_feature: MA Experiment 20001911 PARAMETER Experiment Name: At_Drought_Reproduction_P Parameter: Organism Value: A. thaliana
  misc_feature: MA Experiment 20001911 PARAMETER Experiment Name: At_Drought_Reproduction_P Parameter: Plant Line Value: WS
  misc_feature: MA Experiment 20001911 PARAMETER Experiment Name: At_Drought_Reproduction_P Parameter: Timepoint (day) Value: 10
  misc_feature: MA Experiment 20001911 PARAMETER Experiment Name: At_Drought_Reproduction_P Parameter: Tissue Value: Flowers
  misc_feature: MA Experiment 20001911 PARAMETER Experiment Name: At_Drought_Reproduction_P Parameter: Treatment Value: Drought vs. No Drought
atggatggggtgggtgaaagttcgactcaaaatgaggtagaagagaagcctgtgattgttagagttaagcgaaaagttggacagtctctgctcgatgctttctgtccttctgtggcagaggatgtgaaaccgaagaaggtgctagtgcggcatttggagacagttacggactctgaaaccacagctgatattatccactctttctttagaaaggaacagcgcctgaccaaatctgtacaaaagcaacagattgcttcagagaatgctcggtttgagcaaatatggcggagtaggaagggaaacaaggaaggcatccatgagaagtgtcatttctttgacgttattcgtgttgatactgaagaaagacgagacaatgcacaagagtttacatccctggaggaccagaaaatgctcgctagtttcttgcctctccttagagaatgtattccaacagcagctgaagagattgaagctgatatacaatctagtcacaccgaagaatacgtttatgattattatgctgtgaacgaagagatggatatcagcgaagatagttccaagaatcagtttcctcttgtcatagtagaggatgaagaagaattctgtgatggatctgatgaatcagactacgactctgaagattcaaacgctgaagatcatccaaagactgattacccagaggaggaagaagaagaagaagaagaagatgatgatgatgatgatgatgatgaatcagaagaagaaaagagtgaagcctctgatgaatcagacgacgaggagacttcaaaacgacatgtgagaagtgtccttggagatgacgagtttgatgattacgcagaggatgtgtatggttacagcgagagcgatgaggagtttgagtcttag

SEQ ID NO: 83761 - protein, 294 aa, Arabidopsis thaliana
  peptide (1)..(294): Ceres Seq. ID no. 12671679
  misc_feature (70)..(293): Pfam Name: Mpp10 protein Pfam Description: Mpp10 protein
  misc_feature (1)..(294): Homolog of NCBI NO: 25408058 NR Description: hypothetical protein At2g30280 [imported] - thaliana >gi|2347194|gb|AAC16933.1| hypothetical protein
  misc_feature (70)..(294): Homolog of NCBI NO: 30684530 NR Description: expressed protein [Arabidopsis thaliana] unknown protein [Arabidopsis thaliana]
  misc_feature (36)..(93): Homolog of NCBI NO: 30684530 NR Description: expressed protein [Arabidopsis thaliana] unknown protein [Arabidopsis thaliana]
  misc_feature (154)..(291): Homolog of NCBI NO: 23509612 NR Description: hypothetical protein [Plasmodium falciparum 3D7]
  misc_feature (154)..(293): Homolog of NCBI NO: 9631239 NR Description: orf 48 [Ateline herpesvirus 3]
  misc_feature (154)..(293): Homolog of NCBI NO: 9631239 NR Description: orf 48 [Ateline herpesvirus 3]
  misc_feature (196)..(293): Homolog of NCBI NO: 23509612 NR Description: hypothetical protein [Plasmodium falciparum 3D7]
  misc_feature (154)..(293): Homolog of NCBI NO: 30348551 NR Description: hypothetical protein [Saimiriine herpesvirus 2]
  misc_feature (182)..(291): Homolog of NCBI NO: 23509612 NR Description: hypothetical protein [Plasmodium falciparum 3D7]
  misc_feature (154)..(291): Homolog of NCBI NO: 30348551 NR Description: hypothetical protein [Saimiriine herpesvirus 2]
MDGVGESSTQNEVEEKPVIVRVKRKVGQSLLDAFCPSVAEDVKPKKVLVRHLETVTDSETTADIIHSFFRKEQRLTKSVQKQQIASENARFEQIWRSRKGNKEGIHEKCHFFDVIRVDTEERRDNAQEFTSLEDQKMLASFLPLLRECIPTAAEEIEADIQSSHTEEYVYDYYAVNEEMDISEDSSKNQFPLVIVEDEEEFCDGSDESDYDSEDSNAEDHPKTDYPEEEEEEEEEDDDDDDDDESEEEKSEASDESDDEETSKRHVRSVLGDDEFDDYAEDVYGYSESDEEFES

SEQ ID NO: 83762 - protein, 158 aa, Arabidopsis thaliana
  peptide (1)..(158): Ceres Seq. ID no. 12671680
  misc_feature (1)..(157): Pfam Name: Mpp10 protein Pfam Description: Mpp10 protein
  misc_feature (1)..(158): Homolog of NCBI NO: 25408058 NR Description: hypothetical protein At2g30280 [imported] - thaliana >gi|2347194|gb|AAC16933.1| hypothetical protein
  misc_feature (1)..(158): Homolog of NCBI NO: 30684530 NR Description: expressed protein [Arabidopsis thaliana] unknown protein [Arabidopsis thaliana]
  misc_feature (18)..(155): Homolog of NCBI NO: 23509612 NR Description: hypothetical protein [Plasmodium falciparum 3D7]
  misc_feature (18)..(157): Homolog of NCBI NO: 9631239 NR Description: orf 48 [Ateline herpesvirus 3]
  misc_feature (18)..(157): Homolog of NCBI NO: 9631239 NR Description: orf 48 [Ateline herpesvirus 3]
  misc_feature (60)..(157): Homolog of NCBI NO: 23509612 NR Description: hypothetical protein [Plasmodium falciparum 3D7]
  misc_feature (18)..(157): Homolog of NCBI NO: 30348551 NR Description: hypothetical protein [Saimiriine herpesvirus 2]
  misc_feature (46)..(155): Homolog of NCBI NO: 23509612 NR Description: hypothetical protein [Plasmodium falciparum 3D7]
  misc_feature (18)..(155): Homolog of NCBI NO: 30348551 NR Description: hypothetical protein [Saimiriine herpesvirus 2]
  misc_feature (18)..(157): Homolog of NCBI NO: 9631239 NR Description: orf 48 [Ateline herpesvirus 3]
MLASFLPLLRECIPTAAEEIEADIQSSHTEEYVYDYYAVNEEMDISEDSSKNQFPLVIVEDEEEFCDGSDESDYDSEDSNAEDHPKTDYPEEEEEEEEEDDDDDDDDESEEEKSEASDESDDEETSKRHVRSVLGDDEFDDYAEDVYGYSESDEEFES

SEQ ID NO: 83763 - DNA, 1080 bp, Arabidopsis thaliana
  misc_feature (1)..(1080): Ceres Seq. ID no. 12671681
  misc_feature: MA Experiment ID: 20000355 Result: Up-regulated in Transcription
  misc_feature: MA Experiment 20000355 PARAMETER Experiment Name: At_Siliques_Sub_P Parameter: Age (day) Value: 21
  misc_feature: MA Experiment 20000355 PARAMETER Experiment Name: At_Siliques_Sub_P Parameter: Organism Value: A. thaliana
  misc_feature: MA Experiment 20000355 PARAMETER Experiment Name: At_Siliques_Sub_P Parameter: Plant Line Value: WS
  misc_feature: MA Experiment 20000355 PARAMETER Experiment Name: At_Siliques_Sub_P Parameter: Tissue Value: Less Than 5mm Siliques vs. Whole Plant
  misc_feature: MA Experiment ID: 20000440 Result: Up-regulated in Transcription
  misc_feature: MA Experiment 20000440 PARAMETER Experiment Name: At_Closed-Flower__Sub_P Parameter: Tissue Value: Closed Flower vs. Whole Plant
atgtctacatctaaaaccatagtgtttggtctctttgtcgcaacactcctcgtctcttgcaatgtggctgcaaacgccacaacgcagccgcttttcccagcgattctaatcttcggtgactcaaccgtagacacaggcaacaacaactaccattcacaaaccatcttcaaggctaagcatctcccttacggcgttgatctaccgggccatgaagctaacggaagatattcaaatggaaaagtaatctctgacgtcattgcttccaaactcaacatcaaagagttggttcctccgtttctacaaccaaacatctcccaccaagacattgtcactggcgtctctttcgcatccgcgggtgcgggctacgatgaccggagctcactctcgagcaaagcaatcccggtctcacaacagccaagcatgtttaagaattatattgctcgtctcaaaggtatcgtaggagacaagaaagcaatggagatcattaacaacgctttagtggtcataagcgcagggcctaacgatttcatcttgaacttttatgatatccccacgaggcgtcttgagtatcctactatccatggttaccaagagtttatcctcaagaggcttgacggttttgtccgggagctttatagtttaggttgccgaaatattgtggtcggagggttaccaccaatgggatgtttaccaatccaaatgaccgcgaaaatgagaaacattttgagattttgtgtggaacaagaaaacaaagactccgttttgtacaatcagaaactagtaaagaaactgcctgagatccaagcgtctctaccgggaagcaatttcctttacgccaacgtctacgacccattgatggacatgatccaaaaccctagtaaatacggattcaaggagactaagaaaggatgttgcggaacaggatacttggaaacaacattcatgtgcaatccccttacaaagacttgtccgaatcactccgatcacttgttttgggactcaattcatccctcggaagctgcctacaattacattggcaactttgtggatgctcagattcgaggctggattaaggcttaa

SEQ ID NO: 83764 - protein, 359 aa, Arabidopsis thaliana
  peptide (1)..(359): Ceres Seq. ID no. 12671682
  misc_feature (35)..(349): Pfam Name: GDSL-like Lipase/Acylhydrolase Pfam Description: GDSL-like Lipase/Acylhydrolase
  misc_feature (1)..(359): Homolog of NCBI NO: 15227734 NR Description: putative GDSL-motif lipase/hydrolase; protein id:
  misc_feature (1)..(358): Homolog of NCBI NO: 15227723 NR Description: putative GDSL-motif lipase hydrolase; protein id:
  misc_feature (1)..(359): Homolog of NCBI NO: 15225096 NR Description: putative GDSL-motif lipase/hydrolase; protein id:
  misc_feature (1)..(359): Homolog of NCBI NO: 15217963 NR Description: proline-rich protein, putative; protein id:
  misc_feature (1)..(359): Homolog of NCBI NO: 25336283 NR Description: hypothetical protein RXF26 [imported] -
  misc_feature (1)..(359): Homolog of NCBI NO: 21592974 NR Description: proline-rich protein, putative [Arabidopsis
  misc_feature (1)..(359): Homolog of NCBI NO: 21537117 NR Description: putative GDSL-motif lipase/hydrolase [Arabidopsis
  misc_feature (1)..(300): Homolog of NCBI NO: 15224162 NR Description: putative GDSL-motif lipase/hydrolase; protein id:
  misc_feature (151)..(359): Homolog of NCBI NO: 25336273 NR Description: probable GDSL-motif lipase/hydrolase [imported] -
  misc_feature (1)..(145): Homolog of NCBI NO: 25336273 NR Description: probable GDSL-motif lipase/hydrolase [imported] -
MSTSKTIVFGLFVATLLVSCNVAANATTQPLFPAILIFGDSTVDTGNNNYHSQTIFKAKHLPYGVDLPGHEANGRYSNGKVISDVIASKLNIKELVPPFLQPNISHQDIVTGVSFASAGAGYDDRSSLSSKAIPVSQQPSMFKNYIARLKGIVGDKKAMEIINNALVVISAGPNDFILNFYDIPTRRLEYPTIHGYQEFILKRLDGFVRELYSLGCRNIVVGGLPPMGCLPIQMTAKMRNILRFCVEQENKDSVLYNQKLVKKLPEIQASLPGSNFLYANVYDPLMDMIQNPSKYGFKETKKGCCGTGYLETTFMCNPLTKTCPNHSDHLFWDSIHPSEAAYNYIGNFVDAQIRGWIKA

SEQ ID NO: 83765 - protein, 219 aa, Arabidopsis thaliana
  peptide (1)..(219): Ceres Seq. ID no. 12671683
  misc_feature (1)..(209): Pfam Name: GDSL-like Lipase/Acylhydrolase Pfam Description: GDSL-like Lipase/Acylhydrolase
  misc_feature (1)..(219): Homolog of NCBI NO: 15227734 NR Description: putative GDSL-motif lipase/hydrolase; protein id:
  misc_feature (1)..(218): Homolog of NCBI NO: 15227723 NR Description: putative GDSL-motif lipase hydrolase; protein id:
  misc_feature (1)..(219): Homolog of NCBI NO: 15225096 NR Description: putative GDSL-motif lipase/hydrolase; protein id:
  misc_feature (1)..(219): Homolog of NCBI NO: 15217963 NR Description: proline-rich protein, putative; protein id:
  misc_feature (1)..(219): Homolog of NCBI NO: 25336283 NR Description: hypothetical protein RXF26 [imported] -
  misc_feature (1)..(219): Homolog of NCBI NO: 21592974 NR Description: proline-rich protein, putative [Arabidopsis
  misc_feature (1)..(219): Homolog of NCBI NO: 21537117 NR Description: putative GDSL-motif lipase/hydrolase [Arabidopsis
  misc_feature (1)..(160): Homolog of NCBI NO: 15224162 NR Description: putative GDSL-motif lipase/hydrolase; protein id:
  misc_feature (11)..(219): Homolog of NCBI NO: 25336273 NR Description: probable GDSL-motif lipase/hydrolase [imported] -
  misc_feature (1)..(213): Homolog of NCBI NO: 18390708 NR Description: expressed protein; protein id: At1g06990.1,
MFKNYIARLKGIVGDKKAMEIINNALVVISAGPNDFILNFYDIPTRRLEYPTIHGYQEFILKRLDGFVRELYSLGCRNIVVGGLPPMGCLPIQMTAKMRNILRFCVEQENKDSVLYNQKLVKKLPEIQASLPGSNFLYANVYDPLMDMIQNPSKYGFKETKKGCCGTGYLETTFMCNPLTKTCPNHSDHLFWDSIHPSEAAYNYIGNFVDAQIRGWIKA

SEQ ID NO: 83766 - protein, 201 aa, Arabidopsis thaliana
  peptide (1)..(201): Ceres Seq. ID no. 12671684
  misc_feature (1)..(191): Pfam Name: GDSL-like Lipase/Acylhydrolase Pfam Description: GDSL-like Lipase/Acylhydrolase
  misc_feature (1)..(201): Homolog of NCBI NO: 15227734 NR Description: putative GDSL-motif lipase/hydrolase; protein id:
  misc_feature (1)..(200): Homolog of NCBI NO: 15227723 NR Description: putative GDSL-motif lipase hydrolase; protein id:
  misc_feature (1)..(201): Homolog of NCBI NO: 15225096 NR Description: putative GDSL-motif lipase/hydrolase; protein id:
  misc_feature (1)..(201): Homolog of NCBI NO: 15217963 NR Description: proline-rich protein, putative; protein id:
  misc_feature (1)..(201): Homolog of NCBI NO: 25336283 NR Description: hypothetical protein RXF26 [imported] -
  misc_feature (1)..(201): Homolog of NCBI NO: 21592974 NR Description: proline-rich protein, putative [Arabidopsis
  misc_feature (1)..(201): Homolog of NCBI NO: 21537117 NR Description: putative GDSL-motif lipase/hydrolase [Arabidopsis
  misc_feature (1)..(142): Homolog of NCBI NO: 15224162 NR Description: putative GDSL-motif lipase/hydrolase; protein id:
  misc_feature (1)..(201): Homolog of NCBI NO: 25336273 NR Description: probable GDSL-motif lipase/hydrolase [imported] -
  misc_feature (1)..(195): Homolog of NCBI NO: 18390708 NR Description: expressed protein; protein id: At1g06990.1,
MEIINNALVVISAGPNDFILNFYDIPTRRLEYPTIHGYQEFILKRLDGFVRELYSLGCRNIVVGGLPPMGCLPIQMTAKMRNILRFCVEQENKDSVLYNQKLVKKLPEIQASLPGSNFLYANVYDPLMDMIQNPSKYGFKETKKGCCGTGYLETTFMCNPLTKTCPNHSDHLFWDSIHPSEAAYNYIGNFVDAQIRGWIKA

SEQ ID NO: 83767 - DNA, 1859 bp, Arabidopsis thaliana
  misc_feature (1)..(1859): Ceres Seq. ID no. 12671685
  misc_feature: MA Experiment ID: 20000180 Result: Up-regulated in Transcription
  misc_feature: MA Experiment 20000180 PARAMETER Experiment Name: At_Germinating_Seeds_P Parameter: Age (hr) Value: 24 vs. 0
  misc_feature: MA Experiment 20000180 PARAMETER Experiment Name: At_Germinating_Seeds_P Parameter: Tissue Value: Germinating Seeds
  misc_feature: MA Experiment ID: 20000185 Result: Down-regulated in Transcription
  misc_feature: MA Experiment 20000185 PARAMETER Experiment Name: At_Roots__P Parameter: Age (day) Value: 7 vs. 21
  misc_feature: MA Experiment 20000185 PARAMETER Experiment Name: At_Roots__P Parameter: Organism Value: A. thaliana
  misc_feature: MA Experiment 20000185 PARAMETER Experiment Name: At_Roots__P Parameter: Tissue Value: Roots vs. Whole Plant
  misc_feature: MA Experiment ID: 20000439 Result: Down-regulated in Transcription
  misc_feature: MA Experiment 20000439 PARAMETER Experiment Name: At_Roots__P Parameter: Age (day) Value: 14 vs. 21
  misc_feature: MA Experiment 20000439 PARAMETER Experiment Name: At_Roots__P Parameter: Organism Value: A. thaliana
  misc_feature: MA Experiment 20000439 PARAMETER Experiment Name: At_Roots__P Parameter: Tissue Value: Roots vs. Whole Plant
  misc_feature: MA Experiment ID: 20001248 Result: Down-regulated in Transcription
  misc_feature: MA Experiment 20001248 PARAMETER Experiment Name: At_Far-red-induction_P Parameter: Age (day) Value: 7
  misc_feature: MA Experiment 20001248 PARAMETER Experiment Name: At_Far-red-induction_P Parameter: Light Value: Far-red vs. White
  misc_feature: MA Experiment 20001248 PARAMETER Experiment Name: At_Far-red-induction_P Parameter: Organism Value: A. thaliana
  misc_feature: MA Experiment 20001248 PARAMETER Experiment Name: At_Far-red-induction_P Parameter: Plant Line Value: Columbia
  misc_feature: MA Experiment 20001248 PARAMETER Experiment Name: At_Far-red-induction_P Parameter: Timepoint (hr) Value: 4
  misc_feature: MA Experiment 20001248 PARAMETER Experiment Name: At_Far-red-induction_P Parameter: Tissue Value: Whole Plant
  misc_feature: MA Experiment ID: 20001450 Result: Down-regulated in Transcription
  misc_feature: MA Experiment 20001450 PARAMETER Experiment Name: At_Far-red-induction_P Parameter: Age (day) Value: 7
  misc_feature: MA Experiment 20001450 PARAMETER Experiment Name: At_Far-red-induction_P Parameter: Light Value: Far-red vs. White
  misc_feature: MA Experiment 20001450 PARAMETER Experiment Name: At_Far-red-induction_P Parameter: Organism Value: A. thaliana
  misc_feature: MA Experiment 20001450 PARAMETER Experiment Name: At_Far-red-induction_P Parameter: Plant Line Value: Columbia
  misc_feature: MA Experiment 20001450 PARAMETER Experiment Name: At_Far-red-induction_P Parameter: Timepoint (hr) Value: 8
  misc_feature: MA Experiment 20001450 PARAMETER Experiment Name: At_Far-red-induction_P Parameter: Tissue Value: Whole Plant
aaaaaataaaacaaattcgaagaaatataaatgagatttttgtagctagctcctccaaatccaaatcgttgcgttaaggtttcttcaagtttcaatctttttgcaatgaattgcccagccatgactgcttctccttcttcttcctcttcttcttcctactcaacgtttcgtcctcctcctccactcttgccacaattgagtaacgattcacaaagatctgttgttatgcactgcacaagattaccctttgaagcatttgctgctacttcatcaaaccggcttcttgggaaacattcattgcctttgagagcagctttggttacttcgaaccctttaaacatttcatcttcctcagttatctctgatgccatttcatcttcctctgttatcactgatgatgccaaaattggtgtcttgttattaaaccttggaggtcctgagactttagatgatgtacaaccctttttgtttaacctcttcgccgacccggacattatacggttgccgccggtattccagtttcttcagaagccattagcacagtttatatcagtagcaagagcacccaaaagcaaggaaggatatgcatctattggtggaggttctcctcttcgccacataactgatgcacaggctgaagaattaagaaaatgcctttgggaaaaaaatgtaccagcaaaggtatatgttggtatgcggtattggcatccattcactgaggaagccattgaacagataaaaagagatggaattacaaaactagttgttctaccactttatcctcaattttctatatcaactagtggttcaagcctaagactcttggagagaatatttcgagaggacgagtatcttgttaacatgcaacatactgttataccatcgtggtatcagcgggagggatatataaaggcaatggcaaatctaatccaaagcgagttgggaaaatttggttctcctaatcaggttgtaatatttttcagtgcacatggcgtgcctcttgcatatgtcgaagaagccggtgatccttacaaggcagagatggaagaatgtgttgatctaatcatggaggaattagacaagagaaagataactaatgcttacactcttgcttatcagagcagagttggaccagttgaatggctgaaaccatacactgaagaagccattactgaacttggtaaaaaaggtgttgaaaatcttctggctgtacccataagttttgtgagcgagcacattgaaactctggaggagatagatgttgagtataaagagttggctttgaagtctggtatcaaaaactgggggcgagtacctgctctaggaacagaacctatgtttatatctgacttggcagatgctgttgtggaaagtcttccatacgttggtgctatggctgtctcaaaccttgaagctcgacagtcgttagttccgctcgggagtgtagaagaattattagcaacgtatgattcacagagaagggagttaccagcaccggtgacaatgtgggaatggggatggacaaaaagtgcagaaacatggaacggaagagcagcaatgttagcggtgctagcactcttggtgctcgaagtcaccaccggaaaagggtttctgcatcagtggggcatcttgccttcattataataaagataacgtatagtctttttctctatgaaaacccaatccaagaatccaaatgtgagctttcacatgtggaataaggccagctatgttattatgctctcttcttctctgttgtagaaatgttgacatttaaatacttcatactgtatcttcataaaacattaaatgttgacattttaatcggcatgctttttcgcaacgtgaatgtttgagtc

SEQ ID NO: 83768 - protein, 512 aa, Arabidopsis thaliana
  peptide (1)..(512): Ceres Seq. ID no. 12671686
  misc_feature (100)..(424): Pfam Name: Ferrochelatase Pfam Description: Ferrochelatase
  misc_feature (1)..(512): Homolog of NCBI NO: 15227742 NR Description: putative ferrochelatase precusor; protein id: [Arabidopsis thaliana] >gi|3913871|sp|O04921|HMZ2_ARATH
  misc_feature (1)..(512): Homolog of NCBI NO: 2623990 NR Description: ferrochelatase [Arabidopsis thaliana]
  misc_feature (4)..(510): Homolog of NCBI NO: 15147828 NR Description: ferrochelatase [Nicotiana tabacum]
  misc_feature (1)..(510): Homolog of NCBI NO: 12082085 NR Description: ferrochelatase [Cucumis sativus]
  misc_feature (60)..(510): Homolog of NCBI NO: 3913808 NR Description: Ferrochelatase II, chloroplast precursor ferro- lyase) (Heme synthetase) >gi|2429618|dbj|BAA22284.1|
  misc_feature (26)..(484): Homolog of NCBI NO: 7437212 NR Description: probable ferrochelatase (EC 4.99.1.1) - potato
  misc_feature (1)..(287): Homolog of NCBI NO: 16226931 NR Description: T9D9.20/T9D9.20 [Arabidopsis thaliana]
  misc_feature (68)..(503): Homolog of NCBI NO: 13249285 NR Description: ferrochelatase [Chlamydomonas reinhardtii]
  misc_feature (78)..(431): Homolog of NCBI NO: 1170239 NR Description: Ferrochelatase II, chloroplast precursor
  misc_feature (89)..(440): Homolog of NCBI NO: 7437214 NR Description: probable ferrochelatase (EC 4.99.1.1) - barley
MNCPAMTASPSSSSSSSYSTFRPPPPLLPQLSNDSQRSVVMHCTRLPFEAFAATSSNRLLGKHSLPLRAALVTSNPLNISSSSVISDAISSSSVITDDAKIGVLLLNLGGPETLDDVQPFLFNLFADPDIIRLPPVFQFLQKPLAQFISVARAPKSKEGYASIGGGSPLRHITDAQAEELRKCLWEKNVPAKVYVGMRYWHPFTEEAIEQIKRDGITKLVVLPLYPQFSISTSGSSLRLLERIFREDEYLVNMQHTVIPSWYQREGYIKAMANLIQSELGKFGSPNQVVIFFSAHGVPLAYVEEAGDPYKAEMEECVDLIMEELDKRKITNAYTLAYQSRVGPVEWLKPYTEEAITELGKKGVENLLAVPISFVSEHIETLEEIDVEYKELALKSGIKNWGRVPALGTEPMFISDLADAVVESLPYVGAMAVSNLEARQSLVPLGSVEELLATYDSQRRELPAPVTMWEWGWTKSAETWNGRAAMLAVLALLVLEVTTGKGFLHQWGILPSL

SEQ ID NO: 83769 - protein, 507 aa, Arabidopsis thaliana
  peptide (1)..(507): Ceres Seq. ID no. 12671687
  misc_feature (95)..(419): Pfam Name: Ferrochelatase Pfam Description: Ferrochelatase
  misc_feature (1)..(507): Homolog of NCBI NO: 15227742 NR Description: putative ferrochelatase precusor; protein id: [Arabidopsis thaliana] >gi|3913871|sp|O04921|HMZ2_ARATH
  misc_feature (1)..(507): Homolog of NCBI NO: 2623990 NR Description: ferrochelatase [Arabidopsis thaliana]
  misc_feature (1)..(505): Homolog of NCBI NO: 15147828 NR Description: ferrochelatase [Nicotiana tabacum]
  misc_feature (1)..(505): Homolog of NCBI NO: 12082085 NR Description: ferrochelatase [Cucumis sativus]
  misc_feature (55)..(505): Homolog of NCBI NO: 3913808 NR Description: Ferrochelatase II, chloroplast precursor ferro- lyase) (Heme synthetase) >gi|2429618|dbj|BAA22284.1|
  misc_feature (21)..(479): Homolog of NCBI NO: 7437212 NR Description: probable ferrochelatase (EC 4.99.1.1) - potato
  misc_feature (1)..(282): Homolog of NCBI NO: 16226931 NR Description: T9D9.20/T9D9.20 [Arabidopsis thaliana]
  misc_feature (63)..(498): Homolog of NCBI NO: 13249285 NR Description: ferrochelatase [Chlamydomonas reinhardtii]
  misc_feature (73)..(426): Homolog of NCBI NO: 1170239 NR Description: Ferrochelatase II, chloroplast precursor
  misc_feature (84)..(435): Homolog of NCBI NO: 7437214 NR Description: probable ferrochelatase (EC 4.99.1.1) - barley
MTASPSSSSSSSYSTFRPPPPLLPQLSNDSQRSVVMHCTRLPFEAFAATSSNRLLGKHSLPLRAALVTSNPLNISSSSVISDAISSSSVITDDAKIGVLLLNLGGPETLDDVQPFLFNLFADPDIIRLPPVFQFLQKPLAQFISVARAPKSKEGYASIGGGSPLRHITDAQAEELRKCLWEKNVPAKVYVGMRYWHPFTEEAIEQIKRDGITKLVVLPLYPQFSISTSGSSLRLLERIFREDEYLVNMQHTVIPSWYQREGYIKAMANLIQSELGKFGSPNQVVIFFSAHGVPLAYVEEAGDPYKAEMEECVDLIMEELDKRKITNAYTLAYQSRVGPVEWLKPYTEEAITELGKKGVENLLAVPISFVSEHIETLEEIDVEYKELALKSGIKNWGRVPALGTEPMFISDLADAVVESLPYVGAMAVSNLEARQSLVPLGSVEELLATYDSQRRELPAPVTMWEWGWTKSAETWNGRAAMLAVLALLVLEVTTGKGFLHQWGILPSL

SEQ ID NO: 83770 - protein, 472 aa, Arabidopsis thaliana
  peptide (1)..(472): Ceres Seq. ID no. 12671688
  misc_feature (60)..(384): Pfam Name: Ferrochelatase Pfam Description: Ferrochelatase
  misc_feature (1)..(472): Homolog of NCBI NO: 15227742 NR Description: putative ferrochelatase precusor; protein id: [Arabidopsis thaliana] >gi|3913871|sp|O04921|HMZ2_ARATH
  misc_feature (1)..(472): Homolog of NCBI NO: 2623990 NR Description: ferrochelatase [Arabidopsis thaliana]
  misc_feature (1)..(470): Homolog of NCBI NO: 15147828 NR Description: ferrochelatase [Nicotiana tabacum]
  misc_feature (1)..(470): Homolog of NCBI NO: 12082085 NR Description: ferrochelatase [Cucumis sativus]
  misc_feature (20)..(470): Homolog of NCBI NO: 3913808 NR Description: Ferrochelatase II, chloroplast precursor ferro- lyase) (Heme synthetase) >gi|2429618|dbj|BAA22284.1|
  misc_feature (1)..(444): Homolog of NCBI NO: 7437212 NR Description: probable ferrochelatase (EC 4.99.1.1) - potato
  misc_feature (1)..(247): Homolog of NCBI NO: 16226931 NR Description: T9D9.20/T9D9.20 [Arabidopsis thaliana]
  misc_feature (28)..(463): Homolog of NCBI NO: 13249285 NR Description: ferrochelatase [Chlamydomonas reinhardtii]
  misc_feature (38)..(391): Homolog of NCBI NO: 1170239 NR Description: Ferrochelatase II, chloroplast precursor
  misc_feature (49)..(400): Homolog of NCBI NO: 7437214 NR Description: probable ferrochelatase (EC 4.99.1.1) - barley
MHCTRLPFEAFAATSSNRLLGKHSLPLRAALVTSNPLNISSSSVISDAISSSSVITDDAKIGVLLLNLGGPETLDDVQPFLFNLFADPDIIRLPPVFQFLQKPLAQFISVARAPKSKEGYASIGGGSPLRHITDAQAEELRKCLWEKNVPAKVYVGMRYWHPFTEEAIEQIKRDGITKLVVLPLYPQFSISTSGSSLRLLERIFREDEYLVNMQHTVIPSWYQREGYIKAMANLIQSELGKFGSPNQVVIFFSAHGVPLAYVEEAGDPYKAEMEECVDLIMEELDKRKITNAYTLAYQSRVGPVEWLKPYTEEAITELGKKGVENLLAVPISFVSEHIETLEEIDVEYKELALKSGIKNWGRVPALGTEPMFISDLADAVVESLPYVGAMAVSNLEARQSLVPLGSVEELLATYDSQRRELPAPVTMWEWGWTKSAETWNGRAAMLAVLALLVLEVTTGKGFLHQWGILPSL

SEQ ID NO: 83771 - DNA, 1848 bp, Arabidopsis thaliana
  misc_feature (1)..(1848): Ceres Seq. ID no. 12671693
  misc_feature: MA Experiment ID: 20000173 Result: Down-regulated in Transcription
  misc_feature: MA Experiment 20000173 PARAMETER Experiment Name: At_42deg_Heat_P Parameter: Age (day) Value: 14
  misc_feature: MA Experiment 20000173 PARAMETER Experiment Name: At_42deg_Heat_P Parameter: Organism Value: A. thaliana
  misc_feature: MA Experiment 20000173 PARAMETER Experiment Name: At_42deg_Heat_P Parameter: Plant Line Value: WS
  misc_feature: MA Experiment 20000173 PARAMETER Experiment Name: At_42deg_Heat_P Parameter: Temperature (deg C) Value: 42 vs. 22
  misc_feature: MA Experiment 20000173 PARAMETER Experiment Name: At_42deg_Heat_P Parameter: Timepoint (hr) Value: 6
  misc_feature: MA Experiment 20000173 PARAMETER Experiment Name: At_42deg_Heat_P Parameter: Tissue Value: Aerial
  misc_feature: MA Experiment ID: 20000185 Result: Down-regulated in Transcription
  misc_feature: MA Experiment 20000185 PARAMETER Experiment Name: At_Roots__P Parameter: Age (day) Value: 7 vs. 21
  misc_feature: MA Experiment 20000185 PARAMETER Experiment Name: At_Roots__P Parameter: Organism Value: A. thaliana
  misc_feature: MA Experiment 20000185 PARAMETER Experiment Name: At_Roots__P Parameter: Tissue Value: Roots vs. Whole Plant
  misc_feature: MA Experiment ID: 20000234 Result: Down-regulated in Transcription
  misc_feature: MA Experiment 20000234 PARAMETER Experiment Name: At_Siliques_P Parameter: Age (day) Value: 21
  misc_feature: MA Experiment 20000234 PARAMETER Experiment Name: At_Siliques_P Parameter: Organism Value: A. thaliana
  misc_feature: MA Experiment 20000234 PARAMETER Experiment Name: At_Siliques_P Parameter: Plant Line Value: WS
  misc_feature: MA Experiment 20000234 PARAMETER Experiment Name: At_Siliques_P Parameter: Tissue Value: Less Than 5mm Siliques vs. Whole Plant
  misc_feature: MA Experiment ID: 20001905 Result: Down-regulated in Transcription
  misc_feature: MA Experiment 20001905 PARAMETER Experiment Name: At_Drought_Reproduction_P Parameter: Age (day) Value: 40
  misc_feature: MA Experiment 20001905 PARAMETER Experiment Name: At_Drought_Reproduction_P Parameter: Organism Value: A. thaliana
  misc_feature: MA Experiment 20001905 PARAMETER Experiment Name: At_Drought_Reproduction_P Parameter: Plant Line Value: WS
  misc_feature: MA Experiment 20001905 PARAMETER Experiment Name: At_Drought_Reproduction_P Parameter: Timepoint (day) Value: 10
  misc_feature: MA Experiment 20001905 PARAMETER Experiment Name: At_Drought_Reproduction_P Parameter: Tissue Value: Rosettes
  misc_feature: MA Experiment 20001905 PARAMETER Experiment Name: At_Drought_Reproduction_P Parameter: Treatment Value: Drought vs. No Drought
ggttgagtgattgctgaagccaacttaaaagagagagaagagaagagtgactctgtgtgtgtgtgcaagaaagtcttctctttcacacctttcgttttctcgaacctctcctttaaagatggtggaggaatcttgggtttgacaactcattaacactgaccctctttttagctctacaagcatccaaggaacccctcttacttttccctcttcttcattccctctctctctatatctcccaattccttctctttttttaaccttgatcttcttcttataagagactcagagctgttcttcaagatgggattgtgtaagcttgaaacttgactatctgggtctctcccattttctgttctcttttgtattctgagtgaaagttttgttttctgggggaaaaaattagggttcttagatggaggagatagaaggaacaaacagagcagctgttgagagttgtcatagagttcttaatcttttacatagatcacagcaacaagatcatgttggttttgaaaagaatttagtatctgaaactagagaagctgtgattaggttcaagagagttgggagtttgttaagcagtagtgttggtcatgctaggtttagaagagctaagaaacttcagagtcatgtctctcaaagtctcttacttgatccatgtcaacaaaggacaacagaagttccatcatcatcttctcagaaaacaccggtactccggtctggtttccaggaattgagcttgagacaaccttcagattcactcactttagggactcgctcttttagtttaaactcaaatgctaaagctcctctccttcagcttaatcagcagacaatgcctccttcgaattatcctactttgtttccagtacaacaacaacaacaacaacaacaacaacaacaacagcaggagcagcagcagcagcagcagcagcaacagcaacagtttcatgaacggttacaagctcaccatcttcatcagcaacagcagctacagaaacatcaagctgagcttatgcttaggaaatgcaatggtgggataagtttgagtttcgataactctagttgtactccaactatgtcatccactaggtcctttgtttcttcacttagcatagatggtagtgttgctaatatagagggaaagaactccttccattttggggttcctagttcaactgatcagaattcactacattctaagaggaaatgccccttgaaaggagatgaacatggaagcttaaaatgcgggagctctagccgatgccactgcgctaagaagaggaaacatcgggttaggagatcgattagagtaccggctataagtaacaaggttgcagatatccctcctgatgattattcatggcgaaaatatggtcagaagcccatcaagggctctccttatcccagaggatattacaaatgtagtagcatgagaggttgtccagcgaggaagcatgttgagagatgtttggaagatccggcaatgcttattgttacttatgaagcagagcataaccacccgaaattgccatctcaagctataacaacttaactctcgtttatctttgcggtccagcataaaccttctcatgtatgttgttctcttttgtgcgcgatgatcggctttggggttgctgcaatgttgtgatatatggatcggggtaagtgcttttgttggggtggatttgcttgtgagagtttgctgcaattgttggattttgagctatatatggggtaaatgtaggattggtcaagactctttttctgtttctcaagtttattggtcttaatgattaaaagtttaatggtttgtttctggctatgtatcttttttttcttctc

SEQ ID NO: 83772 - protein, 380 aa, Arabidopsis thaliana; identical to SEQ ID NO: 75997
  peptide (1)..(380): Ceres Seq. ID no. 12671694
  misc_feature (312)..(372): Pfam Name: WRKY DNA -binding domain Pfam Description: WRKY DNA -binding domain
  misc_feature (1)..(380): Homolog of NCBI NO: 18402397 NR Description: WRKY family transcription factor; protein id: supported by cDNA: gi_13507098 [Arabidopsis thaliana]
  misc_feature (192)..(380): Homolog of NCBI NO: 18396971 NR Description: WRKY family transcription factor; protein id: supported by cDNA: gi_15384222, supported by cDNA: gi_15450756 thaliana] >gi|20978793|sp|Q9SR07|WR39_ARATH Probable
  misc_feature (1)..(81): Homolog of NCBI NO: 18396971 NR Description: WRKY family transcription factor; protein id: supported by cDNA: gi_15384222, supported by cDNA: gi_15450756 thaliana] >gi|20978793|sp|Q9SR07|WR39_ARATH Probable
  misc_feature (192)..(380): Homolog of NCBI NO: 15241875 NR Description: WRKY family transcription factor; protein id: supported by cDNA: gi_16798367, supported by cDNA: gi_17064167 thaliana] >gi|17064168|gb|AAL35291.1|AF442398_1 WRKY
  misc_feature (1)..(79): Homolog of NCBI NO: 15241875 NR Description: WRKY family transcription factor; protein id: supported by cDNA: gi_16798367, supported by cDNA: gi_17064167 thaliana] >gi|17064168|gb|AAL35291.1|AF442398_1 WRKY
  misc_feature (192)..(380): Homolog of NCBI NO: 29839595 NR Description: Probable WRKY transcription factor 74 (WRKY protein 74) >gi|16798368|gb|AAL29432.1|AF426255_1 WRKY
  misc_feature (1)..(79): Homolog of NCBI NO: 29839595 NR Description: Probable WRKY transcription factor 74 (WRKY protein 74) >gi|16798368|gb|AAL29432.1|AF426255_1 WRKY
  misc_feature (1)..(376): Homolog of NCBI NO: 11993901 NR Description: somatic embryogenesis related protein [Dactylis
  misc_feature (1)..(373): Homolog of NCBI NO: 40539044 NR Description: putative somatic embryogenesis related protein
  misc_feature (10)..(370): Homolog of NCBI NO: 34897192 NR Description: putative WRKY DNA-binding protein [Oryza sativa

SEQ ID NO: 83773 - protein, 239 aa, Arabidopsis thaliana; identical to SEQ ID NO: 75998
  peptide (1)..(239): Ceres Seq. ID no. 12671695
  misc_feature (171)..(231): Pfam Name: WRKY DNA -binding domain Pfam Description: WRKY DNA -binding domain
  misc_feature (1)..(239): Homolog of NCBI NO: 18402397 NR Description: WRKY family transcription factor; protein id: supported by cDNA: gi_13507098 [Arabidopsis thaliana]
  misc_feature (51)..(239): Homolog of NCBI NO: 18396971 NR Description: WRKY family transcription factor; protein id: supported by cDNA: gi_15384222, supported by cDNA: gi_15450756 thaliana] >gi|20978793|sp|Q9SR07|WR39_ARATH Probable
  misc_feature (51)..(239): Homolog of NCBI NO: 15241875 NR Description: WRKY family transcription factor; protein id: supported by cDNA: gi_16798367, supported by cDNA: gi_17064167 thaliana] >gi|17064168|gb|AAL35291.1|AF442398_1 WRKY
  misc_feature (51)..(239): Homolog of NCBI NO: 29839595 NR Description: Probable WRKY transcription factor 74 (WRKY protein 74) >gi|16798368|gb|AAL29432.1|AF426255_1 WRKY
  misc_feature (1)..(235): Homolog of NCBI NO: 11993901 NR Description: somatic embryogenesis related protein [Dactylis
  misc_feature (1)..(232): Homolog of NCBI NO: 40539044 NR Description: putative somatic embryogenesis related protein
  misc_feature (1)..(229): Homolog of NCBI NO: 34897192 NR Description: putative WRKY DNA-binding protein [Oryza sativa
  misc_feature (3)..(229): Homolog of NCBI NO: 10798760 NR Description: WRKY transcription factor Nt-SubD48 [Nicotiana
  misc_feature (63)..(239): Homolog of NCBI NO: 7488950 NR Description: DNA-binding protein WRKY3 - parsley
  misc_feature (70)..(239): Homolog of NCBI NO: 38346908 NR Description: OSJNBb0015N08.8 [Oryza sativa (japonica

SEQ ID NO: 83774 - DNA, 1101 bp, Arabidopsis thaliana
  misc_feature (1)..(1101): Ceres Seq. ID no. 12671700
  misc_feature: MA Experiment ID: 20000307 Result: Up-regulated in Transcription
  misc_feature: MA Experiment 20000307 PARAMETER Experiment Name: At_Germinating_Seeds_Sub_P Parameter: Age (hr) Value: 24 vs. 0
  misc_feature: MA Experiment 20000307 PARAMETER Experiment Name: At_Germinating_Seeds_Sub_P Parameter: Organism Value: A. thaliana
  misc_feature: MA Experiment 20000307 PARAMETER Experiment Name: At_Germinating_Seeds_Sub_P Parameter: Plant Line Value: WS
  misc_feature: MA Experiment 20000307 PARAMETER Experiment Name: At_Germinating_Seeds_Sub_P Parameter: Tissue Value: Germinating Seeds
atgcgtaggtggatctgttgtggggataaaaaaggagattcagatttatcaaatgaagaggtgcatttgaaaagtccatggcaaaattctgaggcaaatcaaaagaatcaaaaaccacaagctgttgtaaagcctgaggcgcagaaagaagctcttcccatcgaagttcctcccttgtctgtggatgaggttaaagaaaagactgacaattttggatctaagtctctgattggtgagggttcttatggaagggtatattatgcaactctaaatgatgggaaagcagttgctttgaagaaactcgatgttgcacctgaagctgaaacaaacaccgagttcctgaatcaggtttccatggtttcaagactaaaacatgagaatctcattcaactggttggttattgtgttgatgaaaacctccgtgttcttgcttatgagtttgcaacaatgggatcactgcacgacattctacatggtaggaagggagttcaaggagcacagccaggtccaacacttgactggttaacgagggtgaagatagctgttgaggcagctaggggtttagaataccttcatgagaaggttcagcctcctgtaatacatagagacataagatctagcaatgttctcctttttgaagactatcaagcaaaagttgcagattttaatctctcaaatcaagctcctgataatgctgctcgtcttcactctacgagagttttaggcacctttggctatcacgctccagaatatgctatgacaggacagttaacgcagaagagtgacgtgtatagctttggggttgttcttctagagcttttgacaggaaggaaacctgtagatcatacaatgccacgcggccaacagagtcttgtaacttgggctacaccgagactcagtgaagataaagtgaagcaatgtgttgatccaaagttaaaaggagaatatcctcctaaatcagtagccaagctagcagcggtggcagcattatgtgtgcaatacgaatctgagtttagaccaaatatgagtatagttgtaaaagctttgcagccacttctcaaaccaccagcaccagccccagccccagtaccggaatcctga

SEQ ID NO: 83775 - protein, 366 aa, Arabidopsis thaliana
  peptide (1)..(366): Ceres Seq. ID no. 12671701
  misc_feature (1)..(366): Homolog of NCBI NO: 15224557 NR Description: putative protein kinase; protein id: At2g30740.1
  misc_feature (1)..(362): Homolog of NCBI NO: 15222170 NR Description: protein kinase interactor, putative; protein id: supported by cDNA: gi_13877994 [Arabidopsis thaliana]
  misc_feature (1)..(362): Homolog of NCBI NO: 13877995 NR Description: putative protein kinase interactor [Arabidopsis
MRRWICCGDKKGDSDLSNEEVHLKSPWQNSEANQKNQKPQAVVKPEAQKEALPIEVPPLSVDEVKEKTDNFGSKSLIGEGSYGRVYYATLNDGKAVALKKLDVAPEAETNTEFLNQVSMVSRLKHENLIQLVGYCVDENLRVLAYEFATMGSLHDILHGRKGVQGAQPGPTLDWLTRVKIAVEAARGLEYLHEKVQPPVIHRDIRSSNVLLFEDYQAKVADFNLSNQAPDNAARLHSTRVLGTFGYHAPEYAMTGQLTQKSDVYSFGVVLLELLTGRKPVDHTMPRGQQSLVTWATPRLSEDKVKQCVDPKLKGEYPPKSVAKLAAVAALCVQYESEFRPNMSIVVKALQPLLKPPAPAPAPVPES

SEQ ID NO: 83776 - protein, 248 aa, Arabidopsis thaliana
  peptide (1)..(248): Ceres Seq. ID no. 12671702
  misc_feature (1)..(248): Homolog of NCBI NO: 15224557 NR Description: putative protein kinase; protein id: At2g30740.1
  misc_feature (1)..(244): Homolog of NCBI NO: 15222170 NR Description: protein kinase interactor, putative; protein id: supported by cDNA: gi_13877994 [Arabidopsis thaliana]
  misc_feature (1)..(244): Homolog of NCBI NO: 13877995 NR Description: putative protein kinase interactor [Arabidopsis
MVSRLKHENLIQLVGYCVDENLRVLAYEFATMGSLHDILHGRKGVQGAQPGPTLDWLTRVKIAVEAARGLEYLHEKVQPPVIHRDIRSSNVLLFEDYQAKVADFNLSNQAPDNAARLHSTRVLGTFGYHAPEYAMTGQLTQKSDVYSFGVVLLELLTGRKPVDHTMPRGQQSLVTWATPRLSEDKVKQCVDPKLKGEYPPKSVAKLAAVAALCVQYESEFRPNMSIVVKALQPLLKPPAPAPAPVPES

SEQ ID NO: 83777 - protein, 217 aa, Arabidopsis thaliana
  peptide (1)..(217): Ceres Seq. ID no. 12671703
  misc_feature (1)..(217): Homolog of NCBI NO: 15224557 NR Description: putative protein kinase; protein id: At2g30740.1
  misc_feature (1)..(213): Homolog of NCBI NO: 15222170 NR Description: protein kinase interactor, putative; protein id: supported by cDNA: gi_13877994 [Arabidopsis thaliana]
  misc_feature (1)..(213): Homolog of NCBI NO: 13877995 NR Description: putative protein kinase interactor [Arabidopsis
MGSLHDILHGRKGVQGAQPGPTLDWLTRVKIAVEAARGLEYLHEKVQPPVIHRDIRSSNVLLFEDYQAKVADFNLSNQAPDNAARLHSTRVLGTFGYHAPEYAMTGQLTQKSDVYSFGVVLLELLTGRKPVDHTMPRGQQSLVTWATPRLSEDKVKQCVDPKLKGEYPPKSVAKLAAVAALCVQYESEFRPNMSIVVKALQPLLKPPAPAPAPVPES

SEQ ID NO: 83778 - DNA, 1738 bp, Arabidopsis thaliana
  misc_feature (1)..(1738): Ceres Seq. ID no. 12671720
  misc_feature: MA Experiment ID: 20000180 Result: Down-regulated in Transcription
  misc_feature: MA Experiment 20000180 PARAMETER Experiment Name: At_Germinating_Seeds_P Parameter: Age (hr) Value: 24 vs. 0
  misc_feature: MA Experiment 20000180 PARAMETER Experiment Name: At_Germinating_Seeds_P Parameter: Tissue Value: Germinating Seeds
  misc_feature: MA Experiment ID: 20000264 Result: Up-regulated in Transcription
  misc_feature: MA Experiment 20000264 PARAMETER Experiment Name: At_Open_Flower_P Parameter: Age (day) Value: 21
  misc_feature: MA Experiment 20000264 PARAMETER Experiment Name: At_Open_Flower_P Parameter: Plant Line Value: WS
  misc_feature: MA Experiment 20000264 PARAMETER Experiment Name: At_Open_Flower_P Parameter: Tissue Value: Open Flower vs. Whole Plant
  misc_feature: MA Experiment ID: 20000527 Result: Down-regulated in Transcription
  misc_feature: MA Experiment 20000527 PARAMETER Experiment Name: At_10percent_PEG_P Parameter: Age (day) Value: 20
  misc_feature: MA Experiment 20000527 PARAMETER Experiment Name: At_10percent_PEG_P Parameter: Organism Value: A. thaliana
  misc_feature: MA Experiment 20000527 PARAMETER Experiment Name: At_10percent_PEG_P Parameter: Plant Line Value: WS
  misc_feature: MA Experiment 20000527 PARAMETER Experiment Name: At_10percent_PEG_P Parameter: Timepoint (day) Value: 20
  misc_feature: MA Experiment 20000527 PARAMETER Experiment Name: At_10percent_PEG_P Parameter: Tissue Value: Whole Plant
  misc_feature: MA Experiment 20000527 PARAMETER Experiment Name: At_10percent_PEG_P Parameter: Treatment Value: 10percent PEG vs. No Treatment
  misc_feature: MA Experiment ID: 20000794 Result: Up-regulated in Transcription
  misc_feature: MA Experiment 20000794 PARAMETER Experiment Name: At_Petals_P Parameter: Age (day) Value: 23-25 days
  misc_feature: MA Experiment 20000794 PARAMETER Experiment Name: At_Petals_P Parameter: Plant Line Value: WS
  misc_feature: MA Experiment 20000794 PARAMETER Experiment Name: At_Petals_P Parameter: Tissue Value: Petals vs. Whole plant
  misc_feature: MA Experiment ID: 20001761 Result: Down-regulated in Transcription
  misc_feature: MA Experiment 20001761 PARAMETER Experiment Name: At_50mM_NH4NO3_L-to-H_P Parameter: Timepoint (hr) Value: 4
  misc_feature: MA Experiment 20001761 PARAMETER Experiment Name: At_50mM_NH4NO3_L-to-H_P Parameter: Tissue Value: Siliques
  misc_feature: MA Experiment 20001761 PARAMETER Experiment Name: At_50mM_NH4NO3_L-to-H_P Parameter: Treatment Value: 50mM NH4NO3 vs 100mM Mannitol
  misc_feature: MA Experiment ID: 20001910 Result: Up-regulated in Transcription
  misc_feature: MA Experiment 20001910 PARAMETER Experiment Name: At_Drought_Reproduction_P Parameter: Age (day) Value: 37
  misc_feature: MA Experiment 20001910 PARAMETER Experiment Name: At_Drought_Reproduction_P Parameter: Organism Value: A. thaliana
  misc_feature: MA Experiment 20001910 PARAMETER Experiment Name: At_Drought_Reproduction_P Parameter: Plant Line Value: WS
  misc_feature: MA Experiment 20001910 PARAMETER Experiment Name: At_Drought_Reproduction_P Parameter: Timepoint (day) Value: 7
  misc_feature: MA Experiment 20001910 PARAMETER Experiment Name: At_Drought_Reproduction_P Parameter: Tissue Value: Flowers
  misc_feature: MA Experiment 20001910 PARAMETER Experiment Name: At_Drought_Reproduction_P Parameter: Treatment Value: Drought vs. No Drought
atcaaaaattgttgtatcaagattttctctcaggtgactgaacaacagagaaaaacatggcgaaaaaaggaaaagaagtgttgaacgctttggacgcagccaaaacgcagatgtaccatttcacagcgattgtaatcgcgggtatgggttttttcactgatgcttacgatctatttagcatctccctcgtcacgaagctcctaggccgcatatactaccacgttgatagctccaagaagcctggaacgctccctcctaatgttgctgccgctgttaatggtgtggccttctgcggtaccttagcaggccagctcttcttcggttggctcggtgacaagctcggccgcaagaaagtttacggtattaccttgatgctcatggtactatgttctctcgggtctggtctatcatttggtcactcagctaacggagtaatggccacactttgtttcttccggttctggctcggtttcggcataggcggcgactaccctctctcagccaccatcatgtcggaatacgccaacaagaaaacacgtggcgccttcatagcagccgtcttcgctatgcaaggcttcggaatcttagccggaggaatcgtgtctctcatcgtctcgagtacatttgaccatgccttcaaagcgcccacctacgaggttgatcctgttggctccactgttcctcaagcggattacgtgtggcggattgtgctcatgtttggagctatcccagctttacttacttattattggcggatgaaaatgccggaaactgctcggtataccgctcttgtagctcggaataccaaacaagccgcctccgatatgtctaaggtgcttcaagtggatctaattgcagaagaagaagcacaatcaaattcaaattcatcaaaccctaatttcaccttcggtttattcaccagagaattcgctcgccgtcacggtctccaccttctcggcacaaccaccacatggttcctcctagacatcgcctattacagcagcaacctcttccaaaaagacatctacacagcaatcggatggattcccgccgccgaaacaatgaacgcaatccacgaagtcttcaccgtctcaaaagctcaaaccctaatcgctctctgcggcaccgtccctggttactggttcaccgtcgcattcatcgatatactcggtcgattcttcatccagttgatgggatttatcttcatgacgatctttatgttcgctttagcgattccttatgatcattggagacatagagagaatcgaattggttttttgattatgtattcgttgactatgttcttcgctaattttggacctaatgcgacgacgtttgttgttcctgctgagatatttccggcgaggttgagatcgacttgtcatgggatatcggcggcgagtggtaaggcgggagcgattgttggagcgtttgggtttctttacgcggcgcagagttcggattcggagaagactgatgctggttatcctcctgggattggtgttaggaattcgttgttgatgcttgcttgtgttaatttcttggggattgtttttactctgttggttccggagtctaaagggaagtctttggaagagatttcgagagaagatgaggaacaaagcggcggagatacggtggtggagatgactgtggcaaattccggtagaaaagtcccggtttgattattttgtgttactcattttgtaaatttactctatatatgaaagtcccttgc

SEQ ID NO: 83779 - protein, 542 aa, Arabidopsis thaliana
  peptide (1)..(542): Ceres Seq. ID no. 12671721
  misc_feature (23)..(519): Pfam Name: Sugar (and other) transporter Pfam Description: Sugar (and other) transporter
  misc_feature (1)..(542): Homolog of NCBI NO: 15225748 NR Description: putative phosphate transporter; protein id: supported by cDNA: gi_18700177 [Arabidopsis thaliana]
  misc_feature (1)..(542): Homolog of NCBI NO: 8248034 NR Description: inorganic phosphate transporter [Nicotiana
  misc_feature (7)..(542): Homolog of NCBI NO: 7446753 NR Description: probable inorganic phosphate transport protein - >gi|2570523|gb|AAB82146.1| inorganic phosphate transporter
  misc_feature (1)..(542): Homolog of NCBI NO: 7446756 NR Description: probable inorganic phosphate transport protein - periwinkle >gi|2208908|dbj|BAA20522.1| phosphate transporter
  misc_feature (1)..(542): Homolog of NCBI NO: 12641853 NR Description: phosphate transporter [Nicotiana tabacum]
  misc_feature (4)..(542): Homolog of NCBI NO: 6177892 NR Description: Phospate transpoter [Nicotiana tabacum]
  misc_feature (7)..(542): Homolog of NCBI NO: 7446754 NR Description: probable inorganic phosphate transport protein - >gi|3687391|emb|CAA76075.1| putative phosphate transporter
  misc_feature (7)..(540): Homolog of NCBI NO: 5053118 NR Description: inorganic phosphate transporter [Solanum
  misc_feature (7)..(540): Homolog of NCBI NO: 7446748 NR Description: phosphate transport protein PT1 - potato
  misc_feature (8)..(542): Homolog of NCBI NO: 12697486 NR Description: phosphate transporter [Sesbania rostrata]
MAKKGKEVLNALDAAKTQMYHFTAIVIAGMGFFTDAYDLFSISLVTKLLGRIYYHVDSSKKPGTLPPNVAAAVNGVAFCGTLAGQLFFGWLGDKLGRKKVYGITLMLMVLCSLGSGLSFGHSANGVMATLCFFRFWLGFGIGGDYPLSATIMSEYANKKTRGAFIAAVFAMQGFGILAGGIVSLIVSSTFDHAFKAPTYEVDPVGSTVPQADYVWRIVLMFGAIPALLTYYWRMKMPETARYTALVARNTKQAASDMSKVLQVDLIAEEEAQSNSNSSNPNFTFGLFTREFARRHGLHLLGTTTTWFLLDIAYYSSNLFQKDIYTAIGWIPAAETMNAIHEVFTVSKAQTLIALCGTVPGYWFTVAFIDILGRFFIQLMGFIFMTIFMFALAIPYDHWRHRENRIGFLIMYSLTMFFANFGPNATTFVVPAEIFPARLRSTCHGISAASGKAGAIVGAFGFLYAAQSSDSEKTDAGYPPGIGVRNSLLMLACVNFLGIVFTLLVPESKGKSLEEISREDEEQSGGDTVVEMTVANSGRKVPV

SEQ ID NO: 83780 - protein, 524 aa, Arabidopsis thaliana
  peptide (1)..(524): Ceres Seq. ID no. 12671722
  misc_feature (5)..(501): Pfam Name: Sugar (and other) transporter Pfam Description: Sugar (and other) transporter
  misc_feature (1)..(524): Homolog of NCBI NO: 15225748 NR Description: putative phosphate transporter; protein id: supported by cDNA: gi_18700177 [Arabidopsis thaliana]
  misc_feature (1)..(524): Homolog of NCBI NO: 8248034 NR Description: inorganic phosphate transporter [Nicotiana
  misc_feature (1)..(524): Homolog of NCBI NO: 7446753 NR Description: probable inorganic phosphate transport protein - >gi|2570523|gb|AAB82146.1| inorganic phosphate transporter
  misc_feature (1)..(524): Homolog of NCBI NO: 7446756 NR Description: probable inorganic phosphate transport protein - periwinkle >gi|2208908|dbj|BAA20522.1| phosphate transporter
  misc_feature (1)..(524): Homolog of NCBI NO: 12641853 NR Description: phosphate transporter [Nicotiana tabacum]
  misc_feature (1)..(524): Homolog of NCBI NO: 6177892 NR Description: Phospate transpoter [Nicotiana tabacum]
  misc_feature (1)..(524): Homolog of NCBI NO: 7446754 NR Description: probable inorganic phosphate transport protein - >gi|3687391|emb|CAA76075.1| putative phosphate transporter
  misc_feature (1)..(522): Homolog of NCBI NO: 5053118 NR Description: inorganic phosphate transporter [Solanum
  misc_feature (1)..(522): Homolog of NCBI NO: 7446748 NR Description: phosphate transport protein PT1 - potato
  misc_feature (1)..(524): Homolog of NCBI NO: 12697486 NR Description: phosphate transporter [Sesbania rostrata]
MYHFTAIVIAGMGFFTDAYDLFSISLVTKLLGRIYYHVDSSKKPGTLPPNVAAAVNGVAFCGTLAGQLFFGWLGDKLGRKKVYGITLMLMVLCSLGSGLSFGHSANGVMATLCFFRFWLGFGIGGDYPLSATIMSEYANKKTRGAFIAAVFAMQGFGILAGGIVSLIVSSTFDHAFKAPTYEVDPVGSTVPQADYVWRIVLMFGAIPALLTYYWRMKMPETARYTALVARNTKQAASDMSKVLQVDLIAEEEAQSNSNSSNPNFTFGLFTREFARRHGLHLLGTTTTWFLLDIAYYSSNLFQKDIYTAIGWIPAAETMNAIHEVFTVSKAQTLIALCGTVPGYWFTVAFIDILGRFFIQLMGFIFMTIFMFALAIPYDHWRHRENRIGFLIMYSLTMFFANFGPNATTFVVPAEIFPARLRSTCHGISAASGKAGAIVGAFGFLYAAQSSDSEKTDAGYPPGIGVRNSLLMLACVNFLGIVFTLLVPESKGKSLEEISREDEEQSGGDTVVEMTVANSGRKVPV

SEQ ID NO: 83781 - protein, 513 aa, Arabidopsis thaliana
  peptide (1)..(513): Ceres Seq. ID no. 12671723
  misc_feature (1)..(490): Pfam Name: Sugar (and other) transporter Pfam Description: Sugar (and other) transporter
  misc_feature (1)..(513): Homolog of NCBI NO: 15225748 NR Description: putative phosphate transporter; protein id: supported by cDNA: gi_18700177 [Arabidopsis thaliana]
  misc_feature (1)..(513): Homolog of NCBI NO: 8248034 NR Description: inorganic phosphate transporter [Nicotiana
  misc_feature (1)..(513): Homolog of NCBI NO: 7446753 NR Description: probable inorganic phosphate transport protein - >gi|2570523|gb|AAB82146.1| inorganic phosphate transporter
  misc_feature (1)..(513): Homolog of NCBI NO: 7446756 NR Description: probable inorganic phosphate transport protein - periwinkle >gi|2208908|dbj|BAA20522.1| phosphate transporter
  misc_feature (1)..(513): Homolog of NCBI NO: 12641853 NR Description: phosphate transporter [Nicotiana tabacum]
  misc_feature (1)..(513): Homolog of NCBI NO: 6177892 NR Description: Phospate transpoter [Nicotiana tabacum]
  misc_feature (1)..(513): Homolog of NCBI NO: 7446754 NR Description: probable inorganic phosphate transport protein - >gi|3687391|emb|CAA76075.1| putative phosphate transporter
  misc_feature (1)..(511): Homolog of NCBI NO: 5053118 NR Description: inorganic phosphate transporter [Solanum
  misc_feature (1)..(511): Homolog of NCBI NO: 7446748 NR Description: phosphate transport protein PT1 - potato
  misc_feature (1)..(513): Homolog of NCBI NO: 12697486 NR Description: phosphate transporter [Sesbania rostrata]
MGFFTDAYDLFSISLVTKLLGRIYYHVDSSKKPGTLPPNVAAAVNGVAFCGTLAGQLFFGWLGDKLGRKKVYGITLMLMVLCSLGSGLSFGHSANGVMATLCFFRFWLGFGIGGDYPLSATIMSEYANKKTRGAFIAAVFAMQGFGILAGGIVSLIVSSTFDHAFKAPTYEVDPVGSTVPQADYVWRIVLMFGAIPALLTYYWRMKMPETARYTALVARNTKQAASDMSKVLQVDLIAEEEAQSNSNSSNPNFTFGLFTREFARRHGLHLLGTTTTWFLLDIAYYSSNLFQKDIYTAIGWIPAAETMNAIHEVFTVSKAQTLIALCGTVPGYWFTVAFIDILGRFFIQLMGFIFMTIFMFALAIPYDHWRHRENRIGFLIMYSLTMFFANFGPNATTFVVPAEIFPARLRSTCHGISAASGKAGAIVGAFGFLYAAQSSDSEKTDAGYPPGIGVRNSLLMLACVNFLGIVFTLLVPESKGKSLEEISREDEEQSGGDTVVEMTVANSGRKVPV

SEQ ID NO: 83782 - DNA, 282 bp, Arabidopsis thaliana
  misc_feature (1)..(282): Ceres Seq. ID no. 12671768
  misc_feature: MA Experiment ID: 20000307 Result: Up-regulated in Transcription
  misc_feature: MA Experiment 20000307 PARAMETER Experiment Name: At_Germinating_Seeds_Sub_P Parameter: Age (hr) Value: 24 vs. 0
  misc_feature: MA Experiment 20000307 PARAMETER Experiment Name: At_Germinating_Seeds_Sub_P Parameter: Organism Value: A. thaliana
  misc_feature: MA Experiment 20000307 PARAMETER Experiment Name: At_Germinating_Seeds_Sub_P Parameter: Plant Line Value: WS
  misc_feature: MA Experiment 20000307 PARAMETER Experiment Name: At_Germinating_Seeds_Sub_P Parameter: Tissue Value: Germinating Seeds
  misc_feature: MA Experiment ID: 20000327 Result: Down-regulated in Transcription
  misc_feature: MA Experiment 20000327 PARAMETER Experiment Name: At_42deg_Heat_Sub_P Parameter: Age (day) Value: 14
  misc_feature: MA Experiment 20000327 PARAMETER Experiment Name: At_42deg_Heat_Sub_P Parameter: Organism Value: A. thaliana
  misc_feature: MA Experiment 20000327 PARAMETER Experiment Name: At_42deg_Heat_Sub_P Parameter: Plant Line Value: WS
  misc_feature: MA Experiment 20000327 PARAMETER Experiment Name: At_42deg_Heat_Sub_P Parameter: Temperature (deg C) Value: 42 vs. 22
  misc_feature: MA Experiment 20000327 PARAMETER Experiment Name: At_42deg_Heat_Sub_P Parameter: Timepoint (hr) Value: 1
  misc_feature: MA Experiment 20000327 PARAMETER Experiment Name: At_42deg_Heat_Sub_P Parameter: Tissue Value: Aerial
atgggattctctggcttagctccgattcttcacaagctgataatcttttgggaccaacctgaagcccttcacacgacatgttatgagattttgatgggtttgctttatgggttaggagctctggtttatgcaactaggatcccagagagatggatgccgggtaaattcgatatagcaggacatagccatcagttgtttcatgttctggtagttgctggtgcgttcacgcactatagagctgggctagtgtatcttaagtggagagatattgaaggatgttga

SEQ ID NO: 83783 - protein, 93 aa, Arabidopsis thaliana; identical to SEQ ID NO: 75508
  peptide (1)..(93): Ceres Seq. ID no. 12671769
  misc_feature (1)..(82): Pfam Name: Uncharacterised protein family (Hly-III / UPF0073) Pfam Description: Uncharacterised protein family (Hly-III /
  misc_feature (1)..(93): Homolog of NCBI NO: 15226736 NR Description: unknown protein; protein id: At2g40710.1
  misc_feature (1)..(93): Homolog of NCBI NO: 15235657 NR Description: expressed protein; protein id: At4g37680.1, by cDNA: 262351., supported by cDNA: gi_13430521, supported by
  misc_feature (1)..(82): Homolog of NCBI NO: 15233813 NR Description: putative protein; protein id: At4g38320.1
  misc_feature (21)..(93): Homolog of NCBI NO: 15233780 NR Description: putative protein; protein id: At4g38290.1
  misc_feature (1)..(88): Homolog of NCBI NO: 18377749 NR Description: unknown protein [Arabidopsis thaliana]
  misc_feature (1)..(88): Homolog of NCBI NO: 30688829 NR Description: expressed protein [Arabidopsis thaliana]
  misc_feature (1)..(93): Homolog of NCBI NO: 15241302 NR Description: putative protein; protein id: At5g20270.1, by cDNA: 24749., supported by cDNA: gi_15982833 [Arabidopsis >gi|15982834|gb|AAL09764.1| AT5g20270/F5O24_160 [Arabidopsis
  misc_feature (1)..(88): Homolog of NCBI NO: 25407688 NR Description: hypothetical protein AT4g30850 [imported] - thaliana >gi|2980781|emb|CAA18208.1| putative protein thaliana] >gi|7269986|emb|CAB79803.1| putative protein
  misc_feature (2)..(78): Homolog of NCBI NO: 24649051 NR Description: CG5315-PB [Drosophila melanogaster]
  misc_feature (1)..(77): Homolog of NCBI NO: 13272399 NR Description: hypothetical protein [Arabidopsis thaliana]

SEQ ID NO: 83784 - protein, 62 aa, Arabidopsis thaliana; identical to SEQ ID NO: 69645
  peptide (1)..(62): Ceres Seq. ID no. 12671770
  misc_feature (1)..(51): Pfam Name: Uncharacterised protein family (Hly-III / UPF0073) Pfam Description: Uncharacterised protein family (Hly-III /
  misc_feature (1)..(62): Homolog of NCBI NO: 15226736 NR Description: unknown protein; protein id: At2g40710.1
  misc_feature (1)..(62): Homolog of NCBI NO: 15235657 NR Description: expressed protein; protein id: At4g37680.1, by cDNA: 262351., supported by cDNA: gi_13430521, supported by
  misc_feature (1)..(51): Homolog of NCBI NO: 15233813 NR Description: putative protein; protein id: At4g38320.1
  misc_feature (1)..(62): Homolog of NCBI NO: 15233780 NR Description: putative protein; protein id: At4g38290.1
  misc_feature (1)..(57): Homolog of NCBI NO: 18377749 NR Description: unknown protein [Arabidopsis thaliana]
  misc_feature (1)..(57): Homolog of NCBI NO: 30688829 NR Description: expressed protein [Arabidopsis thaliana]
  misc_feature (1)..(62): Homolog of NCBI NO: 15241302 NR Description: putative protein; protein id: At5g20270.1, by cDNA: 24749., supported by cDNA: gi_15982833 [Arabidopsis >gi|15982834|gb|AAL09764.1| AT5g20270/F5O24_160 [Arabidopsis
  misc_feature (1)..(57): Homolog of NCBI NO: 25407688 NR Description: hypothetical protein AT4g30850 [imported] - thaliana >gi|2980781|emb|CAA18208.1| putative protein thaliana] >gi|7269986|emb|CAB79803.1| putative protein
  misc_feature (1)..(47): Homolog of NCBI NO: 24649051 NR Description: CG5315-PB [Drosophila melanogaster]
  misc_feature (1)..(46): Homolog of NCBI NO: 13272399 NR Description: hypothetical protein [Arabidopsis thaliana]

SEQ ID NO: 83785 - DNA, 1741 bp, Arabidopsis thaliana
  misc_feature (1)..(1741): Ceres Seq. ID no. 12671785
  misc_feature: MA Experiment ID: 20000315 Result: Down-regulated in Transcription
  misc_feature: MA Experiment 20000315 PARAMETER Experiment Name: At_14day_Shoots-Roots_Sub_P Parameter: Age (day) Value: 14
  misc_feature: MA Experiment 20000315 PARAMETER Experiment Name: At_14day_Shoots-Roots_Sub_P Parameter: Organism Value: A. thaliana
  misc_feature: MA Experiment 20000315 PARAMETER Experiment Name: At_14day_Shoots-Roots_Sub_P Parameter: Plant Line Value: WS
  misc_feature: MA Experiment 20000315 PARAMETER Experiment Name: At_14day_Shoots-Roots_Sub_P Parameter: Tissue Value: Shoots vs. Whole Plant
  misc_feature: MA Experiment ID: 20000328 Result: Down-regulated in Transcription
  misc_feature: MA Experiment 20000328 PARAMETER Experiment Name: At_42deg_Heat_Sub_P Parameter: Age (day) Value: 14
  misc_feature: MA Experiment 20000328 PARAMETER Experiment Name: At_42deg_Heat_Sub_P Parameter: Organism Value: A. thaliana
  misc_feature: MA Experiment 20000328 PARAMETER Experiment Name: At_42deg_Heat_Sub_P Parameter: Plant Line Value: WS
  misc_feature: MA Experiment 20000328 PARAMETER Experiment Name: At_42deg_Heat_Sub_P Parameter: Temperature (deg C) Value: 42 vs. 22
  misc_feature: MA Experiment 20000328 PARAMETER Experiment Name: At_42deg_Heat_Sub_P Parameter: Timepoint (hr) Value: 6
  misc_feature: MA Experiment 20000328 PARAMETER Experiment Name: At_42deg_Heat_Sub_P Parameter: Tissue Value: Aerial
tctgatgagcatgtactccaagcttggagattttccttccgctgttgcagtatatggacgtatgcgtaagaagaattatatgtcatctaacatactcatcaatgggtatgttcgtgcaggcgatttggtaaatgcccggaaggtgtttgatgaaatgcctgatagaaagctcacaacttggaatgctatgattgctggtttgatccagtttgagtttaacgaagagggtttgagtttgtttagggaaatgcacggattggggttttcgcctgatgaatatactcttggtagtgtttttagcggatctgctgggttgaggtcagtgtctatagggcagcagattcatggctacacgatcaaatatgggcttgagttggatttagttgttaatagttcgttggctcatatgtatatgagaaatgggaaattgcaagatggcgagattgttataagatcaatgccggttcgtaatttggttgcatggaatacactcatcatggggaacgcgcaaaacggatgtcctgaaaccgtgctttatctgtataagatgatgaaaatctcaggttgtaggccgaacaagatcacatttgtaactgtgctcagttcttgttctgacttagcgataagaggtcaaggtcagcagattcatgcggaagctattaaaattggggctagctctgtcgtagctgtagttagttcattgatcagtatgtattcaaaatgtgggtgtcttggagatgcagctaaagctttctcggaacgtgaagatgaagatgaagtgatgtggagctcaatgatttctgcttatgggtttcatggacaaggcgatgaggcaatcgagctgtttaatactatggcagagcagacgaacatggagataaacgaggtcgcgtttctgaatttactttatgcgtgtagtcattctggcttaaaagacaaagggcttgagttgtttgacatgatggtggaaaaatacgggttcaagccaggtttaaagcactacacttgtgtggtggatttgctcggtcgagcaggctgtttggatcaagccgaggcaataataaggtctatgccaataaaaacagacattgttatatggaaaacattgttatctgcgtgtaacatacacaaaaacgcagaaatggcacagagagtctttaaagagattcttcagattgaccctaatgactctgcttgttacgtcctgcttgcaaatgttcacgcctcagctaagagatggcgcgatgtatcagaggtgagaaaatcgatgagagataagaatgtgaagaaagaagcgggaatcagctggtttgaacacaaaggtgaagttcatcagtttaagatgggagatcgctctcagtctaaatctaaagagatctattcatacctgaaagaactgactctggagatgaagctgaagggatacaagcctgatacagcgtcagtattgcatgatatggatgaggaggagaaagaatcagacttggtgcagcacagcgagaaactagcggttgcatttgcgctcatgatattacctgaaggtgcaccgattagaataatcaagaacttgcgggtttgcagtgattgccatgttgctttcaaatatatatcggtgatcaagaaccgagagatcacgttaagagatggtagtagattccatcatttcattaacggaaagtgttcttgcggcgattattggtagctgggcagttaaagtatgctatgactctctgcttcagag

SEQ ID NO: 83786 - protein, 566 aa, Arabidopsis thaliana
  peptide (1)..(566): Ceres Seq. ID no. 12671786
  misc_feature (159)..(193): Pfam Name: PPR repeat Pfam Description: PPR repeat
  misc_feature (2)..(566): Homolog of NCBI NO: 30688521 NR Description: pentatricopeptide (PPR) repeat-containing protein thaliana] >gi|18491267|gb|AAL69458.1| At2g41080/T3K9.15
  misc_feature (4)..(566): Homolog of NCBI NO: 7487619 NR Description: hypothetical protein At2g41080 [imported] - thaliana >gi|3402709|gb|AAD12003.1| hypothetical protein
  misc_feature (1)..(548): Homolog of NCBI NO: 28876027 NR Description: hypothetical protein [Oryza sativa (japonica
  misc_feature (7)..(566): Homolog of NCBI NO: 15236324 NR Description: putative protein; protein id: At4g13650.1
  misc_feature (30)..(566): Homolog of NCBI NO: 15232837 NR Description: hypothetical protein; protein id: At3g02010.1 thaliana] >gi|6091739|gb|AAF03451.1|AC010797_27 hypothetical [Arabidopsis thaliana] >gi|6513930|gb|AAF14834.1|AC011664_16
  misc_feature (29)..(69): Homolog of NCBI NO: 15232837 NR Description: hypothetical protein; protein id: At3g02010.1 thaliana] >gi|6091739|gb|AAF03451.1|AC010797_27 hypothetical [Arabidopsis thaliana] >gi|6513930|gb|AAF14834.1|AC011664_16
  misc_feature (19)..(566): Homolog of NCBI NO: 11281371 NR Description: hypothetical protein T8H10.30 - Arabidopsis >gi|6706414|emb|CAB66100.1| putative protein [Arabidopsis
  misc_feature (19)..(566): Homolog of NCBI NO: 30694644 NR Description: pentatricopeptide (PPR) repeat-containing protein
  misc_feature (19)..(566): Homolog of NCBI NO: 30794008 NR Description: unknown protein [Arabidopsis thaliana]
  misc_feature (1)..(566): Homolog of NCBI NO: 15229426 NR Description: hypothetical protein; protein id: At3g23330.1 thaliana] >gi|11994318|dbj|BAB02277.1|
LMSMYSKLGDFPSAVAVYGRMRKKNYMSSNILINGYVRAGDLVNARKVFDEMPDRKLTTWNAMIAGLIQFEFNEEGLSLFREMHGLGFSPDEYTLGSVFSGSAGLRSVSIGQQIHGYTIKYGLELDLVVNSSLAHMYMRNGKLQDGEIVIRSMPVRNLVAWNTLIMGNAQNGCPETVLYLYKMMKISGCRPNKITFVTVLSSCSDLAIRGQGQQIHAEAIKIGASSVVAVVSSLISMYSKCGCLGDAAKAFSEREDEDEVMWSSMISAYGFHGQGDEAIELFNTMAEQTNMEINEVAFLNLLYACSHSGLKDKGLELFDMMVEKYGFKPGLKHYTCVVDLLGRAGCLDQAEAIIRSMPIKTDIVIWKTLLSACNIHKNAEMAQRVFKEILQIDPNDSACYVLLANVHASAKRWRDVSEVRKSMRDKNVKKEAGISWFEHKGEVHQFKMGDRSQSKSKEIYSYLKELTLEMKLKGYKPDTASVLHDMDEEEKESDLVQHSEKLAVAFALMILPEGAPIRIIKNLRVCSDCHVAFKYISVIKNREITLRDGSRFHHFINGKCSCGDYW

SEQ ID NO: 83787 - protein, 565 aa, Arabidopsis thaliana
  peptide (1)..(565): Ceres Seq. ID no. 12671787
  misc_feature (158)..(192): Pfam Name: PPR repeat Pfam Description: PPR repeat
  misc_feature (1)..(565): Homolog of NCBI NO: 30688521 NR Description: pentatricopeptide (PPR) repeat-containing protein thaliana] >gi|18491267|gb|AAL69458.1| At2g41080/T3K9.15
  misc_feature (3)..(565): Homolog of NCBI NO: 7487619 NR Description: hypothetical protein At2g41080 [imported] - thaliana >gi|3402709|gb|AAD12003.1| hypothetical protein
  misc_feature (1)..(547): Homolog of NCBI NO: 28876027 NR Description: hypothetical protein [Oryza sativa (japonica
  misc_feature (6)..(565): Homolog of NCBI NO: 15236324 NR Description: putative protein; protein id: At4g13650.1
  misc_feature (29)..(565): Homolog of NCBI NO: 15232837 NR Description: hypothetical protein; protein id: At3g02010.1 thaliana] >gi|6091739|gb|AAF03451.1|AC010797_27 hypothetical [Arabidopsis thaliana] >gi|6513930|gb|AAF14834.1|AC011664_16
  misc_feature (28)..(68): Homolog of NCBI NO: 15232837 NR Description: hypothetical protein; protein id: At3g02010.1 thaliana] >gi|6091739|gb|AAF03451.1|AC010797_27 hypothetical [Arabidopsis thaliana] >gi|6513930|gb|AAF14834.1|AC011664_16
  misc_feature (18)..(565): Homolog of NCBI NO: 11281371 NR Description: hypothetical protein T8H10.30 - Arabidopsis >gi|6706414|emb|CAB66100.1| putative protein [Arabidopsis
  misc_feature (18)..(565): Homolog of NCBI NO: 30794008 NR Description: unknown protein [Arabidopsis thaliana]
  misc_feature (18)..(565): Homolog of NCBI NO: 30694644 NR Description: pentatricopeptide (PPR) repeat-containing protein
  misc_feature (1)..(565): Homolog of NCBI NO: 15229426 NR Description: hypothetical protein; protein id: At3g23330.1 thaliana] >gi|11994318|dbj|BAB02277.1|
MSMYSKLGDFPSAVAVYGRMRKKNYMSSNILINGYVRAGDLVNARKVFDEMPDRKLTTWNAMIAGLIQFEFNEEGLSLFREMHGLGFSPDEYTLGSVFSGSAGLRSVSIGQQIHGYTIKYGLELDLVVNSSLAHMYMRNGKLQDGEIVIRSMPVRNLVAWNTLIMGNAQNGCPETVLYLYKMMKISGCRPNKITFVTVLSSCSDLAIRGQGQQIHAEAIKIGASSVVAVVSSLISMYSKCGCLGDAAKAFSEREDEDEVMWSSMISAYGFHGQGDEAIELFNTMAEQTNMEINEVAFLNLLYACSHSGLKDKGLELFDMMVEKYGFKPGLKHYTCVVDLLGRAGCLDQAEAIIRSMPIKTDIVIWKTLLSACNIHKNAEMAQRVFKEILQIDPNDSACYVLLANVHASAKRWRDVSEVRKSMRDKNVKKEAGISWFEHKGEVHQFKMGDRSQSKSKEIYSYLKELTLEMKLKGYKPDTASVLHDMDEEEKESDLVQHSEKLAVAFALMILPEGAPIRIIKNLRVCSDCHVAFKYISVIKNREITLRDGSRFHHFINGKCSCGDYW

SEQ ID NO: 83788 - protein, 563 aa, Arabidopsis thaliana
  peptide (1)..(563): Ceres Seq. ID no. 12671788
  misc_feature (156)..(190): Pfam Name: PPR repeat Pfam Description: PPR repeat
  misc_feature (1)..(563): Homolog of NCBI NO: 30688521 NR Description: pentatricopeptide (PPR) repeat-containing protein thaliana] >gi|18491267|gb|AAL69458.1| At2g41080/T3K9.15
  misc_feature (1)..(563): Homolog of NCBI NO: 7487619 NR Description: hypothetical protein At2g41080 [imported] - thaliana >gi|3402709|gb|AAD12003.1| hypothetical protein
  misc_feature (1)..(545): Homolog of NCBI NO: 28876027 NR Description: hypothetical protein [Oryza sativa (japonica
  misc_feature (4)..(563): Homolog of NCBI NO: 15236324 NR Description: putative protein; protein id: At4g13650.1
  misc_feature (27)..(563): Homolog of NCBI NO: 15232837 NR Description: hypothetical protein; protein id: At3g02010.1 thaliana] >gi|6091739|gb|AAF03451.1|AC010797_27 hypothetical [Arabidopsis thaliana] >gi|6513930|gb|AAF14834.1|AC011664_16
  misc_feature (26)..(66): Homolog of NCBI NO: 15232837 NR Description: hypothetical protein; protein id: At3g02010.1 thaliana] >gi|6091739|gb|AAF03451.1|AC010797_27 hypothetical [Arabidopsis thaliana] >gi|6513930|gb|AAF14834.1|AC011664_16
  misc_feature (16)..(563): Homolog of NCBI NO: 11281371 NR Description: hypothetical protein T8H10.30 - Arabidopsis >gi|6706414|emb|CAB66100.1| putative protein [Arabidopsis
  misc_feature (16)..(563): Homolog of NCBI NO: 30794008 NR Description: unknown protein [Arabidopsis thaliana]
  misc_feature (16)..(563): Homolog of NCBI NO: 30694644 NR Description: pentatricopeptide (PPR) repeat-containing protein
  misc_feature (1)..(563): Homolog of NCBI NO: 15229426 NR Description: hypothetical protein; protein id: At3g23330.1 thaliana] >gi|11994318|dbj|BAB02277.1|
MYSKLGDFPSAVAVYGRMRKKNYMSSNILINGYVRAGDLVNARKVFDEMPDRKLTTWNAMIAGLIQFEFNEEGLSLFREMHGLGFSPDEYTLGSVFSGSAGLRSVSIGQQIHGYTIKYGLELDLVVNSSLAHMYMRNGKLQDGEIVIRSMPVRNLVAWNTLIMGNAQNGCPETVLYLYKMMKISGCRPNKITFVTVLSSCSDLAIRGQGQQIHAEAIKIGASSVVAVVSSLISMYSKCGCLGDAAKAFSEREDEDEVMWSSMISAYGFHGQGDEAIELFNTMAEQTNMEINEVAFLNLLYACSHSGLKDKGLELFDMMVEKYGFKPGLKHYTCVVDLLGRAGCLDQAEAIIRSMPIKTDIVIWKTLLSACNIHKNAEMAQRVFKEILQIDPNDSACYVLLANVHASAKRWRDVSEVRKSMRDKNVKKEAGISWFEHKGEVHQFKMGDRSQSKSKEIYSYLKELTLEMKLKGYKPDTASVLHDMDEEEKESDLVQHSEKLAVAFALMILPEGAPIRIIKNLRVCSDCHVAFKYISVIKNREITLRDGSRFHHFINGKCSCGDYW

SEQ ID NO: 83789 - DNA, 1116 bp, Arabidopsis thaliana
  misc_feature (1)..(1116): Ceres Seq. ID no. 12671789
  misc_feature: MA Experiment ID: 20000166 Result: Up-regulated in Transcription
  misc_feature: MA Experiment 20000166 PARAMETER Experiment Name: At_100uM_ABA_P Parameter: Age (day) Value: 14
  misc_feature: MA Experiment 20000166 PARAMETER Experiment Name: At_100uM_ABA_P Parameter: Organism Value: A. thaliana
  misc_feature: MA Experiment 20000166 PARAMETER Experiment Name: At_100uM_ABA_P Parameter: Plant Line Value: WS
  misc_feature: MA Experiment 20000166 PARAMETER Experiment Name: At_100uM_ABA_P Parameter: Timepoint (hr) Value: 1
  misc_feature: MA Experiment 20000166 PARAMETER Experiment Name: At_100uM_ABA_P Parameter: Tissue Value: Aerial
  misc_feature: MA Experiment 20000166 PARAMETER Experiment Name: At_100uM_ABA_P Parameter: Treatment Value: 100uM ABA vs. No Treatment
  misc_feature: MA Experiment ID: 20000169 Result: Up-regulated in Transcription
  misc_feature: MA Experiment 20000169 PARAMETER Experiment Name: At_100uM_ABA_P Parameter: Age (day) Value: 14
  misc_feature: MA Experiment 20000169 PARAMETER Experiment Name: At_100uM_ABA_P Parameter: Organism Value: A. thaliana
  misc_feature: MA Experiment 20000169 PARAMETER Experiment Name: At_100uM_ABA_P Parameter: Plant Line Value: WS
  misc_feature: MA Experiment 20000169 PARAMETER Experiment Name: At_100uM_ABA_P Parameter: Timepoint (hr) Value: 6
  misc_feature: MA Experiment 20000169 PARAMETER Experiment Name: At_100uM_ABA_P Parameter: Tissue Value: Aerial
  misc_feature: MA Experiment 20000169 PARAMETER Experiment Name: At_100uM_ABA_P Parameter: Treatment Value: 100uM ABA vs. No Treatment
  misc_feature: MA Experiment ID: 20000171 Result: Down-regulated in Transcription
  misc_feature: MA Experiment 20000171 PARAMETER Experiment Name: At_42deg_Heat_P Parameter: Age (day) Value: 14
  misc_feature: MA Experiment 20000171 PARAMETER Experiment Name: At_42deg_Heat_P Parameter: Organism Value: A. thaliana
  misc_feature: MA Experiment 20000171 PARAMETER Experiment Name: At_42deg_Heat_P Parameter: Plant Line Value: WS
  misc_feature: MA Experiment 20000171 PARAMETER Experiment Name: At_42deg_Heat_P Parameter: Temperature (deg C) Value: 42 vs. 22
  misc_feature: MA Experiment 20000171 PARAMETER Experiment Name: At_42deg_Heat_P Parameter: Timepoint (hr) Value: 1
  misc_feature: MA Experiment 20000171 PARAMETER Experiment Name: At_42deg_Heat_P Parameter: Tissue Value: Aerial
  misc_feature: MA Experiment ID: 20000173 Result: Down-regulated in Transcription
  misc_feature: MA Experiment 20000173 PARAMETER Experiment Name: At_42deg_Heat_P Parameter: Age (day) Value: 14
  misc_feature: MA Experiment 20000173 PARAMETER Experiment Name: At_42deg_Heat_P Parameter: Organism Value: A. thaliana
  misc_feature: MA Experiment 20000173 PARAMETER Experiment Name: At_42deg_Heat_P Parameter: Plant Line Value: WS
  misc_feature: MA Experiment 20000173 PARAMETER Experiment Name: At_42deg_Heat_P Parameter: Temperature (deg C) Value: 42 vs. 22
  misc_feature: MA Experiment 20000173 PARAMETER Experiment Name: At_42deg_Heat_P Parameter: Timepoint (hr) Value: 6
  misc_feature: MA Experiment 20000173 PARAMETER Experiment Name: At_42deg_Heat_P Parameter: Tissue Value: Aerial
  misc_feature: MA Experiment ID: 20000185 Result: Up-regulated in Transcription
  misc_feature: MA Experiment 20000185 PARAMETER Experiment Name: At_Roots__P Parameter: Age (day) Value: 7 vs. 21
  misc_feature: MA Experiment 20000185 PARAMETER Experiment Name: At_Roots__P Parameter: Organism Value: A. thaliana
  misc_feature: MA Experiment 20000185 PARAMETER Experiment Name: At_Roots__P Parameter: Tissue Value: Roots vs. Whole Plant
  misc_feature: MA Experiment ID: 20000234 Result: Up-regulated in Transcription
  misc_feature: MA Experiment 20000234 PARAMETER Experiment Name: At_Siliques_P Parameter: Age (day) Value: 21
  misc_feature: MA Experiment 20000234 PARAMETER Experiment Name: At_Siliques_P Parameter: Organism Value: A. thaliana
  misc_feature: MA Experiment 20000234 PARAMETER Experiment Name: At_Siliques_P Parameter: Plant Line Value: WS
  misc_feature: MA Experiment 20000234 PARAMETER Experiment Name: At_Siliques_P Parameter: Tissue Value: Less Than 5mm Siliques vs. Whole Plant
  misc_feature: MA Experiment ID: 20000265 Result: Up-regulated in Transcription
  misc_feature: MA Experiment 20000265 PARAMETER Experiment Name: At_Open_Flower_P Parameter: Age (day) Value: 21
  misc_feature: MA Experiment 20000265 PARAMETER Experiment Name: At_Open_Flower_P Parameter: Plant Line Value: WS
  misc_feature: MA Experiment 20000265 PARAMETER Experiment Name: At_Open_Flower_P Parameter: Tissue Value: Closed Flower vs. Whole Plant
  misc_feature: MA Experiment ID: 20000267 Result: Up-regulated in Transcription
  misc_feature: MA Experiment 20000267 PARAMETER Experiment Name: At_Drought_P Parameter: Age (day) Value: 7
  misc_feature: MA Experiment 20000267 PARAMETER Experiment Name: At_Drought_P Parameter: Organism Value: A. thaliana
  misc_feature: MA Experiment 20000267 PARAMETER Experiment Name: At_Drought_P Parameter: Plant Line Value: WS
  misc_feature: MA Experiment 20000267 PARAMETER Experiment Name: At_Drought_P Parameter: Timepoint (hr) Value: 6
  misc_feature: MA Experiment 20000267 PARAMETER Experiment Name: At_Drought_P Parameter: Tissue Value: Whole Plant
  misc_feature: MA Experiment 20000267 PARAMETER Experiment Name: At_Drought_P Parameter: Treatment Value: Drought vs. No Drought
  misc_feature: MA Experiment ID: 20000286 Result: Up-regulated in Transcription
  misc_feature: MA Experiment 20000286 PARAMETER Experiment Name: At_Open_Flower_P Parameter: Age (day) Value: 21
  misc_feature: MA Experiment 20000286 PARAMETER Experiment Name: At_Open_Flower_P Parameter: Plant Line Value: WS
  misc_feature: MA Experiment 20000286 PARAMETER Experiment Name: At_Open_Flower_P Parameter: Tissue Value: Half Open vs. Whole Plant
  misc_feature: MA Experiment ID: 20000288 Result: Up-regulated in Transcription
  misc_feature: MA Experiment 20000288 PARAMETER Experiment Name: At_Drought_P Parameter: Age (day) Value: 7
  misc_feature: MA Experiment 20000288 PARAMETER Experiment Name: At_Drought_P Parameter: Organism Value: A. thaliana
  misc_feature: MA Experiment 20000288 PARAMETER Experiment Name: At_Drought_P Parameter: Plant Line Value: WS
  misc_feature: MA Experiment 20000288 PARAMETER Experiment Name: At_Drought_P Parameter: Timepoint (hr) Value: 1
  misc_feature: MA Experiment 20000288 PARAMETER Experiment Name: At_Drought_P Parameter: Tissue Value: Whole Plant
  misc_feature: MA Experiment 20000288 PARAMETER Experiment Name: At_Drought_P Parameter: Treatment Value: Drought vs. No Drought
  misc_feature: MA Experiment ID: 20000436 Result: Up-regulated in Transcription
  misc_feature: MA Experiment 20000436 PARAMETER Experiment Name: At_Drought_P Parameter: Age (day) Value: 7
  misc_feature: MA Experiment 20000436 PARAMETER Experiment Name: At_Drought_P Parameter: Organism Value: A. thaliana
  misc_feature: MA Experiment 20000436 PARAMETER Experiment Name: At_Drought_P Parameter: Plant Line Value: WS
  misc_feature: MA Experiment 20000436 PARAMETER Experiment Name: At_Drought_P Parameter: Timepoint (hr) Value: 12
  misc_feature: MA Experiment 20000436 PARAMETER Experiment Name: At_Drought_P Parameter: Tissue Value: Whole Plant
  misc_feature: MA Experiment 20000436 PARAMETER Experiment Name: At_Drought_P Parameter: Treatment Value: Drought vs. No Drought
  misc_feature: MA Experiment ID: 20000437 Result: Up-regulated in Transcription
  misc_feature: MA Experiment 20000437 PARAMETER Experiment Name: At_Drought_P Parameter: Age (day) Value: 8
  misc_feature: MA Experiment 20000437 PARAMETER Experiment Name: At_Drought_P Parameter: Organism Value: A. thaliana
  misc_feature: MA Experiment 20000437 PARAMETER Experiment Name: At_Drought_P Parameter: Plant Line Value: WS
  misc_feature: MA Experiment 20000437 PARAMETER Experiment Name: At_Drought_P Parameter: Timepoint (hr) Value: 24
  misc_feature: MA Experiment 20000437 PARAMETER Experiment Name: At_Drought_P Parameter: Tissue Value: Whole Plant
  misc_feature: MA Experiment 20000437 PARAMETER Experiment Name: At_Drought_P Parameter: Treatment Value: Drought vs. No Drought
  misc_feature: MA Experiment ID: 20000445 Result: Up-regulated in Transcription
  misc_feature: MA Experiment 20000445 PARAMETER Experiment Name: At_100uM_NAA__P Parameter: Age (day) Value: 14
  misc_feature: MA Experiment 20000445 PARAMETER Experiment Name: At_100uM_NAA__P Parameter: Organism Value: A. thaliana
  misc_feature: MA Experiment 20000445 PARAMETER Experiment Name: At_100uM_NAA__P Parameter: Plant Line Value: WS
  misc_feature: MA Experiment 20000445 PARAMETER Experiment Name: At_100uM_NAA__P Parameter: Timepoint (hr) Value: 6
  misc_feature: MA Experiment 20000445 PARAMETER Experiment Name: At_100uM_NAA__P Parameter: Tissue Value: Aerial
  misc_feature: MA Experiment 20000445 PARAMETER Experiment Name: At_100uM_NAA__P Parameter: Treatment Value: 100uM NAA vs. No Treatment
  misc_feature: MA Experiment ID: 20000496 Result: Up-regulated in Transcription
  misc_feature: MA Experiment 20000496 PARAMETER Experiment Name: At_Guard_Cells_P Parameter: Harvest Date Value: 7/19/2002
  misc_feature: MA Experiment 20000496 PARAMETER Experiment Name: At_Guard_Cells_P Parameter: Organism Value: Canola
  misc_feature: MA Experiment 20000496 PARAMETER Experiment Name: At_Guard_Cells_P Parameter: Tissue Value: Guard Cells vs. Leaves
  misc_feature: MA Experiment ID: 20000794 Result: Up-regulated in Transcription
  misc_feature: MA Experiment 20000794 PARAMETER Experiment Name: At_Petals_P Parameter: Age (day) Value: 23-25 days
  misc_feature: MA Experiment 20000794 PARAMETER Experiment Name: At_Petals_P Parameter: Plant Line Value: WS
  misc_feature: MA Experiment 20000794 PARAMETER Experiment Name: At_Petals_P Parameter: Tissue Value: Petals vs. Whole plant
  misc_feature: MA Experiment ID: 20001247 Result: Up-regulated in Transcription
  misc_feature: MA Experiment 20001247 PARAMETER Experiment Name: At_Far-red-induction_P Parameter: Age (day) Value: 7
  misc_feature: MA Experiment 20001247 PARAMETER Experiment Name: At_Far-red-induction_P Parameter: Light Value: Far-red vs. White
  misc_feature: MA Experiment 20001247 PARAMETER Experiment Name: At_Far-red-induction_P Parameter: Organism Value: A. thaliana
  misc_feature: MA Experiment 20001247 PARAMETER Experiment Name: At_Far-red-induction_P Parameter: Plant Line Value: Columbia
  misc_feature: MA Experiment 20001247 PARAMETER Experiment Name: At_Far-red-induction_P Parameter: Timepoint (hr) Value: 1
  misc_feature: MA Experiment 20001247 PARAMETER Experiment Name: At_Far-red-induction_P Parameter: Tissue Value: Whole Plant
  misc_feature: MA Experiment ID: 20001557 Result: Up-regulated in Transcription
  misc_feature: MA Experiment 20001557 PARAMETER Experiment Name: At_Drought_Soil_Dry_P Parameter: Age (day) Value: 27
  misc_feature: MA Experiment 20001557 PARAMETER Experiment Name: At_Drought_Soil_Dry_P Parameter: Organism Value: A. thaliana
  misc_feature: MA Experiment 20001557 PARAMETER Experiment Name: At_Drought_Soil_Dry_P Parameter: Plant Line Value: WS
  misc_feature: MA Experiment 20001557 PARAMETER Experiment Name: At_Drought_Soil_Dry_P Parameter: Post Timepoint (hr) Value: 3
  misc_feature: MA Experiment 20001557 PARAMETER Experiment Name: At_Drought_Soil_Dry_P Parameter: Post-Treatment Value: Re-Water vs. No Drought
  misc_feature: MA Experiment 20001557 PARAMETER Experiment Name: At_Drought_Soil_Dry_P Parameter: Timepoint (day) Value: 13
  misc_feature: MA Experiment 20001557 PARAMETER Experiment Name: At_Drought_Soil_Dry_P Parameter: Treatment Value: Drought vs. No Drought
  misc_feature: MA Experiment ID: 20001558 Result: Up-regulated in Transcription
  misc_feature: MA Experiment 20001558 PARAMETER Experiment Name: At_Drought_Soil_Dry_P Parameter: Age (day) Value: 27
  misc_feature: MA Experiment 20001558 PARAMETER Experiment Name: At_Drought_Soil_Dry_P Parameter: Organism Value: A. thaliana
  misc_feature: MA Experiment 20001558 PARAMETER Experiment Name: At_Drought_Soil_Dry_P Parameter: Plant Line Value: WS
  misc_feature: MA Experiment 20001558 PARAMETER Experiment Name: At_Drought_Soil_Dry_P Parameter: Post Timepoint (hr) Value: 6
  misc_feature: MA Experiment 20001558 PARAMETER Experiment Name: At_Drought_Soil_Dry_P Parameter: Post-Treatment Value: Re-Water vs. No Drought
  misc_feature: MA Experiment 20001558 PARAMETER Experiment Name: At_Drought_Soil_Dry_P Parameter: Timepoint (day) Value: 13
  misc_feature: MA Experiment 20001558 PARAMETER Experiment Name: At_Drought_Soil_Dry_P Parameter: Treatment Value: Drought vs. No Drought
  misc_feature: MA Experiment ID: 20001560 Result: Up-regulated in Transcription
  misc_feature: MA Experiment 20001560 PARAMETER Experiment Name: At_Drought_Soil_Dry_P Parameter: Age (day) Value: 28
  misc_feature: MA Experiment 20001560 PARAMETER Experiment Name: At_Drought_Soil_Dry_P Parameter: Organism Value: A. thaliana
  misc_feature: MA Experiment 20001560 PARAMETER Experiment Name: At_Drought_Soil_Dry_P Parameter: Plant Line Value: WS
  misc_feature: MA Experiment 20001560 PARAMETER Experiment Name: At_Drought_Soil_Dry_P Parameter: Post Timepoint (hr) Value: None
  misc_feature: MA Experiment 20001560 PARAMETER Experiment Name: At_Drought_Soil_Dry_P Parameter: Post-Treatment Value: None
  misc_feature: MA Experiment 20001560 PARAMETER Experiment Name: At_Drought_Soil_Dry_P Parameter: Timepoint (day) Value: 14
  misc_feature: MA Experiment 20001560 PARAMETER Experiment Name: At_Drought_Soil_Dry_P Parameter: Treatment Value: Drought vs. No Drought
  misc_feature: MA Experiment ID: 20001904 Result: Up-regulated in Transcription
  misc_feature: MA Experiment 20001904 PARAMETER Experiment Name: At_Drought_Reproduction_P Parameter: Age (day) Value: 37
  misc_feature: MA Experiment 20001904 PARAMETER Experiment Name: At_Drought_Reproduction_P Parameter: Organism Value: A. thaliana
  misc_feature: MA Experiment 20001904 PARAMETER Experiment Name: At_Drought_Reproduction_P Parameter: Plant Line Value: WS
  misc_feature: MA Experiment 20001904 PARAMETER Experiment Name: At_Drought_Reproduction_P Parameter: Timepoint (day) Value: 7
  misc_feature: MA Experiment 20001904 PARAMETER Experiment Name: At_Drought_Reproduction_P Parameter: Tissue Value: Rosettes
  misc_feature: MA Experiment 20001904 PARAMETER Experiment Name: At_Drought_Reproduction_P Parameter: Treatment Value: Drought vs. No Drought
  misc_feature: MA Experiment ID: 20001905 Result: Up-regulated in Transcription
  misc_feature: MA Experiment 20001905 PARAMETER Experiment Name: At_Drought_Reproduction_P Parameter: Age (day) Value: 40
  misc_feature: MA Experiment 20001905 PARAMETER Experiment Name: At_Drought_Reproduction_P Parameter: Organism Value: A. thaliana
  misc_feature: MA Experiment 20001905 PARAMETER Experiment Name: At_Drought_Reproduction_P Parameter: Plant Line Value: WS
  misc_feature: MA Experiment 20001905 PARAMETER Experiment Name: At_Drought_Reproduction_P Parameter: Timepoint (day) Value: 10
  misc_feature: MA Experiment 20001905 PARAMETER Experiment Name: At_Drought_Reproduction_P Parameter: Tissue Value: Rosettes
  misc_feature: MA Experiment 20001905 PARAMETER Experiment Name: At_Drought_Reproduction_P Parameter: Treatment Value: Drought vs. No Drought
  misc_feature: MA Experiment ID: 20001911 Result: Down-regulated in Transcription
  misc_feature: MA Experiment 20001911 PARAMETER Experiment Name: At_Drought_Reproduction_P Parameter: Age (day) Value: 40
  misc_feature: MA Experiment 20001911 PARAMETER Experiment Name: At_Drought_Reproduction_P Parameter: Organism Value: A. thaliana
  misc_feature: MA Experiment 20001911 PARAMETER Experiment Name: At_Drought_Reproduction_P Parameter: Plant Line Value: WS
  misc_feature: MA Experiment 20001911 PARAMETER Experiment Name: At_Drought_Reproduction_P Parameter: Timepoint (day) Value: 10
  misc_feature: MA Experiment 20001911 PARAMETER Experiment Name: At_Drought_Reproduction_P Parameter: Tissue Value: Flowers
  misc_feature: MA Experiment 20001911 PARAMETER Experiment Name: At_Drought_Reproduction_P Parameter: Treatment Value: Drought vs. No Drought
atggagaaacagtacctcactttcatttctttttgtttctccatcaccatttgtgggttcctcatagtttcttggctggcaagaagcataatccgtaatgggattagaacattaacatggagaaaggaaacgaagaggaagaaaaagaatcaagaagatgaaaacaaaatgtctctcctggatttgccggacttaaccttagactgcatattagagaagctctcaccatcagagctctgtgcaatgactagtgtttgctccgagctaagagataagtgtgtaagcgatcatctatgggagaagcatatggagacaaaatggggaagattgatgggtgatgcagcgattcaagagtggaaatctcacgttgctacgataatgagatgtctcacaagtagtagtagtagtagtagaaagagtaaaccaaactggagttcgaggtttgttgcgaatttgaaaccctttgcatggttaagttcaaaccatggttgtgaaaacagaggatcatcatcatatttggcacctatagattctgtgatgtattggtactcgaatcttgaaaatggcaagttttggttccctgctcaagtctacaatcgcgagaacggacatgttggattcatgatgtcttgttacgatgctaagatcagatacgatttcaagactgatacatttcaagctagatactcggcacatggccggcgagcggcggaggaaaaggtgacgtggcagaggctgagaccgtctcaagacgacacaaagtcacgtgatctgcacgtgtcagattgtttgcacggacttcgacctggtgaccatttcgagatccaatggcgacgaaccaaagagttcccttatggttggtggttcggaatcgttggtcatctacaaaactgcgacggcgtacaaaattgtcgttgcgactctgacgagaatgtggtgatggagttcagacaattcagaccggaatcaccgtggagaagaacggtgataaagaggaaagaccaccgtgagacgggaaatgaagaaaacggtttctacggcggagtaaagaaattgggtacggaggaagagatttctacgtggaagcaattgtggccatcacaagccttggagtag

SEQ ID NO: 83790 - protein, 371 aa, Arabidopsis thaliana
  peptide (1)..(371): Ceres Seq. ID no. 12671790
  misc_feature (1)..(371): Homolog of NCBI NO: 30688559 NR Description: F-box protein family [Arabidopsis thaliana]
  misc_feature (51)..(371): Homolog of NCBI NO: 34903372 NR Description: unnamed protein product [Oryza sativa (japonica group)] >gi|6498442|dbj|BAA87845.1| unnamed protein product
  misc_feature (55)..(371): Homolog of NCBI NO: 30685347 NR Description: F-box protein family [Arabidopsis thaliana] unknown protein [Arabidopsis thaliana] unknown protein [Arabidopsis thaliana]
  misc_feature (56)..(285): Homolog of NCBI NO: 15225802 NR Description: unknown protein; protein id: At2g26850.1
  misc_feature (310)..(371): Homolog of NCBI NO: 15225802 NR Description: unknown protein; protein id: At2g26850.1
  misc_feature (166)..(366): Homolog of NCBI NO: 7459607 NR Description: hypothetical protein At2g41170 [imported] - thaliana >gi|3402701|gb|AAD11995.1| unknown protein [Arabidopsis
  misc_feature (57)..(286): Homolog of NCBI NO: 7487431 NR Description: hypothetical protein At2g32560 [imported] - thaliana >gi|3298544|gb|AAC25938.1| unknown protein [Arabidopsis
  misc_feature (38)..(285): Homolog of NCBI NO: 34909060 NR Description: P0702B09.33 [Oryza sativa (japonica
  misc_feature (57)..(129): Homolog of NCBI NO: 7459607 NR Description: hypothetical protein At2g41170 [imported] - thaliana >gi|3402701|gb|AAD11995.1| unknown protein [Arabidopsis
  misc_feature (310)..(357): Homolog of NCBI NO: 7459607 NR Description: hypothetical protein At2g41170 [imported] - thaliana >gi|3402701|gb|AAD11995.1| unknown protein [Arabidopsis
MEKQYLTFISFCFSITICGFLIVSWLARSIIRNGIRTLTWRKETKRKKKNQEDENKMSLLDLPDLTLDCILEKLSPSELCAMTSVCSELRDKCVSDHLWEKHMETKWGRLMGDAAIQEWKSHVATIMRCLTSSSSSSRKSKPNWSSRFVANLKPFAWLSSNHGCENRGSSSYLAPIDSVMYWYSNLENGKFWFPAQVYNRENGHVGFMMSCYDAKIRYDFKTDTFQARYSAHGRRAAEEKVTWQRLRPSQDDTKSRDLHVSDCLHGLRPGDHFEIQWRRTKEFPYGWWFGIVGHLQNCDGVQNCRCDSDENVVMEFRQFRPESPWRRTVIKRKDHRETGNEENGFYGGVKKLGTEEEISTWKQLWPSQALE

SEQ ID NO: 83791 - protein, 315 aa, Arabidopsis thaliana
  peptide (1)..(315): Ceres Seq. ID no. 12671791
  misc_feature (1)..(315): Homolog of NCBI NO: 30688559 NR Description: F-box protein family [Arabidopsis thaliana]
  misc_feature (1)..(315): Homolog of NCBI NO: 34903372 NR Description: unnamed protein product [Oryza sativa (japonica group)] >gi|6498442|dbj|BAA87845.1| unnamed protein product
  misc_feature (1)..(315): Homolog of NCBI NO: 30685347 NR Description: F-box protein family [Arabidopsis thaliana] unknown protein [Arabidopsis thaliana] unknown protein [Arabidopsis thaliana]
  misc_feature (1)..(229): Homolog of NCBI NO: 15225802 NR Description: unknown protein; protein id: At2g26850.1
  misc_feature (254)..(315): Homolog of NCBI NO: 15225802 NR Description: unknown protein; protein id: At2g26850.1
  misc_feature (110)..(310): Homolog of NCBI NO: 7459607 NR Description: hypothetical protein At2g41170 [imported] - thaliana >gi|3402701|gb|AAD11995.1| unknown protein [Arabidopsis
  misc_feature (1)..(230): Homolog of NCBI NO: 7487431 NR Description: hypothetical protein At2g32560 [imported] - thaliana >gi|3298544|gb|AAC25938.1| unknown protein [Arabidopsis
  misc_feature (1)..(229): Homolog of NCBI NO: 34909060 NR Description: P0702B09.33 [Oryza sativa (japonica
  misc_feature (1)..(73): Homolog of NCBI NO: 7459607 NR Description: hypothetical protein At2g41170 [imported] - thaliana >gi|3402701|gb|AAD11995.1| unknown protein [Arabidopsis
  misc_feature (254)..(301): Homolog of NCBI NO: 7459607 NR Description: hypothetical protein At2g41170 [imported] - thaliana >gi|3402701|gb|AAD11995.1| unknown protein [Arabidopsis
MSLLDLPDLTLDCILEKLSPSELCAMTSVCSELRDKCVSDHLWEKHMETKWGRLMGDAAIQEWKSHVATIMRCLTSSSSSSRKSKPNWSSRFVANLKPFAWLSSNHGCENRGSSSYLAPIDSVMYWYSNLENGKFWFPAQVYNRENGHVGFMMSCYDAKIRYDFKTDTFQARYSAHGRRAAEEKVTWQRLRPSQDDTKSRDLHVSDCLHGLRPGDHFEIQWRRTKEFPYGWWFGIVGHLQNCDGVQNCRCDSDENVVMEFRQFRPESPWRRTVIKRKDHRETGNEENGFYGGVKKLGTEEEISTWKQLWPSQALE

SEQ ID NO: 83792 - protein, 290 aa, Arabidopsis thaliana
  peptide (1)..(290): Ceres Seq. ID no. 12671792
  misc_feature (1)..(290): Homolog of NCBI NO: 30688559 NR Description: F-box protein family [Arabidopsis thaliana]
  misc_feature (1)..(290): Homolog of NCBI NO: 34903372 NR Description: unnamed protein product [Oryza sativa (japonica group)] >gi|6498442|dbj|BAA87845.1| unnamed protein product
  misc_feature (1)..(290): Homolog of NCBI NO: 30685347 NR Description: F-box protein family [Arabidopsis thaliana] unknown protein [Arabidopsis thaliana] unknown protein [Arabidopsis thaliana]
  misc_feature (1)..(204): Homolog of NCBI NO: 15225802 NR Description: unknown protein; protein id: At2g26850.1
  misc_feature (229)..(290): Homolog of NCBI NO: 15225802 NR Description: unknown protein; protein id: At2g26850.1
  misc_feature (85)..(285): Homolog of NCBI NO: 7459607 NR Description: hypothetical protein At2g41170 [imported] - thaliana >gi|3402701|gb|AAD11995.1| unknown protein [Arabidopsis
  misc_feature (1)..(205): Homolog of NCBI NO: 7487431 NR Description: hypothetical protein At2g32560 [imported] - thaliana >gi|3298544|gb|AAC25938.1| unknown protein [Arabidopsis
  misc_feature (1)..(204): Homolog of NCBI NO: 34909060 NR Description: P0702B09.33 [Oryza sativa (japonica
  misc_feature (1)..(48): Homolog of NCBI NO: 7459607 NR Description: hypothetical protein At2g41170 [imported] - thaliana >gi|3402701|gb|AAD11995.1| unknown protein [Arabidopsis
  misc_feature (229)..(276): Homolog of NCBI NO: 7459607 NR Description: hypothetical protein At2g41170 [imported] - thaliana >gi|3402701|gb|AAD11995.1| unknown protein [Arabidopsis
MTSVCSELRDKCVSDHLWEKHMETKWGRLMGDAAIQEWKSHVATIMRCLTSSSSSSRKSKPNWSSRFVANLKPFAWLSSNHGCENRGSSSYLAPIDSVMYWYSNLENGKFWFPAQVYNRENGHVGFMMSCYDAKIRYDFKTDTFQARYSAHGRRAAEEKVTWQRLRPSQDDTKSRDLHVSDCLHGLRPGDHFEIQWRRTKEFPYGWWFGIVGHLQNCDGVQNCRCDSDENVVMEFRQFRPESPWRRTVIKRKDHRETGNEENGFYGGVKKLGTEEEISTWKQLWPSQALE

SEQ ID NO: 83793 - DNA, 1100 bp, Arabidopsis thaliana
  misc_feature (1)..(1100): Ceres Seq. ID no. 12671801
  misc_feature: MA Experiment ID: 20000307 Result: Up-regulated in Transcription
  misc_feature: MA Experiment 20000307 PARAMETER Experiment Name: At_Germinating_Seeds_Sub_P Parameter: Age (hr) Value: 24 vs. 0
  misc_feature: MA Experiment 20000307 PARAMETER Experiment Name: At_Germinating_Seeds_Sub_P Parameter: Organism Value: A. thaliana
  misc_feature: MA Experiment 20000307 PARAMETER Experiment Name: At_Germinating_Seeds_Sub_P Parameter: Plant Line Value: WS
  misc_feature: MA Experiment 20000307 PARAMETER Experiment Name: At_Germinating_Seeds_Sub_P Parameter: Tissue Value: Germinating Seeds
  misc_feature: MA Experiment ID: 20000314 Result: Up-regulated in Transcription
  misc_feature: MA Experiment 20000314 PARAMETER Experiment Name: At_14day_Shoots-Roots_Sub_P Parameter: Age (day) Value: 14
  misc_feature: MA Experiment 20000314 PARAMETER Experiment Name: At_14day_Shoots-Roots_Sub_P Parameter: Organism Value: A. thaliana
  misc_feature: MA Experiment 20000314 PARAMETER Experiment Name: At_14day_Shoots-Roots_Sub_P Parameter: Plant Line Value: WS
  misc_feature: MA Experiment 20000314 PARAMETER Experiment Name: At_14day_Shoots-Roots_Sub_P Parameter: Tissue Value: Roots vs. Whole Plant
  misc_feature: MA Experiment ID: 20000348 Result: Up-regulated in Transcription
  misc_feature: MA Experiment 20000348 PARAMETER Experiment Name: At_100uM_ABA_Sub_P Parameter: Age (day) Value: 14
  misc_feature: MA Experiment 20000348 PARAMETER Experiment Name: At_100uM_ABA_Sub_P Parameter: Organism Value: A. thaliana
  misc_feature: MA Experiment 20000348 PARAMETER Experiment Name: At_100uM_ABA_Sub_P Parameter: Plant Line Value: WS
  misc_feature: MA Experiment 20000348 PARAMETER Experiment Name: At_100uM_ABA_Sub_P Parameter: Timepoint (hr) Value: 1
  misc_feature: MA Experiment 20000348 PARAMETER Experiment Name: At_100uM_ABA_Sub_P Parameter: Tissue Value: Aerial
  misc_feature: MA Experiment 20000348 PARAMETER Experiment Name: At_100uM_ABA_Sub_P Parameter: Treatment Value: 100uM ABA vs. No Treatment
  misc_feature: MA Experiment ID: 20000440 Result: Up-regulated in Transcription
  misc_feature: MA Experiment 20000440 PARAMETER Experiment Name: At_Closed-Flower__Sub_P Parameter: Tissue Value: Closed Flower vs. Whole Plant
acacaactctcccctcaaaacattccatcaaaggaaaaaaatggcgacacaaaatgcgattctgaaaaaagctctcatcattttcctctttactctaaccatcatgacaggaaccgcgttttcacaaaactgtggtacaaacgggtgtaaaggcaacatgtgctgcagcaggtggggatattgtggtaccacaaaagcctactgtggcactgggtgccagagtggaccttgcaactctaaacctaaacctactccgactccaagcggtagtggcggtctaaatgctggtcctcgtggtaccatagcaagcgttatcacaccagcgttcttcaacagcatcatgagtaaagtcggaagcggttgcccagcgaaagggttttacactcgccaggctttcatcgcagccgctgaatcgttcgcagcctacaaaggaactgttgctaagcgtgagattgccgccatgttggctcagttctctcacgaatctggaagtttttgttacaaagaagaaatagccagaggaaggtactgctcaccaagcacaacatatccttgtcaacccggaaagaactactatggtcgcggtccgatccaaatcacatggaactacaactatggtgcagccggaaagttccttggacttcctctcttgaaggacccagatatggtggctcgtagcccaactgtggctttccagtgtgccatgtggttttggaacaagaatgtgcgtccggttttgagccaagggtttggtgcaaccacgaggaggatcaacggtggtgaatgtaatggtgggcgtccagctgcagtgcagagcagggttaaccattacttggacttctgcaagaagcttggggtcactcctggaaccaatctctcatgttgaagacactactagtttatgagggtttttcattaatgtcgtctggttaagaatttcgtatcgaataataaagtgaagtcgaaaatactagaacttataaaatttgtaagagattagaagttatattgtgtggttgatgtctcttaaggtaactatattgtgtgttgtttgtatccgctcgctagcataagtaataaagatggaagtattatccaat

SEQ ID NO: 83794 - protein, 294 aa, Arabidopsis thaliana
  peptide (1)..(294): Ceres Seq. ID no. 12671802
  misc_feature (104)..(294): Pfam Name: Chitinase class I Pfam Description: Chitinase class I
  misc_feature (14)..(294): Homolog of NCBI NO: 15224319 NR Description: glycosyl hydrolase family 19 (chitinase); protein At2g43610.1, supported by cDNA: gi_18252844 [Arabidopsis
  misc_feature (14)..(294): Homolog of NCBI NO: 15224321 NR Description: glycosyl hydrolase family 19 (chitinase); protein At2g43620.1 [Arabidopsis thaliana] >gi|25289346|pir||D84868
  misc_feature (14)..(294): Homolog of NCBI NO: 15223591 NR Description: glycosyl hydrolase family 19 (chitinase); protein At1g56680.1 [Arabidopsis thaliana] >gi|25289340|pir||F96608
  misc_feature (23)..(294): Homolog of NCBI NO: 15224314 NR Description: glycosyl hydrolase family 19 (chitinase); protein At2g43600.1 [Arabidopsis thaliana] >gi|25289344|pir||B84868
  misc_feature (19)..(294): Homolog of NCBI NO: 584929 NR Description: Basic endochitinase CHB4 precursor
  misc_feature (19)..(294): Homolog of NCBI NO: 15224312 NR Description: glycosyl hydrolase family 19 (chitinase); protein At2g43590.1 [Arabidopsis thaliana] >gi|25289343|pir||A84868
  misc_feature (23)..(294): Homolog of NCBI NO: 2570160 NR Description: chitinase [Chenopodium amaranticolor]
  misc_feature (24)..(294): Homolog of NCBI NO: 2570162 NR Description: chitinase [Chenopodium amaranticolor]
  misc_feature (21)..(294): Homolog of NCBI NO: 2570166 NR Description: chitinase [Chenopodium amaranticolor]
  misc_feature (30)..(162): Homolog of NCBI NO: 10880381 NR Description: chitinase [Vitis vinifera]
HNSPLKTFHQRKKMATQNAILKKALIIFLFTLTIMTGTAFSQNCGTNGCKGNMCCSRWGYCGTTKAYCGTGCQSGPCNSKPKPTPTPSGSGGLNAGPRGTIASVITPAFFNSIMSKVGSGCPAKGFYTRQAFIAAAESFAAYKGTVAKREIAAMLAQFSHESGSFCYKEEIARGRYCSPSTTYPCQPGKNYYGRGPIQITWNYNYGAAGKFLGLPLLKDPDMVARSPTVAFQCAMWFWNKNVRPVLSQGFGATTRRINGGECNGGRPAAVQSRVNHYLDFCKKLGVTPGTNLSC

SEQ ID NO: 83795 - protein, 281 aa, Arabidopsis thaliana
  peptide (1)..(281): Ceres Seq. ID no. 12671803
  misc_feature (91)..(281): Pfam Name: Chitinase class I Pfam Description: Chitinase class I
  misc_feature (1)..(281): Homolog of NCBI NO: 15224319 NR Description: glycosyl hydrolase family 19 (chitinase); protein At2g43610.1, supported by cDNA: gi_18252844 [Arabidopsis
  misc_feature (1)..(281): Homolog of NCBI NO: 15224321 NR Description: glycosyl hydrolase family 19 (chitinase); protein At2g43620.1 [Arabidopsis thaliana] >gi|25289346|pir||D84868
  misc_feature (1)..(281): Homolog of NCBI NO: 15223591 NR Description: glycosyl hydrolase family 19 (chitinase); protein At1g56680.1 [Arabidopsis thaliana] >gi|25289340|pir||F96608
  misc_feature (10)..(281): Homolog of NCBI NO: 15224314 NR Description: glycosyl hydrolase family 19 (chitinase); protein At2g43600.1 [Arabidopsis thaliana] >gi|25289344|pir||B84868
  misc_feature (6)..(281): Homolog of NCBI NO: 584929 NR Description: Basic endochitinase CHB4 precursor
  misc_feature (6)..(281): Homolog of NCBI NO: 15224312 NR Description: glycosyl hydrolase family 19 (chitinase); protein At2g43590.1 [Arabidopsis thaliana] >gi|25289343|pir||A84868
  misc_feature (10)..(281): Homolog of NCBI NO: 2570160 NR Description: chitinase [Chenopodium amaranticolor]
  misc_feature (11)..(281): Homolog of NCBI NO: 2570162 NR Description: chitinase [Chenopodium amaranticolor]
  misc_feature (8)..(281): Homolog of NCBI NO: 2570166 NR Description: chitinase [Chenopodium amaranticolor]
  misc_feature (17)..(149): Homolog of NCBI NO: 10880381 NR Description: chitinase [Vitis vinifera]
MATQNAILKKALIIFLFTLTIMTGTAFSQNCGTNGCKGNMCCSRWGYCGTTKAYCGTGCQSGPCNSKPKPTPTPSGSGGLNAGPRGTIASVITPAFFNSIMSKVGSGCPAKGFYTRQAFIAAAESFAAYKGTVAKREIAAMLAQFSHESGSFCYKEEIARGRYCSPSTTYPCQPGKNYYGRGPIQITWNYNYGAAGKFLGLPLLKDPDMVARSPTVAFQCAMWFWNKNVRPVLSQGFGATTRRINGGECNGGRPAAVQSRVNHYLDFCKKLGVTPGTNLSC

SEQ ID NO: 83796 - protein, 260 aa, Arabidopsis thaliana
  peptide (1)..(260): Ceres Seq. ID no. 12671804
  misc_feature (70)..(260): Pfam Name: Chitinase class I Pfam Description: Chitinase class I
  misc_feature (1)..(260): Homolog of NCBI NO: 15224319 NR Description: glycosyl hydrolase family 19 (chitinase); protein At2g43610.1, supported by cDNA: gi_18252844 [Arabidopsis
  misc_feature (1)..(260): Homolog of NCBI NO: 15224321 NR Description: glycosyl hydrolase family 19 (chitinase); protein At2g43620.1 [Arabidopsis thaliana] >gi|25289346|pir||D84868
  misc_feature (1)..(260): Homolog of NCBI NO: 15223591 NR Description: glycosyl hydrolase family 19 (chitinase); protein At1g56680.1 [Arabidopsis thaliana] >gi|25289340|pir||F96608
  misc_feature (1)..(260): Homolog of NCBI NO: 15224314 NR Description: glycosyl hydrolase family 19 (chitinase); protein At2g43600.1 [Arabidopsis thaliana] >gi|25289344|pir||B84868
  misc_feature (1)..(260): Homolog of NCBI NO: 584929 NR Description: Basic endochitinase CHB4 precursor
  misc_feature (1)..(260): Homolog of NCBI NO: 15224312 NR Description: glycosyl hydrolase family 19 (chitinase); protein At2g43590.1 [Arabidopsis thaliana] >gi|25289343|pir||A84868
  misc_feature (1)..(260): Homolog of NCBI NO: 2570160 NR Description: chitinase [Chenopodium amaranticolor]
  misc_feature (1)..(260): Homolog of NCBI NO: 2570162 NR Description: chitinase [Chenopodium amaranticolor]
  misc_feature (1)..(260): Homolog of NCBI NO: 2570166 NR Description: chitinase [Chenopodium amaranticolor]
  misc_feature (1)..(128): Homolog of NCBI NO: 10880381 NR Description: chitinase [Vitis vinifera]
MTGTAFSQNCGTNGCKGNMCCSRWGYCGTTKAYCGTGCQSGPCNSKPKPTPTPSGSGGLNAGPRGTIASVITPAFFNSIMSKVGSGCPAKGFYTRQAFIAAAESFAAYKGTVAKREIAAMLAQFSHESGSFCYKEEIARGRYCSPSTTYPCQPGKNYYGRGPIQITWNYNYGAAGKFLGLPLLKDPDMVARSPTVAFQCAMWFWNKNVRPVLSQGFGATTRRINGGECNGGRPAAVQSRVNHYLDFCKKLGVTPGTNLSC

SEQ ID NO: 83797 - DNA, 1350 bp, Arabidopsis thaliana
  misc_feature (1)..(1350): Ceres Seq. ID no. 12671813
  misc_feature: MA Experiment ID: 20000306 Result: Down-regulated in Transcription
  misc_feature: MA Experiment 20000306 PARAMETER Experiment Name: At_Germinating_Seeds_Sub_P Parameter: Age (hr) Value: 6 vs. 0
  misc_feature: MA Experiment 20000306 PARAMETER Experiment Name: At_Germinating_Seeds_Sub_P Parameter: Organism Value: A. thaliana
  misc_feature: MA Experiment 20000306 PARAMETER Experiment Name: At_Germinating_Seeds_Sub_P Parameter: Plant Line Value: WS
  misc_feature: MA Experiment 20000306 PARAMETER Experiment Name: At_Germinating_Seeds_Sub_P Parameter: Tissue Value: Germinating Seeds
  misc_feature: MA Experiment ID: 20000327 Result: Down-regulated in Transcription
  misc_feature: MA Experiment 20000327 PARAMETER Experiment Name: At_42deg_Heat_Sub_P Parameter: Age (day) Value: 14
  misc_feature: MA Experiment 20000327 PARAMETER Experiment Name: At_42deg_Heat_Sub_P Parameter: Organism Value: A. thaliana
  misc_feature: MA Experiment 20000327 PARAMETER Experiment Name: At_42deg_Heat_Sub_P Parameter: Plant Line Value: WS
  misc_feature: MA Experiment 20000327 PARAMETER Experiment Name: At_42deg_Heat_Sub_P Parameter: Temperature (deg C) Value: 42 vs. 22
  misc_feature: MA Experiment 20000327 PARAMETER Experiment Name: At_42deg_Heat_Sub_P Parameter: Timepoint (hr) Value: 1
  misc_feature: MA Experiment 20000327 PARAMETER Experiment Name: At_42deg_Heat_Sub_P Parameter: Tissue Value: Aerial
  misc_feature: MA Experiment ID: 20000328 Result: Down-regulated in Transcription
  misc_feature: MA Experiment 20000328 PARAMETER Experiment Name: At_42deg_Heat_Sub_P Parameter: Age (day) Value: 14
  misc_feature: MA Experiment 20000328 PARAMETER Experiment Name: At_42deg_Heat_Sub_P Parameter: Organism Value: A. thaliana
  misc_feature: MA Experiment 20000328 PARAMETER Experiment Name: At_42deg_Heat_Sub_P Parameter: Plant Line Value: WS
  misc_feature: MA Experiment 20000328 PARAMETER Experiment Name: At_42deg_Heat_Sub_P Parameter: Temperature (deg C) Value: 42 vs. 22
  misc_feature: MA Experiment 20000328 PARAMETER Experiment Name: At_42deg_Heat_Sub_P Parameter: Timepoint (hr) Value: 6
  misc_feature: MA Experiment 20000328 PARAMETER Experiment Name: At_42deg_Heat_Sub_P Parameter: Tissue Value: Aerial
  misc_feature: MA Experiment ID: 20000346 Result: Up-regulated in Transcription
  misc_feature: MA Experiment 20000346 PARAMETER Experiment Name: At_2mM_SA_Sub_P Parameter: Age (day) Value: 14
  misc_feature: MA Experiment 20000346 PARAMETER Experiment Name: At_2mM_SA_Sub_P Parameter: Organism Value: A. thaliana
  misc_feature: MA Experiment 20000346 PARAMETER Experiment Name: At_2mM_SA_Sub_P Parameter: Plant Line Value: WS
  misc_feature: MA Experiment 20000346 PARAMETER Experiment Name: At_2mM_SA_Sub_P Parameter: Timepoint (hr) Value: 1
  misc_feature: MA Experiment 20000346 PARAMETER Experiment Name: At_2mM_SA_Sub_P Parameter: Tissue Value: Aerial
  misc_feature: MA Experiment 20000346 PARAMETER Experiment Name: At_2mM_SA_Sub_P Parameter: Treatment Value: 2mM SA vs. No Treatment
  misc_feature: MA Experiment ID: 20000347 Result: Up-regulated in Transcription
  misc_feature: MA Experiment 20000347 PARAMETER Experiment Name: At_2mM_SA_Sub_P Parameter: Age (day) Value: 14
  misc_feature: MA Experiment 20000347 PARAMETER Experiment Name: At_2mM_SA_Sub_P Parameter: Organism Value: A. thaliana
  misc_feature: MA Experiment 20000347 PARAMETER Experiment Name: At_2mM_SA_Sub_P Parameter: Plant Line Value: WS
  misc_feature: MA Experiment 20000347 PARAMETER Experiment Name: At_2mM_SA_Sub_P Parameter: Timepoint (hr) Value: 6
  misc_feature: MA Experiment 20000347 PARAMETER Experiment Name: At_2mM_SA_Sub_P Parameter: Tissue Value: Aerial
  misc_feature: MA Experiment 20000347 PARAMETER Experiment Name: At_2mM_SA_Sub_P Parameter: Treatment Value: 2mM SA vs. No Treatment
  misc_feature: MA Experiment ID: 20000440 Result: Up-regulated in Transcription
  misc_feature: MA Experiment 20000440 PARAMETER Experiment Name: At_Closed-Flower__Sub_P Parameter: Tissue Value: Closed Flower vs. Whole Plant
atggagaagatgagaggacatgtattagcagtgccatttccaagccaaggacacatcaccccgattcgccaattctgcaaacgacttcactccaaaggtttcaaaaccactcacactctcaccacttttatcttcaacacaatccacctcgacccatctagtcctatctccatagccacaatctccgatggctatgaccagggagggttctcatcagccggttctgtcccggagtacctacaaaacttcaaaaccttcggctccaaaaccgtcgctgatatcatccgcaaacaccagagtactgataaccctattacttgtatcgtctatgattctttcatgccttgggcgcttgaccttgcaatggattttggtctagctgcggctcctttcttcacgcagtcttgcgccgttaactatatcaattatctttcttacataaacaatggtagcttgacacttcccatcaaggatttgcctcttcttgagctccaagatttgcctactttcgtcactcctactggttcacaccttgcttactttgagatggtgcttcaacagttcaccaacttcgacaaagctgatttcgtactcgttaattccttccatgacctcgaccttcatgaagaggagttgttgtcgaaagtatgtcctgtgttgacaattggtccaactgttccatcaatgtacttagaccaacagatcaaatcagacaacgactatgatctgaacctctttgacttaaaagaagctgccttatgcactgactggctagacaagaggccagaaggatcggtagtatatatagcttttgggagcatggctaaactgagtagtgagcagatggaagagattgcttcggcgataagcaacttcagctacctctgggttgtcagagcttcagaggagtcaaagctcccaccagggtttcttgaaacagtggataaagacaagagcttggtcttgaagtggagtcctcagcttcaagttctgtcaaacaaagccatcggttgtttcatgactcactgtggctggaactcaaccatggagggtttgagtttaggggttcccatggtggctatgcctcaatggactgatcaaccaatgaatgcaaagtatatacaagatgtatggaaggttggggttcgtgtgaaagcagagaaagaaagtggcatttgcaaaagagaggagattgagtttagcatcaaggaagtgatggaaggagagaagagcaaagagatgaaagagaatgcgggaaaatggagagacttggctgtgaagtcactcagtgaaggaggttctacagatatcaacattaacgaatttgtatcaaaaattcaaatcaaataa

SEQ ID NO: 83798 - protein, 449 aa, Arabidopsis thaliana
  peptide (1)..(449): Ceres Seq. ID no. 12671814
  misc_feature (6)..(449): Pfam Name: UDP-glucoronosyl and UDP-glucosyl transferase Pfam Description: UDP-glucoronosyl and UDP-glucosyl transferase
  misc_feature (1)..(449): Homolog of NCBI NO: 15224372 NR Description: putative glucosyltransferase; protein id: [Arabidopsis thaliana] >gi|25286795|pir||B84871 probable
  misc_feature (1)..(449): Homolog of NCBI NO: 15224368 NR Description: putative glucosyltransferase; protein id: supported by cDNA: 34407., supported by cDNA: gi_17064813
  misc_feature (1)..(446): Homolog of NCBI NO: 7385017 NR Description: UDP-glucose:salicylic acid glucosyltransferase
  misc_feature (7)..(444): Homolog of NCBI NO: 15221233 NR Description: putative indole-3-acetate protein id: At1g05680.1 [Arabidopsis thaliana]
  misc_feature (5)..(446): Homolog of NCBI NO: 15824451 NR Description: thiohydroximate S-glucosyltransferase [Brassica
  misc_feature (3)..(446): Homolog of NCBI NO: 15221668 NR Description: UDP-glycosyltransferase family; protein id: supported by cDNA: gi_14423541 [Arabidopsis thaliana]
  misc_feature (2)..(446): Homolog of NCBI NO: 15225134 NR Description: putative glucosyltransferase; protein id: supported by cDNA: 114997. [Arabidopsis thaliana]
  misc_feature (2)..(446): Homolog of NCBI NO: 21536917 NR Description: putative glucosyltransferase [Arabidopsis
  misc_feature (2)..(444): Homolog of NCBI NO: 15225138 NR Description: UDP-glycosyltransferase family; protein id: supported by cDNA: gi_15810476 [Arabidopsis thaliana]
  misc_feature (159)..(447): Homolog of NCBI NO: 2501499 NR Description: Indole-3-acetate beta-glucosyltransferase (IAA-GLU
MEKMRGHVLAVPFPSQGHITPIRQFCKRLHSKGFKTTHTLTTFIFNTIHLDPSSPISIATISDGYDQGGFSSAGSVPEYLQNFKTFGSKTVADIIRKHQSTDNPITCIVYDSFMPWALDLAMDFGLAAAPFFTQSCAVNYINYLSYINNGSLTLPIKDLPLLELQDLPTFVTPTGSHLAYFEMVLQQFTNFDKADFVLVNSFHDLDLHEEELLSKVCPVLTIGPTVPSMYLDQQIKSDNDYDLNLFDLKEAALCTDWLDKRPEGSVVYIAFGSMAKLSSEQMEEIASAISNFSYLWVVRASEESKLPPGFLETVDKDKSLVLKWSPQLQVLSNKAIGCFMTHCGWNSTMEGLSLGVPMVAMPQWTDQPMNAKYIQDVWKVGVRVKAEKESGICKREEIEFSIKEVMEGEKSKEMKENAGKWRDLAVKSLSEGGSTDININEFVSKIQIK

SEQ ID NO: 83799 - protein, 446 aa, Arabidopsis thaliana
  peptide (1)..(446): Ceres Seq. ID no. 12671815
  misc_feature (3)..(446): Pfam Name: UDP-glucoronosyl and UDP-glucosyl transferase Pfam Description: UDP-glucoronosyl and UDP-glucosyl transferase
  misc_feature (1)..(446): Homolog of NCBI NO: 15224372 NR Description: putative glucosyltransferase; protein id: [Arabidopsis thaliana] >gi|25286795|pir||B84871 probable
  misc_feature (1)..(446): Homolog of NCBI NO: 15224368 NR Description: putative glucosyltransferase; protein id: supported by cDNA: 34407., supported by cDNA: gi_17064813
  misc_feature (1)..(443): Homolog of NCBI NO: 7385017 NR Description: UDP-glucose:salicylic acid glucosyltransferase
  misc_feature (4)..(441): Homolog of NCBI NO: 15221233 NR Description: putative indole-3-acetate protein id: At1g05680.1 [Arabidopsis thaliana]
  misc_feature (2)..(443): Homolog of NCBI NO: 15824451 NR Description: thiohydroximate S-glucosyltransferase [Brassica
  misc_feature (1)..(443): Homolog of NCBI NO: 15221668 NR Description: UDP-glycosyltransferase family; protein id: supported by cDNA: gi_14423541 [Arabidopsis thaliana]
  misc_feature (1)..(443): Homolog of NCBI NO: 15225134 NR Description: putative glucosyltransferase; protein id: supported by cDNA: 114997. [Arabidopsis thaliana]
  misc_feature (1)..(443): Homolog of NCBI NO: 21536917 NR Description: putative glucosyltransferase [Arabidopsis
  misc_feature (1)..(441): Homolog of NCBI NO: 15225138 NR Description: UDP-glycosyltransferase family; protein id: supported by cDNA: gi_15810476 [Arabidopsis thaliana]
  misc_feature (156)..(444): Homolog of NCBI NO: 2501499 NR Description: Indole-3-acetate beta-glucosyltransferase (IAA-GLU
MRGHVLAVPFPSQGHITPIRQFCKRLHSKGFKTTHTLTTFIFNTIHLDPSSPISIATISDGYDQGGFSSAGSVPEYLQNFKTFGSKTVADIIRKHQSTDNPITCIVYDSFMPWALDLAMDFGLAAAPFFTQSCAVNYINYLSYINNGSLTLPIKDLPLLELQDLPTFVTPTGSHLAYFEMVLQQFTNFDKADFVLVNSFHDLDLHEEELLSKVCPVLTIGPTVPSMYLDQQIKSDNDYDLNLFDLKEAALCTDWLDKRPEGSVVYIAFGSMAKLSSEQMEEIASAISNFSYLWVVRASEESKLPPGFLETVDKDKSLVLKWSPQLQVLSNKAIGCFMTHCGWNSTMEGLSLGVPMVAMPQWTDQPMNAKYIQDVWKVGVRVKAEKESGICKREEIEFSIKEVMEGEKSKEMKENAGKWRDLAVKSLSEGGSTDININEFVSKIQIK

SEQ ID NO: 83800 - protein, 336 aa, Arabidopsis thaliana
  peptide (1)..(336): Ceres Seq. ID no. 12671816
  misc_feature (1)..(336): Pfam Name: UDP-glucoronosyl and UDP-glucosyl transferase Pfam Description: UDP-glucoronosyl and UDP-glucosyl transferase
  misc_feature (1)..(336): Homolog of NCBI NO: 15224372 NR Description: putative glucosyltransferase; protein id: [Arabidopsis thaliana] >gi|25286795|pir||B84871 probable
  misc_feature (1)..(336): Homolog of NCBI NO: 15224368 NR Description: putative glucosyltransferase; protein id: supported by cDNA: 34407., supported by cDNA: gi_17064813
  misc_feature (1)..(333): Homolog of NCBI NO: 7385017 NR Description: UDP-glucose:salicylic acid glucosyltransferase
  misc_feature (1)..(331): Homolog of NCBI NO: 15221233 NR Description: putative indole-3-acetate protein id: At1g05680.1 [Arabidopsis thaliana]
  misc_feature (1)..(333): Homolog of NCBI NO: 15824451 NR Description: thiohydroximate S-glucosyltransferase [Brassica
  misc_feature (1)..(333): Homolog of NCBI NO: 15221668 NR Description: UDP-glycosyltransferase family; protein id: supported by cDNA: gi_14423541 [Arabidopsis thaliana]
  misc_feature (1)..(333): Homolog of NCBI NO: 15225134 NR Description: putative glucosyltransferase; protein id: supported by cDNA: 114997. [Arabidopsis thaliana]
  misc_feature (1)..(333): Homolog of NCBI NO: 21536917 NR Description: putative glucosyltransferase [Arabidopsis
  misc_feature (1)..(331): Homolog of NCBI NO: 15225138 NR Description: UDP-glycosyltransferase family; protein id: supported by cDNA: gi_15810476 [Arabidopsis thaliana]
  misc_feature (46)..(334): Homolog of NCBI NO: 2501499 NR Description: Indole-3-acetate beta-glucosyltransferase (IAA-GLU
MPWALDLAMDFGLAAAPFFTQSCAVNYINYLSYINNGSLTLPIKDLPLLELQDLPTFVTPTGSHLAYFEMVLQQFTNFDKADFVLVNSFHDLDLHEEELLSKVCPVLTIGPTVPSMYLDQQIKSDNDYDLNLFDLKEAALCTDWLDKRPEGSVVYIAFGSMAKLSSEQMEEIASAISNFSYLWVVRASEESKLPPGFLETVDKDKSLVLKWSPQLQVLSNKAIGCFMTHCGWNSTMEGLSLGVPMVAMPQWTDQPMNAKYIQDVWKVGVRVKAEKESGICKREEIEFSIKEVMEGEKSKEMKENAGKWRDLAVKSLSEGGSTDININEFVSKIQIK

SEQ ID NO: 83801 - DNA, 1407 bp, Arabidopsis thaliana
  misc_feature (1)..(1407): Ceres Seq. ID no. 12671854
  misc_feature: MA Experiment ID: 20000173 Result: Up-regulated in Transcription
  misc_feature: MA Experiment 20000173 PARAMETER Experiment Name: At_42deg_Heat_P Parameter: Age (day) Value: 14
  misc_feature: MA Experiment 20000173 PARAMETER Experiment Name: At_42deg_Heat_P Parameter: Organism Value: A. thaliana
  misc_feature: MA Experiment 20000173 PARAMETER Experiment Name: At_42deg_Heat_P Parameter: Plant Line Value: WS
  misc_feature: MA Experiment 20000173 PARAMETER Experiment Name: At_42deg_Heat_P Parameter: Temperature (deg C) Value: 42 vs. 22
  misc_feature: MA Experiment 20000173 PARAMETER Experiment Name: At_42deg_Heat_P Parameter: Timepoint (hr) Value: 6
  misc_feature: MA Experiment 20000173 PARAMETER Experiment Name: At_42deg_Heat_P Parameter: Tissue Value: Aerial
  misc_feature: MA Experiment ID: 20000438 Result: Up-regulated in Transcription
  misc_feature: MA Experiment 20000438 PARAMETER Experiment Name: At_Shoots__P Parameter: Age (day) Value: 14
  misc_feature: MA Experiment 20000438 PARAMETER Experiment Name: At_Shoots__P Parameter: Tissue Value: Shoots vs. Whole Plant
  misc_feature: MA Experiment ID: 20000439 Result: Up-regulated in Transcription
  misc_feature: MA Experiment 20000439 PARAMETER Experiment Name: At_Roots__P Parameter: Age (day) Value: 14 vs. 21
  misc_feature: MA Experiment 20000439 PARAMETER Experiment Name: At_Roots__P Parameter: Organism Value: A. thaliana
  misc_feature: MA Experiment 20000439 PARAMETER Experiment Name: At_Roots__P Parameter: Tissue Value: Roots vs. Whole Plant
  misc_feature: MA Experiment ID: 20000495 Result: Down-regulated in Transcription
  misc_feature: MA Experiment 20000495 PARAMETER Experiment Name: At_Guard_Cells_P Parameter: Harvest Date Value: 8/2/2002
  misc_feature: MA Experiment 20000495 PARAMETER Experiment Name: At_Guard_Cells_P Parameter: Organism Value: A. thaliana
  misc_feature: MA Experiment 20000495 PARAMETER Experiment Name: At_Guard_Cells_P Parameter: Tissue Value: Guard Cells vs. Leaves
  misc_feature: MA Experiment ID: 20001248 Result: Down-regulated in Transcription
  misc_feature: MA Experiment 20001248 PARAMETER Experiment Name: At_Far-red-induction_P Parameter: Age (day) Value: 7
  misc_feature: MA Experiment 20001248 PARAMETER Experiment Name: At_Far-red-induction_P Parameter: Light Value: Far-red vs. White
  misc_feature: MA Experiment 20001248 PARAMETER Experiment Name: At_Far-red-induction_P Parameter: Organism Value: A. thaliana
  misc_feature: MA Experiment 20001248 PARAMETER Experiment Name: At_Far-red-induction_P Parameter: Plant Line Value: Columbia
  misc_feature: MA Experiment 20001248 PARAMETER Experiment Name: At_Far-red-induction_P Parameter: Timepoint (hr) Value: 4
  misc_feature: MA Experiment 20001248 PARAMETER Experiment Name: At_Far-red-induction_P Parameter: Tissue Value: Whole Plant
  misc_feature: MA Experiment ID: 20001560 Result: Down-regulated in Transcription
  misc_feature: MA Experiment 20001560 PARAMETER Experiment Name: At_Drought_Soil_Dry_P Parameter: Age (day) Value: 28
  misc_feature: MA Experiment 20001560 PARAMETER Experiment Name: At_Drought_Soil_Dry_P Parameter: Organism Value: A. thaliana
  misc_feature: MA Experiment 20001560 PARAMETER Experiment Name: At_Drought_Soil_Dry_P Parameter: Plant Line Value: WS
  misc_feature: MA Experiment 20001560 PARAMETER Experiment Name: At_Drought_Soil_Dry_P Parameter: Post Timepoint (hr) Value: None
  misc_feature: MA Experiment 20001560 PARAMETER Experiment Name: At_Drought_Soil_Dry_P Parameter: Post-Treatment Value: None
  misc_feature: MA Experiment 20001560 PARAMETER Experiment Name: At_Drought_Soil_Dry_P Parameter: Timepoint (day) Value: 14
  misc_feature: MA Experiment 20001560 PARAMETER Experiment Name: At_Drought_Soil_Dry_P Parameter: Treatment Value: Drought vs. No Drought
atgggggagattgtggttttaagtagtgatgatggtatggagactataaagaacagagtaaagtcatcggaagttgttcagtgggagaagtatttgcctaaaactgtacttagggttttgttagttgaatctgattactcaactcgtcaaatcatcactgcccttcttcgtaaatgctgttacaaagttgtagctgtttctgatggtttagctgcgtgggaggttctaaaggagaagtcacataacattgatcttatactaacagagctggatttgccatctatatctggttttgctctgcttgctttggtaatggagcatgaagcttgcaagaacattcctgtcataatgatgtcttctcaagattcgataaaaatggtgttgaagtgtatgctgagaggtgctgctgattatctaatcaaaccaatgaggaaaaacgagttgaaaaatctatggcaacatgtttggagaagactgactttgcgtgatgatcctactgctcatgctcaaagcttaccagcttcacagcacaaccttgaagatactgatgaaacttgtgaagattccagatatcattcagatcaaggaagtggtgctcaggctatcaattacaatggtcacaataagctgatggagaatggcaaatcagtggatgaaagagacgagtttaaggaaacttttgatgtgacaatggatttgattggtggaattgacaagcgtcctgatagtatttataaagacaagagtcgagatgagtgtgttggtcctgagcttggactttctctgaaaagatcttgctctgtaagttttgagaaccaagatgaaagcaagcatcaaaagcttagcctctctgatgcgtcggccttctcaagatttgaggaaagcaagtcagcagaaaaagccgtcgttgctttagaggagagtacttcaggtgagccaaagacaccaaccgaatcacatgaaaagttaagaaaagtaacatctgatcaaggaagcgccacaacgagcagcaaccaggagaatatcggatcatcaagcgtaagcttccgtaaccaagttcttcagtccacagtaacgaatcagaagcaagattcacccataccggtagaatcaaatcgcgagaaagcagctagcaaggaagtagaagctggttctcaaagcaccaatgaggggattgctggacaaagcagtagcacagagaaaccaaaggaagaagaaagtgcgaaacaacgttggagtagaagccagagagaagctgcattgatgaagttccggttgaagaggaaagatcgatgctttgacaaaaaggttcggtaccagagcaggaagaagctagcagaacaacgtcctcgagtgaaaggccagttcgtgcgaaccgtgaattcagacgcgtctacaaaatcatga

SEQ ID NO: 83802 - protein, 468 aa, Arabidopsis thaliana
  peptide (1)..(468): Ceres Seq. ID no. 12671855
  misc_feature (37)..(160): Pfam Name: Response regulator receiver domain Pfam Description: Response regulator receiver domain
  misc_feature (1)..(468): Homolog of NCBI NO: 18407171 NR Description: expressed protein; protein id: At2g46790.1, by cDNA: gi_10280999, supported by cDNA: gi_9247021 [Arabidopsis
  misc_feature (1)..(438): Homolog of NCBI NO: 7485762 NR Description: hypothetical protein At2g46790 [imported] -
  misc_feature (161)..(468): Homolog of NCBI NO: 20466420 NR Description: unknown protein [Arabidopsis thaliana]
  misc_feature (25)..(201): Homolog of NCBI NO: 9758535 NR Description: contains similarity to two-component response protein~gene_id:T31K7.5 [Arabidopsis thaliana]
  misc_feature (25)..(201): Homolog of NCBI NO: 18420797 NR Description: putative protein; protein id: At5g24470.1,
  misc_feature (416)..(462): Homolog of NCBI NO: 9758535 NR Description: contains similarity to two-component response protein~gene_id:T31K7.5 [Arabidopsis thaliana]
  misc_feature (416)..(462): Homolog of NCBI NO: 18420797 NR Description: putative protein; protein id: At5g24470.1,
  misc_feature (291)..(436): Homolog of NCBI NO: 15226423 NR Description: hypothetical protein; protein id: At2g46670.1
  misc_feature (23)..(458): Homolog of NCBI NO: 18424319 NR Description: pseudo-response regulator - like; protein id: supported by cDNA: gi_10281007 [Arabidopsis thaliana] emb|CAB86035.1~gene_id:MGO3.8~similar to unknown protein
  misc_feature (9)..(218): Homolog of NCBI NO: 18414032 NR Description: putative protein; protein id: At5g02810.1, by cDNA: gi_10281003, supported by cDNA: gi_14532637 [Arabidopsis
MGEIVVLSSDDGMETIKNRVKSSEVVQWEKYLPKTVLRVLLVESDYSTRQIITALLRKCCYKVVAVSDGLAAWEVLKEKSHNIDLILTELDLPSISGFALLALVMEHEACKNIPVIMMSSQDSIKMVLKCMLRGAADYLIKPMRKNELKNLWQHVWRRLTLRDDPTAHAQSLPASQHNLEDTDETCEDSRYHSDQGSGAQAINYNGHNKLMENGKSVDERDEFKETFDVTMDLIGGIDKRPDSIYKDKSRDECVGPELGLSLKRSCSVSFENQDESKHQKLSLSDASAFSRFEESKSAEKAVVALEESTSGEPKTPTESHEKLRKVTSDQGSATTSSNQENIGSSSVSFRNQVLQSTVTNQKQDSPIPVESNREKAASKEVEAGSQSTNEGIAGQSSSTEKPKEEESAKQRWSRSQREAALMKFRLKRKDRCFDKKVRYQSRKKLAEQRPRVKGQFVRTVNSDASTKS

SEQ ID NO: 83803 - protein, 456 aa, Arabidopsis thaliana
  peptide (1)..(456): Ceres Seq. ID no. 12671856
  misc_feature (25)..(148): Pfam Name: Response regulator receiver domain Pfam Description: Response regulator receiver domain
  misc_feature (1)..(456): Homolog of NCBI NO: 18407171 NR Description: expressed protein; protein id: At2g46790.1, by cDNA: gi_10280999, supported by cDNA: gi_9247021 [Arabidopsis
  misc_feature (1)..(426): Homolog of NCBI NO: 7485762 NR Description: hypothetical protein At2g46790 [imported] -
  misc_feature (149)..(456): Homolog of NCBI NO: 20466420 NR Description: unknown protein [Arabidopsis thaliana]
  misc_feature (13)..(189): Homolog of NCBI NO: 9758535 NR Description: contains similarity to two-component response protein~gene_id:T31K7.5 [Arabidopsis thaliana]
  misc_feature (13)..(189): Homolog of NCBI NO: 18420797 NR Description: putative protein; protein id: At5g24470.1,
  misc_feature (404)..(450): Homolog of NCBI NO: 9758535 NR Description: contains similarity to two-component response protein~gene_id:T31K7.5 [Arabidopsis thaliana]
  misc_feature (404)..(450): Homolog of NCBI NO: 18420797 NR Description: putative protein; protein id: At5g24470.1,
  misc_feature (279)..(424): Homolog of NCBI NO: 15226423 NR Description: hypothetical protein; protein id: At2g46670.1
  misc_feature (11)..(446): Homolog of NCBI NO: 18424319 NR Description: pseudo-response regulator - like; protein id: supported by cDNA: gi_10281007 [Arabidopsis thaliana] emb|CAB86035.1~gene_id:MGO3.8~similar to unknown protein
  misc_feature (1)..(206): Homolog of NCBI NO: 18414032 NR Description: putative protein; protein id: At5g02810.1, by cDNA: gi_10281003, supported by cDNA: gi_14532637 [Arabidopsis
METIKNRVKSSEVVQWEKYLPKTVLRVLLVESDYSTRQIITALLRKCCYKVVAVSDGLAAWEVLKEKSHNIDLILTELDLPSISGFALLALVMEHEACKNIPVIMMSSQDSIKMVLKCMLRGAADYLIKPMRKNELKNLWQHVWRRLTLRDDPTAHAQSLPASQHNLEDTDETCEDSRYHSDQGSGAQAINYNGHNKLMENGKSVDERDEFKETFDVTMDLIGGIDKRPDSIYKDKSRDECVGPELGLSLKRSCSVSFENQDESKHQKLSLSDASAFSRFEESKSAEKAVVALEESTSGEPKTPTESHEKLRKVTSDQGSATTSSNQENIGSSSVSFRNQVLQSTVTNQKQDSPIPVESNREKAASKEVEAGSQSTNEGIAGQSSSTEKPKEEESAKQRWSRSQREAALMKFRLKRKDRCFDKKVRYQSRKKLAEQRPRVKGQFVRTVNSDASTKS

SEQ ID NO: 83804 - protein, 364 aa, Arabidopsis thaliana
  peptide (1)..(364): Ceres Seq. ID no. 12671857
  misc_feature (1)..(56): Pfam Name: Response regulator receiver domain Pfam Description: Response regulator receiver domain
  misc_feature (1)..(364): Homolog of NCBI NO: 18407171 NR Description: expressed protein; protein id: At2g46790.1, by cDNA: gi_10280999, supported by cDNA: gi_9247021 [Arabidopsis
  misc_feature (1)..(334): Homolog of NCBI NO: 7485762 NR Description: hypothetical protein At2g46790 [imported] -
  misc_feature (57)..(364): Homolog of NCBI NO: 20466420 NR Description: unknown protein [Arabidopsis thaliana]
  misc_feature (1)..(97): Homolog of NCBI NO: 9758535 NR Description: contains similarity to two-component response protein~gene_id:T31K7.5 [Arabidopsis thaliana]
  misc_feature (1)..(97): Homolog of NCBI NO: 18420797 NR Description: putative protein; protein id: At5g24470.1,
  misc_feature (312)..(358): Homolog of NCBI NO: 9758535 NR Description: contains similarity to two-component response protein~gene_id:T31K7.5 [Arabidopsis thaliana]
  misc_feature (312)..(358): Homolog of NCBI NO: 18420797 NR Description: putative protein; protein id: At5g24470.1,
  misc_feature (187)..(332): Homolog of NCBI NO: 15226423 NR Description: hypothetical protein; protein id: At2g46670.1
  misc_feature (1)..(354): Homolog of NCBI NO: 18424319 NR Description: pseudo-response regulator - like; protein id: supported by cDNA: gi_10281007 [Arabidopsis thaliana] emb|CAB86035.1~gene_id:MGO3.8~similar to unknown protein
  misc_feature (1)..(114): Homolog of NCBI NO: 18414032 NR Description: putative protein; protein id: At5g02810.1, by cDNA: gi_10281003, supported by cDNA: gi_14532637 [Arabidopsis
MEHEACKNIPVIMMSSQDSIKMVLKCMLRGAADYLIKPMRKNELKNLWQHVWRRLTLRDDPTAHAQSLPASQHNLEDTDETCEDSRYHSDQGSGAQAINYNGHNKLMENGKSVDERDEFKETFDVTMDLIGGIDKRPDSIYKDKSRDECVGPELGLSLKRSCSVSFENQDESKHQKLSLSDASAFSRFEESKSAEKAVVALEESTSGEPKTPTESHEKLRKVTSDQGSATTSSNQENIGSSSVSFRNQVLQSTVTNQKQDSPIPVESNREKAASKEVEAGSQSTNEGIAGQSSSTEKPKEEESAKQRWSRSQREAALMKFRLKRKDRCFDKKVRYQSRKKLAEQRPRVKGQFVRTVNSDASTKS

SEQ ID NO: 83805 - DNA, 777 bp, Arabidopsis thaliana
  misc_feature (1)..(777): Ceres Seq. ID no. 12671858
  misc_feature: MA Experiment ID: 20001910 Result: Up-regulated in Transcription
  misc_feature: MA Experiment 20001910 PARAMETER Experiment Name: At_Drought_Reproduction_P Parameter: Age (day) Value: 37
  misc_feature: MA Experiment 20001910 PARAMETER Experiment Name: At_Drought_Reproduction_P Parameter: Organism Value: A. thaliana
  misc_feature: MA Experiment 20001910 PARAMETER Experiment Name: At_Drought_Reproduction_P Parameter: Plant Line Value: WS
  misc_feature: MA Experiment 20001910 PARAMETER Experiment Name: At_Drought_Reproduction_P Parameter: Timepoint (day) Value: 7
  misc_feature: MA Experiment 20001910 PARAMETER Experiment Name: At_Drought_Reproduction_P Parameter: Tissue Value: Flowers
  misc_feature: MA Experiment 20001910 PARAMETER Experiment Name: At_Drought_Reproduction_P Parameter: Treatment Value: Drought vs. No Drought
atgtcgggactcagattggaaggcaagatcgtaattataacaggcggagccagcgggattggagccgacgccgctaggctgttcacggaccacggagctaaggtggttatagttgacgtacaagaagaactaggccaaaacgtcgcagttttgatcgggaaagacaaagctagtttttaccgttgcgatgtgacaaatgagacggaagtcgaggacgcagttaagttcaccgtcgaaaaacacggaaagctagacgttctgtttagcaacgccggagtcttggaaccactggaaagcttcctcgactttgacctcgaacggtttgaccgcataatggctgttaacgttcgcggtgcagctgcgtttatcaaacacgcggcacgagccatggtggagaaaggcacgcgtggctccatcgtttgtacgacgagcgtctcggcggagatcggtggggggcatcatggttacacggcgtctaaacacgggcttgtcggcctgattagatcggcctgtggtgatttggggaagtatgggattagagtcaatggagtcgcaccgtacgcggtggcaacgccaatgactagccacgacgaggtaacgggaaagcagttggaggattattttgacgccaagggaattctcaaggggatggtgcttaaagctagccacgttgcacaagtggctctgttcttggcttctgatgattcggcttatataagtggtcagaatttggcggtggatggtggttatactgtcgttaagccaagccgtgattaa

SEQ ID NO: 83806 - protein, 258 aa, Arabidopsis thaliana
  peptide (1)..(258): Ceres Seq. ID no. 12671859
  misc_feature (1)..(258): Homolog of NCBI NO: 15226500 NR Description: (NM_130280) putative alcohol dehydrogenase; id: At2g47120.1 [Arabidopsis thaliana] >gi|7431089|pir||T02176
  misc_feature (1)..(255): Homolog of NCBI NO: 15226503 NR Description: (NM_130281) putative alcohol dehydrogenase; id: At2g47130.1 [Arabidopsis thaliana] >gi|7431088|pir||T02175
  misc_feature (1)..(254): Homolog of NCBI NO: 15228656 NR Description: short-chain alcohol dehydrogenase, putative;
  misc_feature (1)..(254): Homolog of NCBI NO: 9293918 NR Description: alcohol dehydrogenase-like protein [Arabidopsis
  misc_feature (1)..(255): Homolog of NCBI NO: 18407273 NR Description: putative alcohol dehydrogenase; protein id: supported by cDNA: gi_13878112, supported by cDNA: gi_17104782 thaliana] >gi|13878113|gb|AAK44134.1|AF370319_1 putative alcohol
  misc_feature (13)..(254): Homolog of NCBI NO: 22331405 NR Description: short-chain alcohol dehydrogenase, putative;
  misc_feature (5)..(255): Homolog of NCBI NO: 7431087 NR Description: probable alcohol dehydrogenase [imported] -
  misc_feature (5)..(254): Homolog of NCBI NO: 15983819 NR Description: 3-beta-hydroxysteroiddehydrogenase [Digitalis
  misc_feature (4)..(253): Homolog of NCBI NO: 7981382 NR Description: putative alcohol dehydrogenase [Lycopersicon
  misc_feature (1)..(253): Homolog of NCBI NO: 40714675 NR Description: putative hydroxysteroiddehydrogenase [Oryza
MSGLRLEGKIVIITGGASGIGADAARLFTDHGAKVVIVDVQEELGQNVAVLIGKDKASFYRCDVTNETEVEDAVKFTVEKHGKLDVLFSNAGVLEPLESFLDFDLERFDRIMAVNVRGAAAFIKHAARAMVEKGTRGSIVCTTSVSAEIGGGHHGYTASKHGLVGLIRSACGDLGKYGIRVNGVAPYAVATPMTSHDEVTGKQLEDYFDAKGILKGMVLKASHVAQVALFLASDDSAYISGQNLAVDGGYTVVKPSRD

SEQ ID NO: 83807 - protein, 147 aa, Arabidopsis thaliana; identical to SEQ ID NO: 78822
  peptide (1)..(147): Ceres Seq. ID no. 12671860
  misc_feature (1)..(147): Homolog of NCBI NO: 15226500 NR Description: (NM_130280) putative alcohol dehydrogenase; id: At2g47120.1 [Arabidopsis thaliana] >gi|7431089|pir||T02176
  misc_feature (1)..(144): Homolog of NCBI NO: 15226503 NR Description: (NM_130281) putative alcohol dehydrogenase; id: At2g47130.1 [Arabidopsis thaliana] >gi|7431088|pir||T02175
  misc_feature (1)..(143): Homolog of NCBI NO: 15228656 NR Description: short-chain alcohol dehydrogenase, putative;
  misc_feature (1)..(143): Homolog of NCBI NO: 9293918 NR Description: alcohol dehydrogenase-like protein [Arabidopsis
  misc_feature (1)..(144): Homolog of NCBI NO: 18407273 NR Description: putative alcohol dehydrogenase; protein id: supported by cDNA: gi_13878112, supported by cDNA: gi_17104782 thaliana] >gi|13878113|gb|AAK44134.1|AF370319_1 putative alcohol
  misc_feature (1)..(143): Homolog of NCBI NO: 22331405 NR Description: short-chain alcohol dehydrogenase, putative;
  misc_feature (1)..(144): Homolog of NCBI NO: 7431087 NR Description: probable alcohol dehydrogenase [imported] -
  misc_feature (1)..(143): Homolog of NCBI NO: 15983819 NR Description: 3-beta-hydroxysteroiddehydrogenase [Digitalis
  misc_feature (1)..(142): Homolog of NCBI NO: 7981382 NR Description: putative alcohol dehydrogenase [Lycopersicon
  misc_feature (1)..(142): Homolog of NCBI NO: 40714675 NR Description: putative hydroxysteroiddehydrogenase [Oryza

SEQ ID NO: 83808 - protein, 129 aa, Arabidopsis thaliana; identical to SEQ ID NO: 78823
  peptide (1)..(129): Ceres Seq. ID no. 12671861
  misc_feature (1)..(129): Homolog of NCBI NO: 15226500 NR Description: (NM_130280) putative alcohol dehydrogenase; id: At2g47120.1 [Arabidopsis thaliana] >gi|7431089|pir||T02176
  misc_feature (1)..(126): Homolog of NCBI NO: 15226503 NR Description: (NM_130281) putative alcohol dehydrogenase; id: At2g47130.1 [Arabidopsis thaliana] >gi|7431088|pir||T02175
  misc_feature (1)..(125): Homolog of NCBI NO: 15228656 NR Description: short-chain alcohol dehydrogenase, putative;
  misc_feature (1)..(125): Homolog of NCBI NO: 9293918 NR Description: alcohol dehydrogenase-like protein [Arabidopsis
  misc_feature (1)..(126): Homolog of NCBI NO: 18407273 NR Description: putative alcohol dehydrogenase; protein id: supported by cDNA: gi_13878112, supported by cDNA: gi_17104782 thaliana] >gi|13878113|gb|AAK44134.1|AF370319_1 putative alcohol
  misc_feature (1)..(125): Homolog of NCBI NO: 22331405 NR Description: short-chain alcohol dehydrogenase, putative;
  misc_feature (1)..(126): Homolog of NCBI NO: 7431087 NR Description: probable alcohol dehydrogenase [imported] -
  misc_feature (1)..(125): Homolog of NCBI NO: 15983819 NR Description: 3-beta-hydroxysteroiddehydrogenase [Digitalis
  misc_feature (1)..(124): Homolog of NCBI NO: 7981382 NR Description: putative alcohol dehydrogenase [Lycopersicon
  misc_feature (1)..(124): Homolog of NCBI NO: 40714675 NR Description: putative hydroxysteroiddehydrogenase [Oryza

SEQ ID NO: 83809 - DNA, 772 bp, Arabidopsis thaliana
  misc_feature (1)..(772): Ceres Seq. ID no. 12671885
  misc_feature: MA Experiment ID: 20000179 Result: Down-regulated in Transcription
  misc_feature: MA Experiment 20000179 PARAMETER Experiment Name: At_Germinating_Seeds_P Parameter: Age (hr) Value: 6 vs. 0
  misc_feature: MA Experiment 20000179 PARAMETER Experiment Name: At_Germinating_Seeds_P Parameter: Tissue Value: Germinating Seeds
  misc_feature: MA Experiment ID: 20000180 Result: Down-regulated in Transcription
  misc_feature: MA Experiment 20000180 PARAMETER Experiment Name: At_Germinating_Seeds_P Parameter: Age (hr) Value: 24 vs. 0
  misc_feature: MA Experiment 20000180 PARAMETER Experiment Name: At_Germinating_Seeds_P Parameter: Tissue Value: Germinating Seeds
  misc_feature: MA Experiment ID: 20000185 Result: Down-regulated in Transcription
  misc_feature: MA Experiment 20000185 PARAMETER Experiment Name: At_Roots__P Parameter: Age (day) Value: 7 vs. 21
  misc_feature: MA Experiment 20000185 PARAMETER Experiment Name: At_Roots__P Parameter: Organism Value: A. thaliana
  misc_feature: MA Experiment 20000185 PARAMETER Experiment Name: At_Roots__P Parameter: Tissue Value: Roots vs. Whole Plant
  misc_feature: MA Experiment ID: 20000437 Result: Up-regulated in Transcription
  misc_feature: MA Experiment 20000437 PARAMETER Experiment Name: At_Drought_P Parameter: Age (day) Value: 8
  misc_feature: MA Experiment 20000437 PARAMETER Experiment Name: At_Drought_P Parameter: Organism Value: A. thaliana
  misc_feature: MA Experiment 20000437 PARAMETER Experiment Name: At_Drought_P Parameter: Plant Line Value: WS
  misc_feature: MA Experiment 20000437 PARAMETER Experiment Name: At_Drought_P Parameter: Timepoint (hr) Value: 24
  misc_feature: MA Experiment 20000437 PARAMETER Experiment Name: At_Drought_P Parameter: Tissue Value: Whole Plant
  misc_feature: MA Experiment 20000437 PARAMETER Experiment Name: At_Drought_P Parameter: Treatment Value: Drought vs. No Drought
  misc_feature: MA Experiment ID: 20000453 Result: Up-regulated in Transcription
  misc_feature: MA Experiment 20000453 PARAMETER Experiment Name: At_100uM_ABA_P Parameter: Age (day) Value: 15
  misc_feature: MA Experiment 20000453 PARAMETER Experiment Name: At_100uM_ABA_P Parameter: Organism Value: A. thaliana
  misc_feature: MA Experiment 20000453 PARAMETER Experiment Name: At_100uM_ABA_P Parameter: Plant Line Value: WS
  misc_feature: MA Experiment 20000453 PARAMETER Experiment Name: At_100uM_ABA_P Parameter: Timepoint (hr) Value: 24
  misc_feature: MA Experiment 20000453 PARAMETER Experiment Name: At_100uM_ABA_P Parameter: Tissue Value: Aerial
  misc_feature: MA Experiment 20000453 PARAMETER Experiment Name: At_100uM_ABA_P Parameter: Treatment Value: 100uM ABA vs. No Treatment
  misc_feature: MA Experiment ID: 20001906 Result: Up-regulated in Transcription
  misc_feature: MA Experiment 20001906 PARAMETER Experiment Name: At_Drought_Reproduction_P Parameter: Age (day) Value: 35
  misc_feature: MA Experiment 20001906 PARAMETER Experiment Name: At_Drought_Reproduction_P Parameter: Organism Value: A. thaliana
  misc_feature: MA Experiment 20001906 PARAMETER Experiment Name: At_Drought_Reproduction_P Parameter: Plant Line Value: WS
  misc_feature: MA Experiment 20001906 PARAMETER Experiment Name: At_Drought_Reproduction_P Parameter: Timepoint (day) Value: 5
  misc_feature: MA Experiment 20001906 PARAMETER Experiment Name: At_Drought_Reproduction_P Parameter: Tissue Value: Siliques
  misc_feature: MA Experiment 20001906 PARAMETER Experiment Name: At_Drought_Reproduction_P Parameter: Treatment Value: Drought vs. No Drought
  misc_feature: MA Experiment ID: 20001907 Result: Up-regulated in Transcription
  misc_feature: MA Experiment 20001907 PARAMETER Experiment Name: At_Drought_Reproduction_P Parameter: Age (day) Value: 37
  misc_feature: MA Experiment 20001907 PARAMETER Experiment Name: At_Drought_Reproduction_P Parameter: Organism Value: A. thaliana
  misc_feature: MA Experiment 20001907 PARAMETER Experiment Name: At_Drought_Reproduction_P Parameter: Plant Line Value: WS
  misc_feature: MA Experiment 20001907 PARAMETER Experiment Name: At_Drought_Reproduction_P Parameter: Timepoint (day) Value: 7
  misc_feature: MA Experiment 20001907 PARAMETER Experiment Name: At_Drought_Reproduction_P Parameter: Tissue Value: Siliques
  misc_feature: MA Experiment 20001907 PARAMETER Experiment Name: At_Drought_Reproduction_P Parameter: Treatment Value: Drought vs. No Drought
  misc_feature: MA Experiment ID: 20001908 Result: Up-regulated in Transcription
  misc_feature: MA Experiment 20001908 PARAMETER Experiment Name: At_Drought_Reproduction_P Parameter: Age (day) Value: 40
  misc_feature: MA Experiment 20001908 PARAMETER Experiment Name: At_Drought_Reproduction_P Parameter: Organism Value: A. thaliana
  misc_feature: MA Experiment 20001908 PARAMETER Experiment Name: At_Drought_Reproduction_P Parameter: Plant Line Value: WS
  misc_feature: MA Experiment 20001908 PARAMETER Experiment Name: At_Drought_Reproduction_P Parameter: Timepoint (day) Value: 10
  misc_feature: MA Experiment 20001908 PARAMETER Experiment Name: At_Drought_Reproduction_P Parameter: Tissue Value: Siliques
  misc_feature: MA Experiment 20001908 PARAMETER Experiment Name: At_Drought_Reproduction_P Parameter: Treatment Value: Drought vs. No Drought
  misc_feature: MA Experiment ID: 20001910 Result: Up-regulated in Transcription
  misc_feature: MA Experiment 20001910 PARAMETER Experiment Name: At_Drought_Reproduction_P Parameter: Age (day) Value: 37
  misc_feature: MA Experiment 20001910 PARAMETER Experiment Name: At_Drought_Reproduction_P Parameter: Organism Value: A. thaliana
  misc_feature: MA Experiment 20001910 PARAMETER Experiment Name: At_Drought_Reproduction_P Parameter: Plant Line Value: WS
  misc_feature: MA Experiment 20001910 PARAMETER Experiment Name: At_Drought_Reproduction_P Parameter: Timepoint (day) Value: 7
  misc_feature: MA Experiment 20001910 PARAMETER Experiment Name: At_Drought_Reproduction_P Parameter: Tissue Value: Flowers
  misc_feature: MA Experiment 20001910 PARAMETER Experiment Name: At_Drought_Reproduction_P Parameter: Treatment Value: Drought vs. No Drought
  misc_feature: MA Experiment ID: 20001911 Result: Up-regulated in Transcription
  misc_feature: MA Experiment 20001911 PARAMETER Experiment Name: At_Drought_Reproduction_P Parameter: Age (day) Value: 40
  misc_feature: MA Experiment 20001911 PARAMETER Experiment Name: At_Drought_Reproduction_P Parameter: Organism Value: A. thaliana
  misc_feature: MA Experiment 20001911 PARAMETER Experiment Name: At_Drought_Reproduction_P Parameter: Plant Line Value: WS
  misc_feature: MA Experiment 20001911 PARAMETER Experiment Name: At_Drought_Reproduction_P Parameter: Timepoint (day) Value: 10
  misc_feature: MA Experiment 20001911 PARAMETER Experiment Name: At_Drought_Reproduction_P Parameter: Tissue Value: Flowers
  misc_feature: MA Experiment 20001911 PARAMETER Experiment Name: At_Drought_Reproduction_P Parameter: Treatment Value: Drought vs. No Drought
actcttgagaagctctcgattaagcttgaacttggaggatcaatggccgacgttcgcacacactcgcaccagcttcaagtgcaccctcaacgccagcatgaaggaggcatcaaagtcctttatcctcagagtggcccttcttccactcaggtgctagccgtgtttgtcggtgtaccgataggaggaacgctgctgactatagccggtttgacattagccggttcggttataggactaatgctagcattcccgttgtttctcatctttagtccggttattgtaccagcagcctttgtcatcggtctagctatgactggattcctggcttcaggggccataggtctcaccggactatcatccatgtcgtgggtactcaactacatccgccgggccgggcagcatatcccggaggagcttgaggaagcgaagcatcgtttggctgacatggccgagtatgtgggacagaggactaaagatgctggacaaaccatagaagacaaagctcatgatgtccgagaggccaagacttttgatgtccgagaccgagacaccaccaagggtactcataatgtccgagacaccaagactacataaagcgtgtgttttgagtgaaccatgttgaataaaaaaaatcgactgttagttcttaatgttcatgtgttttgagtgtttgtatttgcttgtaagcttattttgggtttagtttcctcttctttttttttcctgtaacaataatgtcggagacattttgcttctatcagttctttgtttt

SEQ ID NO: 83810 - protein, 197 aa, Arabidopsis thaliana
  peptide (1)..(197): Ceres Seq. ID no. 12671886
  misc_feature (47)..(164): Pfam Name: Oleosin Pfam Description: Oleosin
  misc_feature (15)..(197): Homolog of NCBI NO: 15232141 NR Description: oleosin; protein id: At3g01570.1, supported by gi_16649132, supported by cDNA: gi_20148652 [Arabidopsis >gi|6016716|gb|AAF01542.1|AC009325_12 putative oleosin
  misc_feature (15)..(197): Homolog of NCBI NO: 82051 NR Description: lipid body-associated membrane protein - carrot
  misc_feature (35)..(196): Homolog of NCBI NO: 15242686 NR Description: oleosin; protein id: At5g40420.1, supported by gi_16209648, supported by cDNA: gi_725259 [Arabidopsis thaliana] Oleosin 21.2 kDa (Oleosin type 2) oleosin, isoform 21K
  misc_feature (35)..(196): Homolog of NCBI NO: 2129658 NR Description: oleosin, 21K - Arabidopsis thaliana
  misc_feature (24)..(172): Homolog of NCBI NO: 29243355 NR Description: oleosin [Corylus avellana]
  misc_feature (23)..(176): Homolog of NCBI NO: 13161005 NR Description: oleosin variant A [Arachis hypogaea]
  misc_feature (15)..(176): Homolog of NCBI NO: 266690 NR Description: Oleosin 18.2 kDa >gi|7442014|pir||T10788 oleosin, - upland cotton >gi|167363|gb|AAA18524.1| 18.2 kDa oleosin
  misc_feature (41)..(175): Homolog of NCBI NO: 1592686 NR Description: oleosin type4 [Arabidopsis thaliana]
  misc_feature (41)..(175): Homolog of NCBI NO: 15232227 NR Description: oleosin; protein id: At3g27660.1, supported by
  misc_feature (41)..(175): Homolog of NCBI NO: 21554017 NR Description: oleosin isoform [Arabidopsis thaliana]
TLEKLSIKLELGGSMADVRTHSHQLQVHPQRQHEGGIKVLYPQSGPSSTQVLAVFVGVPIGGTLLTIAGLTLAGSVIGLMLAFPLFLIFSPVIVPAAFVIGLAMTGFLASGAIGLTGLSSMSWVLNYIRRAGQHIPEELEEAKHRLADMAEYVGQRTKDAGQTIEDKAHDVREAKTFDVRDRDTTKGTHNVRDTKTT

SEQ ID NO: 83811 - protein, 183 aa, Arabidopsis thaliana
  peptide (1)..(183): Ceres Seq. ID no. 12671887
  misc_feature (33)..(150): Pfam Name: Oleosin Pfam Description: Oleosin
  misc_feature (1)..(183): Homolog of NCBI NO: 15232141 NR Description: oleosin; protein id: At3g01570.1, supported by gi_16649132, supported by cDNA: gi_20148652 [Arabidopsis >gi|6016716|gb|AAF01542.1|AC009325_12 putative oleosin
  misc_feature (1)..(183): Homolog of NCBI NO: 82051 NR Description: lipid body-associated membrane protein - carrot
  misc_feature (21)..(182): Homolog of NCBI NO: 15242686 NR Description: oleosin; protein id: At5g40420.1, supported by gi_16209648, supported by cDNA: gi_725259 [Arabidopsis thaliana] Oleosin 21.2 kDa (Oleosin type 2) oleosin, isoform 21K
  misc_feature (21)..(182): Homolog of NCBI NO: 2129658 NR Description: oleosin, 21K - Arabidopsis thaliana
  misc_feature (10)..(158): Homolog of NCBI NO: 29243355 NR Description: oleosin [Corylus avellana]
  misc_feature (9)..(162): Homolog of NCBI NO: 13161005 NR Description: oleosin variant A [Arachis hypogaea]
  misc_feature (1)..(162): Homolog of NCBI NO: 266690 NR Description: Oleosin 18.2 kDa >gi|7442014|pir||T10788 oleosin, - upland cotton >gi|167363|gb|AAA18524.1| 18.2 kDa oleosin
  misc_feature (27)..(161): Homolog of NCBI NO: 1592686 NR Description: oleosin type4 [Arabidopsis thaliana]
  misc_feature (27)..(161): Homolog of NCBI NO: 15232227 NR Description: oleosin; protein id: At3g27660.1, supported by
  misc_feature (27)..(161): Homolog of NCBI NO: 21554017 NR Description: oleosin isoform [Arabidopsis thaliana]
MADVRTHSHQLQVHPQRQHEGGIKVLYPQSGPSSTQVLAVFVGVPIGGTLLTIAGLTLAGSVIGLMLAFPLFLIFSPVIVPAAFVIGLAMTGFLASGAIGLTGLSSMSWVLNYIRRAGQHIPEELEEAKHRLADMAEYVGQRTKDAGQTIEDKAHDVREAKTFDVRDRDTTKGTHNVRDTKTT

SEQ ID NO: 83812 - protein, 118 aa, Arabidopsis thaliana
  peptide (1)..(118): Ceres Seq. ID no. 12671888
  misc_feature (1)..(85): Pfam Name: Oleosin Pfam Description: Oleosin
  misc_feature (1)..(118): Homolog of NCBI NO: 15232141 NR Description: oleosin; protein id: At3g01570.1, supported by gi_16649132, supported by cDNA: gi_20148652 [Arabidopsis >gi|6016716|gb|AAF01542.1|AC009325_12 putative oleosin
  misc_feature (1)..(118): Homolog of NCBI NO: 82051 NR Description: lipid body-associated membrane protein - carrot
  misc_feature (1)..(117): Homolog of NCBI NO: 15242686 NR Description: oleosin; protein id: At5g40420.1, supported by gi_16209648, supported by cDNA: gi_725259 [Arabidopsis thaliana] Oleosin 21.2 kDa (Oleosin type 2) oleosin, isoform 21K
  misc_feature (1)..(117): Homolog of NCBI NO: 2129658 NR Description: oleosin, 21K - Arabidopsis thaliana
  misc_feature (1)..(93): Homolog of NCBI NO: 29243355 NR Description: oleosin [Corylus avellana]
  misc_feature (1)..(97): Homolog of NCBI NO: 13161005 NR Description: oleosin variant A [Arachis hypogaea]
  misc_feature (1)..(97): Homolog of NCBI NO: 266690 NR Description: Oleosin 18.2 kDa >gi|7442014|pir||T10788 oleosin, - upland cotton >gi|167363|gb|AAA18524.1| 18.2 kDa oleosin
  misc_feature (1)..(96): Homolog of NCBI NO: 1592686 NR Description: oleosin type4 [Arabidopsis thaliana]
  misc_feature (1)..(96): Homolog of NCBI NO: 15232227 NR Description: oleosin; protein id: At3g27660.1, supported by
  misc_feature (1)..(96): Homolog of NCBI NO: 21554017 NR Description: oleosin isoform [Arabidopsis thaliana]
MLAFPLFLIFSPVIVPAAFVIGLAMTGFLASGAIGLTGLSSMSWVLNYIRRAGQHIPEELEEAKHRLADMAEYVGQRTKDAGQTIEDKAHDVREAKTFDVRDRDTTKGTHNVRDTKTT

SEQ ID NO: 83813 - DNA, 2627 bp, Arabidopsis thaliana
  misc_feature (1)..(2627): Ceres Seq. ID no. 12671889
  misc_feature: MA Experiment ID: 20000179 Result: Down-regulated in Transcription
  misc_feature: MA Experiment 20000179 PARAMETER Experiment Name: At_Germinating_Seeds_P Parameter: Age (hr) Value: 6 vs. 0
  misc_feature: MA Experiment 20000179 PARAMETER Experiment Name: At_Germinating_Seeds_P Parameter: Tissue Value: Germinating Seeds
  misc_feature: MA Experiment ID: 20000180 Result: Down-regulated in Transcription
  misc_feature: MA Experiment 20000180 PARAMETER Experiment Name: At_Germinating_Seeds_P Parameter: Age (hr) Value: 24 vs. 0
  misc_feature: MA Experiment 20000180 PARAMETER Experiment Name: At_Germinating_Seeds_P Parameter: Tissue Value: Germinating Seeds
attgaaacgccatctcagctctaattcagtacgatggggaggagaggtcgcggcggcggcggtggtatgggcggaggaatcaatcgtagatatctgagtcaagttatggatacgtgcggcaaggatttatctacggcggaggacatcgttgatgatcttcgttccaggtacggcaattttgcgaggttgactcggcaagtgcttctactcaatgtcaggcaagtccttaatgttagaaacaacaagagggttaaagacgaagatgaagatgacaacattggagatgaggaaggttctgcttctcagaggaagaaacagagacgggttgatgagaaagaggagaaattgcagcgagcggagcagtcgcatttaaggaagaggaatatggaacgttcagtgtcttcttctccgtcttcttcttcttcttcggaagacagtggtgatgtgtcgacttctgaggacgcggtttatggcgagaagctgagtccgccgcggtttgatctgatcaatgacagtctaagagataactacgctaagttgaacagctcctcgaagaaaccaattgggtcgcctgcggaaaagaatgtggaagttgagactgtgagcaacaaaggtagaagcaagttggctacaatgggggccagaaaggaggctaaagtttctctttccctcagtggagctactggtaatggtgatttggaagttgagggtactaaaggacctacttttaaagactttggtgggattaagaaaatattggatgaattggagatgaatgttctattccccattctcaatcctgagccgtttaagaagattggagtgaagccaccaagtgggattctatttcatggaccacctggctgtgggaagactaagttggccaatgccattgccaatgaagctggtgttccgttttataagatttcagccacagaggtgatttctggtgtttctggtgcttctgaagagaatatcagagagctcttttctaaagcatataggactgcgccttcgattgtgtttatcgatgagattgatgcgattggttcaaagagagagaatcagcaaagagagatggagaagcggatagtaacacaattgttgacttgtatggatggacctggtaacaaaggcgataaaaatgctcctgattctagtgctggttttgttcttgtcattggagctacaaataggcctgatgctcttgatcctgctttgaggagaagtggacgatttgaaactgagatcgctctaactgctccagatgaagacgcaagggctgagatactctctgttgtagcccaaaaacttagattagaaggaccctttgacaagaaaagaatagctcgtttaacaccgggttttgttggagctgatttggagagtgttgcttacttggctggcaggaaagccattaagagaatcttggattcaaggaaatctgaacagtctggggacggtgaagacgataaatcttggctgaggatgccctggccagaagaagagttggaaaagctctttgtcaaaatgtctgatttcgaggaagcagtgaatctagttcaggcatctttaacaagagaaggattctctatcgtgcctgatgtcaagtgggatgatgttggtggacttgaccatctacgacttcaattcaaccgttatatagtgaggcctatcaaaaagcctgatatttataaggcttttggggtagacttagagacagggtttttgctctatggaccaccgggttgtggcaagacattgattgcaaaggcagctgctaacgaggctggagctaatttcatgcacatcaagggtgccgaacttctaaataaatacgttggagaaagtgagcttgctattcgtacgttgtttcagcgagctcggacatgtgcaccatgtgtaatcttctttgatgaggtggatgctttgacaacaagtcgtggcaaagaaggtgcttgggttgttgaacggcttttgaaccagtttcttgttgagctggatggtggagagaggcgtaatgtatatgtaattggagctacaaacaggccagatgtagttgatcctgctttcttgagaccgggtagatttgggaatcttctttatgtacccctccccaacgcagatgagcgtgcttcaattctaaaagctattgcaaggaagaaaccgatagatcctagtgttgatctggatggaattgcaaagaataactgtgaaggtttcagcggagctgatctcgcacacttggtgcaaaaagctacattccaagcagtggaggagatgataggctccagtgagtcgtctgaagatgatgttacagatataacgcagtgtacaatcaagacgaggcatttcgagcaagccttgtccttagtctcaccatctgtgaacaaacagcaaagaagacactatgacgcactatcaacaaagcttcaagaaagcgttgggaggaacactgaacaagtcaccatagggccatcttttaccctcgagtaaaaacactctttacttatagaatgtctgcaaaatctcattttccaagggtagatacggtctttagttaaatataaagactcgtctgtttttctacttcagacacgtaatagaatcaagttatgtttccaact

SEQ ID NO: 83814 - protein, 820 aa, Arabidopsis thaliana
  peptide (1)..(820): Ceres Seq. ID no. 12671890
  misc_feature (108)..(789): Homolog of NCBI NO: 34897818 NR Description: putative cell division control protein [Oryza
  misc_feature (73)..(467): Homolog of NCBI NO: 19112584 NR Description: AAA ATPase [Schizosaccharomyces pombe]
  misc_feature (487)..(799): Homolog of NCBI NO: 19112584 NR Description: AAA ATPase [Schizosaccharomyces pombe]
  misc_feature (70)..(505): Homolog of NCBI NO: 40362746 NR Description: AAA ATPase [Candida albicans]
  misc_feature (469)..(800): Homolog of NCBI NO: 40362746 NR Description: AAA ATPase [Candida albicans]
  misc_feature (75)..(474): Homolog of NCBI NO: 28278757 NR Description: Similar to RIKEN cDNA 1200009I24 gene [Xenopus
  misc_feature (487)..(800): Homolog of NCBI NO: 28278757 NR Description: Similar to RIKEN cDNA 1200009I24 gene [Xenopus
  misc_feature (109)..(800): Homolog of NCBI NO: 27881916 NR Description: Similar to RIKEN cDNA 1200009I24 gene [Danio
  misc_feature (48)..(478): Homolog of NCBI NO: 32699415 NR Description: Nuclear valosin-containing protein-like (Nuclear
  misc_feature (487)..(806): Homolog of NCBI NO: 32699415 NR Description: Nuclear valosin-containing protein-like (Nuclear
MGRRGRGGGGGMGGGINRRYLSQVMDTCGKDLSTAEDIVDDLRSRYGNFARLTRQVLLLNVRQVLNVRNNKRVKDEDEDDNIGDEEGSASQRKKQRRVDEKEEKLQRAEQSHLRKRNMERSVSSSPSSSSSSEDSGDVSTSEDAVYGEKLSPPRFDLINDSLRDNYAKLNSSSKKPIGSPAEKNVEVETVSNKGRSKLATMGARKEAKVSLSLSGATGNGDLEVEGTKGPTFKDFGGIKKILDELEMNVLFPILNPEPFKKIGVKPPSGILFHGPPGCGKTKLANAIANEAGVPFYKISATEVISGVSGASEENIRELFSKAYRTAPSIVFIDEIDAIGSKRENQQREMEKRIVTQLLTCMDGPGNKGDKNAPDSSAGFVLVIGATNRPDALDPALRRSGRFETEIALTAPDEDARAEILSVVAQKLRLEGPFDKKRIARLTPGFVGADLESVAYLAGRKAIKRILDSRKSEQSGDGEDDKSWLRMPWPEEELEKLFVKMSDFEEAVNLVQASLTREGFSIVPDVKWDDVGGLDHLRLQFNRYIVRPIKKPDIYKAFGVDLETGFLLYGPPGCGKTLIAKAAANEAGANFMHIKGAELLNKYVGESELAIRTLFQRARTCAPCVIFFDEVDALTTSRGKEGAWVVERLLNQFLVELDGGERRNVYVIGATNRPDVVDPAFLRPGRFGNLLYVPLPNADERASILKAIARKKPIDPSVDLDGIAKNNCEGFSGADLAHLVQKATFQAVEEMIGSSESSEDDVTDITQCTIKTRHFEQALSLVSPSVNKQQRRHYDALSTKLQESVGRNTEQVTIGPSFTLE

SEQ ID NO: 83815 - protein, 809 aa, Arabidopsis thaliana
  peptide (1)..(809): Ceres Seq. ID no. 12671891
  misc_feature (97)..(778): Homolog of NCBI NO: 34897818 NR Description: putative cell division control protein [Oryza
  misc_feature (62)..(456): Homolog of NCBI NO: 19112584 NR Description: AAA ATPase [Schizosaccharomyces pombe]
  misc_feature (476)..(788): Homolog of NCBI NO: 19112584 NR Description: AAA ATPase [Schizosaccharomyces pombe]
  misc_feature (59)..(494): Homolog of NCBI NO: 40362746 NR Description: AAA ATPase [Candida albicans]
  misc_feature (458)..(789): Homolog of NCBI NO: 40362746 NR Description: AAA ATPase [Candida albicans]
  misc_feature (64)..(463): Homolog of NCBI NO: 28278757 NR Description: Similar to RIKEN cDNA 1200009I24 gene [Xenopus
  misc_feature (476)..(789): Homolog of NCBI NO: 28278757 NR Description: Similar to RIKEN cDNA 1200009I24 gene [Xenopus
  misc_feature (98)..(789): Homolog of NCBI NO: 27881916 NR Description: Similar to RIKEN cDNA 1200009I24 gene [Danio
  misc_feature (37)..(467): Homolog of NCBI NO: 32699415 NR Description: Nuclear valosin-containing protein-like (Nuclear
  misc_feature (476)..(795): Homolog of NCBI NO: 32699415 NR Description: Nuclear valosin-containing protein-like (Nuclear
MGGGINRRYLSQVMDTCGKDLSTAEDIVDDLRSRYGNFARLTRQVLLLNVRQVLNVRNNKRVKDEDEDDNIGDEEGSASQRKKQRRVDEKEEKLQRAEQSHLRKRNMERSVSSSPSSSSSSEDSGDVSTSEDAVYGEKLSPPRFDLINDSLRDNYAKLNSSSKKPIGSPAEKNVEVETVSNKGRSKLATMGARKEAKVSLSLSGATGNGDLEVEGTKGPTFKDFGGIKKILDELEMNVLFPILNPEPFKKIGVKPPSGILFHGPPGCGKTKLANAIANEAGVPFYKISATEVISGVSGASEENIRELFSKAYRTAPSIVFIDEIDAIGSKRENQQREMEKRIVTQLLTCMDGPGNKGDKNAPDSSAGFVLVIGATNRPDALDPALRRSGRFETEIALTAPDEDARAEILSVVAQKLRLEGPFDKKRIARLTPGFVGADLESVAYLAGRKAIKRILDSRKSEQSGDGEDDKSWLRMPWPEEELEKLFVKMSDFEEAVNLVQASLTREGFSIVPDVKWDDVGGLDHLRLQFNRYIVRPIKKPDIYKAFGVDLETGFLLYGPPGCGKTLIAKAAANEAGANFMHIKGAELLNKYVGESELAIRTLFQRARTCAPCVIFFDEVDALTTSRGKEGAWVVERLLNQFLVELDGGERRNVYVIGATNRPDVVDPAFLRPGRFGNLLYVPLPNADERASILKAIARKKPIDPSVDLDGIAKNNCEGFSGADLAHLVQKATFQAVEEMIGSSESSEDDVTDITQCTIKTRHFEQALSLVSPSVNKQQRRHYDALSTKLQESVGRNTEQVTIGPSFTLE

SEQ ID NO: 83816 - protein, 796 aa, Arabidopsis thaliana
  peptide (1)..(796): Ceres Seq. ID no. 12671892
  misc_feature (84)..(765): Homolog of NCBI NO: 34897818 NR Description: putative cell division control protein [Oryza
  misc_feature (49)..(443): Homolog of NCBI NO: 19112584 NR Description: AAA ATPase [Schizosaccharomyces pombe]
  misc_feature (463)..(775): Homolog of NCBI NO: 19112584 NR Description: AAA ATPase [Schizosaccharomyces pombe]
  misc_feature (46)..(481): Homolog of NCBI NO: 40362746 NR Description: AAA ATPase [Candida albicans]
  misc_feature (445)..(776): Homolog of NCBI NO: 40362746 NR Description: AAA ATPase [Candida albicans]
  misc_feature (51)..(450): Homolog of NCBI NO: 28278757 NR Description: Similar to RIKEN cDNA 1200009I24 gene [Xenopus
  misc_feature (463)..(776): Homolog of NCBI NO: 28278757 NR Description: Similar to RIKEN cDNA 1200009I24 gene [Xenopus
  misc_feature (85)..(776): Homolog of NCBI NO: 27881916 NR Description: Similar to RIKEN cDNA 1200009I24 gene [Danio
  misc_feature (24)..(454): Homolog of NCBI NO: 32699415 NR Description: Nuclear valosin-containing protein-like (Nuclear
  misc_feature (463)..(782): Homolog of NCBI NO: 32699415 NR Description: Nuclear valosin-containing protein-like (Nuclear
MDTCGKDLSTAEDIVDDLRSRYGNFARLTRQVLLLNVRQVLNVRNNKRVKDEDEDDNIGDEEGSASQRKKQRRVDEKEEKLQRAEQSHLRKRNMERSVSSSPSSSSSSEDSGDVSTSEDAVYGEKLSPPRFDLINDSLRDNYAKLNSSSKKPIGSPAEKNVEVETVSNKGRSKLATMGARKEAKVSLSLSGATGNGDLEVEGTKGPTFKDFGGIKKILDELEMNVLFPILNPEPFKKIGVKPPSGILFHGPPGCGKTKLANAIANEAGVPFYKISATEVISGVSGASEENIRELFSKAYRTAPSIVFIDEIDAIGSKRENQQREMEKRIVTQLLTCMDGPGNKGDKNAPDSSAGFVLVIGATNRPDALDPALRRSGRFETEIALTAPDEDARAEILSVVAQKLRLEGPFDKKRIARLTPGFVGADLESVAYLAGRKAIKRILDSRKSEQSGDGEDDKSWLRMPWPEEELEKLFVKMSDFEEAVNLVQASLTREGFSIVPDVKWDDVGGLDHLRLQFNRYIVRPIKKPDIYKAFGVDLETGFLLYGPPGCGKTLIAKAAANEAGANFMHIKGAELLNKYVGESELAIRTLFQRARTCAPCVIFFDEVDALTTSRGKEGAWVVERLLNQFLVELDGGERRNVYVIGATNRPDVVDPAFLRPGRFGNLLYVPLPNADERASILKAIARKKPIDPSVDLDGIAKNNCEGFSGADLAHLVQKATFQAVEEMIGSSESSEDDVTDITQCTIKTRHFEQALSLVSPSVNKQQRRHYDALSTKLQESVGRNTEQVTIGPSFTLE

SEQ ID NO: 83817 - DNA, 1470 bp, Arabidopsis thaliana
  misc_feature (1)..(1470): Ceres Seq. ID no. 12671893
  misc_feature: MA Experiment ID: 20000171 Result: Up-regulated in Transcription
  misc_feature: MA Experiment 20000171 PARAMETER Experiment Name: At_42deg_Heat_P Parameter: Age (day) Value: 14
  misc_feature: MA Experiment 20000171 PARAMETER Experiment Name: At_42deg_Heat_P Parameter: Organism Value: A. thaliana
  misc_feature: MA Experiment 20000171 PARAMETER Experiment Name: At_42deg_Heat_P Parameter: Plant Line Value: WS
  misc_feature: MA Experiment 20000171 PARAMETER Experiment Name: At_42deg_Heat_P Parameter: Temperature (deg C) Value: 42 vs. 22
  misc_feature: MA Experiment 20000171 PARAMETER Experiment Name: At_42deg_Heat_P Parameter: Timepoint (hr) Value: 1
  misc_feature: MA Experiment 20000171 PARAMETER Experiment Name: At_42deg_Heat_P Parameter: Tissue Value: Aerial
  misc_feature: MA Experiment ID: 20000173 Result: Up-regulated in Transcription
  misc_feature: MA Experiment 20000173 PARAMETER Experiment Name: At_42deg_Heat_P Parameter: Age (day) Value: 14
  misc_feature: MA Experiment 20000173 PARAMETER Experiment Name: At_42deg_Heat_P Parameter: Organism Value: A. thaliana
  misc_feature: MA Experiment 20000173 PARAMETER Experiment Name: At_42deg_Heat_P Parameter: Plant Line Value: WS
  misc_feature: MA Experiment 20000173 PARAMETER Experiment Name: At_42deg_Heat_P Parameter: Temperature (deg C) Value: 42 vs. 22
  misc_feature: MA Experiment 20000173 PARAMETER Experiment Name: At_42deg_Heat_P Parameter: Timepoint (hr) Value: 6
  misc_feature: MA Experiment 20000173 PARAMETER Experiment Name: At_42deg_Heat_P Parameter: Tissue Value: Aerial
  misc_feature: MA Experiment ID: 20000182 Result: Up-regulated in Transcription
  misc_feature: MA Experiment 20000182 PARAMETER Experiment Name: At_2mM_SA_P Parameter: Age (day) Value: 14
  misc_feature: MA Experiment 20000182 PARAMETER Experiment Name: At_2mM_SA_P Parameter: Organism Value: A. thaliana
  misc_feature: MA Experiment 20000182 PARAMETER Experiment Name: At_2mM_SA_P Parameter: Plant Line Value: WS
  misc_feature: MA Experiment 20000182 PARAMETER Experiment Name: At_2mM_SA_P Parameter: Timepoint (hr) Value: 6
  misc_feature: MA Experiment 20000182 PARAMETER Experiment Name: At_2mM_SA_P Parameter: Tissue Value: Aerial
  misc_feature: MA Experiment 20000182 PARAMETER Experiment Name: At_2mM_SA_P Parameter: Treatment Value: 2mM SA vs. No Treatment
  misc_feature: MA Experiment ID: 20000436 Result: Up-regulated in Transcription
  misc_feature: MA Experiment 20000436 PARAMETER Experiment Name: At_Drought_P Parameter: Age (day) Value: 7
  misc_feature: MA Experiment 20000436 PARAMETER Experiment Name: At_Drought_P Parameter: Organism Value: A. thaliana
  misc_feature: MA Experiment 20000436 PARAMETER Experiment Name: At_Drought_P Parameter: Plant Line Value: WS
  misc_feature: MA Experiment 20000436 PARAMETER Experiment Name: At_Drought_P Parameter: Timepoint (hr) Value: 12
  misc_feature: MA Experiment 20000436 PARAMETER Experiment Name: At_Drought_P Parameter: Tissue Value: Whole Plant
  misc_feature: MA Experiment 20000436 PARAMETER Experiment Name: At_Drought_P Parameter: Treatment Value: Drought vs. No Drought
  misc_feature: MA Experiment ID: 20000437 Result: Up-regulated in Transcription
  misc_feature: MA Experiment 20000437 PARAMETER Experiment Name: At_Drought_P Parameter: Age (day) Value: 8
  misc_feature: MA Experiment 20000437 PARAMETER Experiment Name: At_Drought_P Parameter: Organism Value: A. thaliana
  misc_feature: MA Experiment 20000437 PARAMETER Experiment Name: At_Drought_P Parameter: Plant Line Value: WS
  misc_feature: MA Experiment 20000437 PARAMETER Experiment Name: At_Drought_P Parameter: Timepoint (hr) Value: 24
  misc_feature: MA Experiment 20000437 PARAMETER Experiment Name: At_Drought_P Parameter: Tissue Value: Whole Plant
  misc_feature: MA Experiment 20000437 PARAMETER Experiment Name: At_Drought_P Parameter: Treatment Value: Drought vs. No Drought
  misc_feature: MA Experiment ID: 20000709 Result: Up-regulated in Transcription
  misc_feature: MA Experiment 20000709 PARAMETER Experiment Name: At_15mM_NH4NO3_L-to-H_P Parameter: Age (hr) Value: 14
  misc_feature: MA Experiment 20000709 PARAMETER Experiment Name: At_15mM_NH4NO3_L-to-H_P Parameter: Organism Value: A. thaliana
  misc_feature: MA Experiment 20000709 PARAMETER Experiment Name: At_15mM_NH4NO3_L-to-H_P Parameter: Plant Line Value: WS
  misc_feature: MA Experiment 20000709 PARAMETER Experiment Name: At_15mM_NH4NO3_L-to-H_P Parameter: Timepoint (hr) Value: 4
  misc_feature: MA Experiment 20000709 PARAMETER Experiment Name: At_15mM_NH4NO3_L-to-H_P Parameter: Tissue Value: Aerial
  misc_feature: MA Experiment 20000709 PARAMETER Experiment Name: At_15mM_NH4NO3_L-to-H_P Parameter: Treatment Value: 15mM NH4NO3 vs. 30mM Mannitol
  misc_feature: MA Experiment ID: 20000794 Result: Up-regulated in Transcription
  misc_feature: MA Experiment 20000794 PARAMETER Experiment Name: At_Petals_P Parameter: Age (day) Value: 23-25 days
  misc_feature: MA Experiment 20000794 PARAMETER Experiment Name: At_Petals_P Parameter: Plant Line Value: WS
  misc_feature: MA Experiment 20000794 PARAMETER Experiment Name: At_Petals_P Parameter: Tissue Value: Petals vs. Whole plant
  misc_feature: MA Experiment ID: 20001904 Result: Up-regulated in Transcription
  misc_feature: MA Experiment 20001904 PARAMETER Experiment Name: At_Drought_Reproduction_P Parameter: Age (day) Value: 37
  misc_feature: MA Experiment 20001904 PARAMETER Experiment Name: At_Drought_Reproduction_P Parameter: Organism Value: A. thaliana
  misc_feature: MA Experiment 20001904 PARAMETER Experiment Name: At_Drought_Reproduction_P Parameter: Plant Line Value: WS
  misc_feature: MA Experiment 20001904 PARAMETER Experiment Name: At_Drought_Reproduction_P Parameter: Timepoint (day) Value: 7
  misc_feature: MA Experiment 20001904 PARAMETER Experiment Name: At_Drought_Reproduction_P Parameter: Tissue Value: Rosettes
  misc_feature: MA Experiment 20001904 PARAMETER Experiment Name: At_Drought_Reproduction_P Parameter: Treatment Value: Drought vs. No Drought
  misc_feature: MA Experiment ID: 20001905 Result: Up-regulated in Transcription
  misc_feature: MA Experiment 20001905 PARAMETER Experiment Name: At_Drought_Reproduction_P Parameter: Age (day) Value: 40
  misc_feature: MA Experiment 20001905 PARAMETER Experiment Name: At_Drought_Reproduction_P Parameter: Organism Value: A. thaliana
  misc_feature: MA Experiment 20001905 PARAMETER Experiment Name: At_Drought_Reproduction_P Parameter: Plant Line Value: WS
  misc_feature: MA Experiment 20001905 PARAMETER Experiment Name: At_Drought_Reproduction_P Parameter: Timepoint (day) Value: 10
  misc_feature: MA Experiment 20001905 PARAMETER Experiment Name: At_Drought_Reproduction_P Parameter: Tissue Value: Rosettes
  misc_feature: MA Experiment 20001905 PARAMETER Experiment Name: At_Drought_Reproduction_P Parameter: Treatment Value: Drought vs. No Drought
  misc_feature: MA Experiment ID: 20001906 Result: Up-regulated in Transcription
  misc_feature: MA Experiment 20001906 PARAMETER Experiment Name: At_Drought_Reproduction_P Parameter: Age (day) Value: 35
  misc_feature: MA Experiment 20001906 PARAMETER Experiment Name: At_Drought_Reproduction_P Parameter: Organism Value: A. thaliana
  misc_feature: MA Experiment 20001906 PARAMETER Experiment Name: At_Drought_Reproduction_P Parameter: Plant Line Value: WS
  misc_feature: MA Experiment 20001906 PARAMETER Experiment Name: At_Drought_Reproduction_P Parameter: Timepoint (day) Value: 5
  misc_feature: MA Experiment 20001906 PARAMETER Experiment Name: At_Drought_Reproduction_P Parameter: Tissue Value: Siliques
  misc_feature: MA Experiment 20001906 PARAMETER Experiment Name: At_Drought_Reproduction_P Parameter: Treatment Value: Drought vs. No Drought
  misc_feature: MA Experiment ID: 20001908 Result: Up-regulated in Transcription
  misc_feature: MA Experiment 20001908 PARAMETER Experiment Name: At_Drought_Reproduction_P Parameter: Age (day) Value: 40
  misc_feature: MA Experiment 20001908 PARAMETER Experiment Name: At_Drought_Reproduction_P Parameter: Organism Value: A. thaliana
  misc_feature: MA Experiment 20001908 PARAMETER Experiment Name: At_Drought_Reproduction_P Parameter: Plant Line Value: WS
  misc_feature: MA Experiment 20001908 PARAMETER Experiment Name: At_Drought_Reproduction_P Parameter: Timepoint (day) Value: 10
  misc_feature: MA Experiment 20001908 PARAMETER Experiment Name: At_Drought_Reproduction_P Parameter: Tissue Value: Siliques
  misc_feature: MA Experiment 20001908 PARAMETER Experiment Name: At_Drought_Reproduction_P Parameter: Treatment Value: Drought vs. No Drought
atgggaggagggaattccaaagaagagtcgtcatcaccatcttcatcatcatgggcttctcatcaaagttatcctcaatatggacctgatagctacaactatcctcctccacccacttatgctcccgctccatctcctgctcctgctcctgctccggtgcctgctccatctccggcttccagttatggccctcagtatagtcaagagggttatgcatcacagcctaataatcctccaccacccacttatgctcccgctccatctccggcttccagttatggccatcagtatagtcaagagggctatgcatcagcagcatcacagcctaattatcctccacctccttcacagagtcaagttgctgacaggaagaaatttgatcggaggtattccaaaatatcggataactactcttctttactgcaggtgtccgaggctctaggccgtgcaggtcttgaatcttctaatctaatcgttggtattgatttcaccaagagcaatgaatggacaggggccaagtccttcaataggaaaagcttgcatcacttgagcaataccccgaatccatacgagcaagcaattactatcattggaagaaccttagccgcctttgacgaggataacttaattccttgttatggttttggagacgcatcaactcatgatcaagacgtgtttagtttctatccagagggaagattctgtaatggatttgaggaagtattggctcgttatagagaaattgtacctcagcttaagctcgcaggaccaacttcttttgccccgatcattgaaatggcaatgacagtggttgagcagagtagtggccaatatcatgtgttagtgattatagctgatggccaggtcacaagaagtgtcgataccgaacacgggcggctaagtccgcaagaacagaagacagtagatgcaattgtgaaagcaagtacccttcctttgtcaatagtcttagttggggtcggggatggaccatgggacatgatgcaggaatttgatgataacatacctgcccgagctttcgataacttccagtttgtgaacttcacagagatcatgtcaaagaacaaagaccagtctcggaaggagacagagtttgcgctgtctgctctcatggagatccctccacagtacaaagcaacgatagagcttaaccttttaggggtaagaaatggaaatatcccacagagaatcccacttccgccaccggtgcagagtggatcatcattctctagttcccggataccgaattttgaaccgagtgtacctccttatccatttgagagcaagcaaatgagtagtgcagacgatattcagctatgtccgatatgtctgagcaacccgaaaaacatggcgtttggttgtggccatcagacttgttgtgaatgcggaccagatcttaaagtgtgtcctatttgtcgtgcgccgatccagaccagaatcaagctttactaa

SEQ ID NO: 83818 - protein, 489 aa, Arabidopsis thaliana
  peptide (1)..(489): Ceres Seq. ID no. 12671894
  misc_feature (19)..(116): Pfam Name: Extensin-like region Pfam Description: Extensin-like region
  misc_feature (1)..(489): Homolog of NCBI NO: 15232157 NR Description: unknown protein; protein id: At3g01650.1 thaliana] >gi|6016736|gb|AAF01562.1|AC009325_32 unknown protein
  misc_feature (61)..(489): Homolog of NCBI NO: 15241400 NR Description: putative protein; protein id: At5g14420.1, by cDNA: gi_20466261 [Arabidopsis thaliana]
  misc_feature (1)..(67): Homolog of NCBI NO: 15241400 NR Description: putative protein; protein id: At5g14420.1, by cDNA: gi_20466261 [Arabidopsis thaliana]
  misc_feature (83)..(489): Homolog of NCBI NO: 18408863 NR Description: F12A21.7; protein id: At1g67800.1, supported by
  misc_feature (83)..(489): Homolog of NCBI NO: 30697566 NR Description: copine-related [Arabidopsis thaliana]
  misc_feature (83)..(468): Homolog of NCBI NO: 20804894 NR Description: P0497A05.19 [Oryza sativa (japonica
  misc_feature (125)..(489): Homolog of NCBI NO: 22328041 NR Description: putative protein; protein id: At5g63970.1, by cDNA: gi_20259325 [Arabidopsis thaliana] unknown protein [Arabidopsis thaliana]
  misc_feature (133)..(489): Homolog of NCBI NO: 34905794 NR Description: P0401G10.23 [Oryza sativa (japonica
  misc_feature (101)..(489): Homolog of NCBI NO: 18412353 NR Description: expressed protein; protein id: At1g79380.1, by cDNA: gi_13937148 [Arabidopsis thaliana]
  misc_feature (96)..(462): Homolog of NCBI NO: 18481708 NR Description: hypothetical protein [Sorghum bicolor]
MGGGNSKEESSSPSSSSWASHQSYPQYGPDSYNYPPPPTYAPAPSPAPAPAPVPAPSPASSYGPQYSQEGYASQPNNPPPPTYAPAPSPASSYGHQYSQEGYASAASQPNYPPPPSQSQVADRKKFDRRYSKISDNYSSLLQVSEALGRAGLESSNLIVGIDFTKSNEWTGAKSFNRKSLHHLSNTPNPYEQAITIIGRTLAAFDEDNLIPCYGFGDASTHDQDVFSFYPEGRFCNGFEEVLARYREIVPQLKLAGPTSFAPIIEMAMTVVEQSSGQYHVLVIIADGQVTRSVDTEHGRLSPQEQKTVDAIVKASTLPLSIVLVGVGDGPWDMMQEFDDNIPARAFDNFQFVNFTEIMSKNKDQSRKETEFALSALMEIPPQYKATIELNLLGVRNGNIPQRIPLPPPVQSGSSFSSSRIPNFEPSVPPYPFESKQMSSADDIQLCPICLSNPKNMAFGCGHQTCCECGPDLKVCPICRAPIQTRIKLY

SEQ ID NO: 83819 - DNA, 2023 bp, Arabidopsis thaliana
  misc_feature (1)..(2023): Ceres Seq. ID no. 12671899
  misc_feature: MA Experiment ID: 20000348 Result: Down-regulated in Transcription
  misc_feature: MA Experiment 20000348 PARAMETER Experiment Name: At_100uM_ABA_Sub_P Parameter: Age (day) Value: 14
  misc_feature: MA Experiment 20000348 PARAMETER Experiment Name: At_100uM_ABA_Sub_P Parameter: Organism Value: A. thaliana
  misc_feature: MA Experiment 20000348 PARAMETER Experiment Name: At_100uM_ABA_Sub_P Parameter: Plant Line Value: WS
  misc_feature: MA Experiment 20000348 PARAMETER Experiment Name: At_100uM_ABA_Sub_P Parameter: Timepoint (hr) Value: 1
  misc_feature: MA Experiment 20000348 PARAMETER Experiment Name: At_100uM_ABA_Sub_P Parameter: Tissue Value: Aerial
  misc_feature: MA Experiment 20000348 PARAMETER Experiment Name: At_100uM_ABA_Sub_P Parameter: Treatment Value: 100uM ABA vs. No Treatment
gaaagaaatacaaggttgatcgtacaaagaaatcgaaaaaatggcgaggacgacgcgagaaagagtgaaatcgttcataaacaatagatggctagtgtttgttgcggccatgtggattcagtcttgcgctggcatcggttacttgttcggcagcatctctcctgtcatcaagagctccctcaactacaaccagaaacagctctccaggctcggtgtcgccaaagatctcggcgatagtgtcggcttcctcgctggtactctctccgagatcttgcctctctgggccgctcttctcgtcggctctgtccagaaccttgtcggctatggctgggtttggcttatcgtcaccggtcgtgctcccattcttcctttatgggctatgtgtatcctcatttttgttgggaacaacggggagacctacttcaacaccgctgcattagtttctggtgttcagaactttcccaagagccgtggtcctgtcgtcggtatcctcaaggggtttgctggcctcggcggtgccatcctctcccaggtatacacaatgatccactcctctgaccgtgcatccctcatcttcatggttgctgttgccccttcagttgttgttgttcctctcatgttcttcatcagacccgtcggtggtcacagacagatccgttcttctgatgccaccagcttcaccgtcatctatgccgtctgcattctacttgctgcctatctcatggcagtgatgcttgttgaagatttcattgatcttagccattcaatcatcattgctttcaccgttgtcttgtttgccattcttcttgtacccatcttcataccaatcgcaacgagttgcttcacagcatcaaccgacccctgtgacacgctcgaagaacctctccttggcgatcagcaaggtcaggatccgggacagtccaccacccctgaccatggtcctgagcttatatttagtgaagtggaagacgagaaaccaaaagaagtagatttgcttcctgcagtggagagacataagagaattgctcagttgcaagcaaagctgatgcaagcagctgcagagggtgctgttcgggtcaagagacggaggggccctcacagaggcgaggattttactttaactcaagcactcgttaaagccgatttctggctcatcttcttctccctcttgctcggatctggttcgggtctaacggtcatagataaccttgggcagatgagtcagtctctcggttacgataacactcacgtctttgtgtccatgattagcatttggaacttccttggacgcattggaggcggttatttctccgaactcatcgtcagggactatgcgtacccaagaccggttgctatagcagtggctcagcttgtaatgtcagtaggacacatcttctttgcatacggatggcctggagctatgcacatcggcacactattgattggacttggctatggtgctcactgggccatcgtcccagccactgcctctgagctctttggtctaaagaagtttggagctttatacaatttcctgacgctggccaacccagcgggatccttagtcttttcggggctgatcgcaagttccatttatgaccgcgaagcagagaggcaagcacaaggatccttgttcaatcctgacgatgtcctgagatgccgaggttccatctgttacttcttgacgtcactcataatgtctggattctgcctcattgcggccgccttgagtatgatccttgtgcaacgtacgaagccggtttacacaaatctctacggcaaaacccgcaactgattttaagataccatattacgaaaatatcccaccaagaaaagaagctgggttctttgagtttcatacctatatatatgattgtgttcatcatcttattctttggcttggtcttccacttccccatacatgtgtatttggttatgtaacgattttttgtgtccggtgttgtgtatggattttgaattcgcatttgtaataattgtattcacattattcatattctccagc

SEQ ID NO: 83820 - protein, 584 aa, Arabidopsis thaliana
  peptide (1)..(584): Ceres Seq. ID no. 12671900
  misc_feature (69)..(198): Pfam Name: Sugar (and other) transporter Pfam Description: Sugar (and other) transporter
  misc_feature (1)..(584): Homolog of NCBI NO: 18395988 NR Description: unknown protein; protein id: At3g01930.1 thaliana] >gi|6091732|gb|AAF03444.1|AC010797_20 unknown protein thaliana] >gi|6513938|gb|AAF14842.1|AC011664_24 unknown protein
  misc_feature (1)..(559): Homolog of NCBI NO: 11358583 NR Description: nodulin-like protein [imported] - Arabidopsis
  misc_feature (1)..(583): Homolog of NCBI NO: 15241312 NR Description: nodulin-like protein; protein id: At5g14120.1
  misc_feature (1)..(429): Homolog of NCBI NO: 1532169 NR Description: similar to a E. coli hypothetical protein F402
  misc_feature (114)..(584): Homolog of NCBI NO: 30678455 NR Description: expressed protein [Arabidopsis thaliana]
  misc_feature (6)..(265): Homolog of NCBI NO: 18423161 NR Description: nodulin-like protein; protein id: At5g50520.1,
  misc_feature (347)..(579): Homolog of NCBI NO: 18423161 NR Description: nodulin-like protein; protein id: At5g50520.1,
  misc_feature (16)..(283): Homolog of NCBI NO: 15227274 NR Description: nodulin-like protein; protein id: At2g16660.1, by cDNA: gi_17979282, supported by cDNA: gi_20465249 [Arabidopsis
  misc_feature (328)..(584): Homolog of NCBI NO: 15227274 NR Description: nodulin-like protein; protein id: At2g16660.1, by cDNA: gi_17979282, supported by cDNA: gi_20465249 [Arabidopsis
  misc_feature (306)..(583): Homolog of NCBI NO: 15226338 NR Description: nodulin-like protein; protein id: At2g28120.1, by cDNA: gi_16209713, supported by cDNA: gi_17064921, supported
MARTTRERVKSFINNRWLVFVAAMWIQSCAGIGYLFGSISPVIKSSLNYNQKQLSRLGVAKDLGDSVGFLAGTLSEILPLWAALLVGSVQNLVGYGWVWLIVTGRAPILPLWAMCILIFVGNNGETYFNTAALVSGVQNFPKSRGPVVGILKGFAGLGGAILSQVYTMIHSSDRASLIFMVAVAPSVVVVPLMFFIRPVGGHRQIRSSDATSFTVIYAVCILLAAYLMAVMLVEDFIDLSHSIIIAFTVVLFAILLVPIFIPIATSCFTASTDPCDTLEEPLLGDQQGQDPGQSTTPDHGPELIFSEVEDEKPKEVDLLPAVERHKRIAQLQAKLMQAAAEGAVRVKRRRGPHRGEDFTLTQALVKADFWLIFFSLLLGSGSGLTVIDNLGQMSQSLGYDNTHVFVSMISIWNFLGRIGGGYFSELIVRDYAYPRPVAIAVAQLVMSVGHIFFAYGWPGAMHIGTLLIGLGYGAHWAIVPATASELFGLKKFGALYNFLTLANPAGSLVFSGLIASSIYDREAERQAQGSLFNPDDVLRCRGSICYFLTSLIMSGFCLIAAALSMILVQRTKPVYTNLYGKTRN

SEQ ID NO: 83821 - protein, 561 aa, Arabidopsis thaliana
  peptide (1)..(561): Ceres Seq. ID no. 12671901
  misc_feature (46)..(175): Pfam Name: Sugar (and other) transporter Pfam Description: Sugar (and other) transporter
  misc_feature (1)..(561): Homolog of NCBI NO: 18395988 NR Description: unknown protein; protein id: At3g01930.1 thaliana] >gi|6091732|gb|AAF03444.1|AC010797_20 unknown protein thaliana] >gi|6513938|gb|AAF14842.1|AC011664_24 unknown protein
  misc_feature (1)..(536): Homolog of NCBI NO: 11358583 NR Description: nodulin-like protein [imported] - Arabidopsis
  misc_feature (1)..(560): Homolog of NCBI NO: 15241312 NR Description: nodulin-like protein; protein id: At5g14120.1
  misc_feature (1)..(406): Homolog of NCBI NO: 1532169 NR Description: similar to a E. coli hypothetical protein F402
  misc_feature (91)..(561): Homolog of NCBI NO: 30678455 NR Description: expressed protein [Arabidopsis thaliana]
  misc_feature (1)..(242): Homolog of NCBI NO: 18423161 NR Description: nodulin-like protein; protein id: At5g50520.1,
  misc_feature (324)..(556): Homolog of NCBI NO: 18423161 NR Description: nodulin-like protein; protein id: At5g50520.1,
  misc_feature (1)..(260): Homolog of NCBI NO: 15227274 NR Description: nodulin-like protein; protein id: At2g16660.1, by cDNA: gi_17979282, supported by cDNA: gi_20465249 [Arabidopsis
  misc_feature (305)..(561): Homolog of NCBI NO: 15227274 NR Description: nodulin-like protein; protein id: At2g16660.1, by cDNA: gi_17979282, supported by cDNA: gi_20465249 [Arabidopsis
  misc_feature (283)..(560): Homolog of NCBI NO: 15226338 NR Description: nodulin-like protein; protein id: At2g28120.1, by cDNA: gi_16209713, supported by cDNA: gi_17064921, supported
MWIQSCAGIGYLFGSISPVIKSSLNYNQKQLSRLGVAKDLGDSVGFLAGTLSEILPLWAALLVGSVQNLVGYGWVWLIVTGRAPILPLWAMCILIFVGNNGETYFNTAALVSGVQNFPKSRGPVVGILKGFAGLGGAILSQVYTMIHSSDRASLIFMVAVAPSVVVVPLMFFIRPVGGHRQIRSSDATSFTVIYAVCILLAAYLMAVMLVEDFIDLSHSIIIAFTVVLFAILLVPIFIPIATSCFTASTDPCDTLEEPLLGDQQGQDPGQSTTPDHGPELIFSEVEDEKPKEVDLLPAVERHKRIAQLQAKLMQAAAEGAVRVKRRRGPHRGEDFTLTQALVKADFWLIFFSLLLGSGSGLTVIDNLGQMSQSLGYDNTHVFVSMISIWNFLGRIGGGYFSELIVRDYAYPRPVAIAVAQLVMSVGHIFFAYGWPGAMHIGTLLIGLGYGAHWAIVPATASELFGLKKFGALYNFLTLANPAGSLVFSGLIASSIYDREAERQAQGSLFNPDDVLRCRGSICYFLTSLIMSGFCLIAAALSMILVQRTKPVYTNLYGKTRN

SEQ ID NO: 83822 - protein, 471 aa, Arabidopsis thaliana
  peptide (1)..(471): Ceres Seq. ID no. 12671902
  misc_feature (1)..(85): Pfam Name: Sugar (and other) transporter Pfam Description: Sugar (and other) transporter
  misc_feature (1)..(471): Homolog of NCBI NO: 18395988 NR Description: unknown protein; protein id: At3g01930.1 thaliana] >gi|6091732|gb|AAF03444.1|AC010797_20 unknown protein thaliana] >gi|6513938|gb|AAF14842.1|AC011664_24 unknown protein
  misc_feature (1)..(446): Homolog of NCBI NO: 11358583 NR Description: nodulin-like protein [imported] - Arabidopsis
  misc_feature (1)..(470): Homolog of NCBI NO: 15241312 NR Description: nodulin-like protein; protein id: At5g14120.1
  misc_feature (1)..(316): Homolog of NCBI NO: 1532169 NR Description: similar to a E. coli hypothetical protein F402
  misc_feature (1)..(471): Homolog of NCBI NO: 30678455 NR Description: expressed protein [Arabidopsis thaliana]
  misc_feature (1)..(152): Homolog of NCBI NO: 18423161 NR Description: nodulin-like protein; protein id: At5g50520.1,
  misc_feature (234)..(466): Homolog of NCBI NO: 18423161 NR Description: nodulin-like protein; protein id: At5g50520.1,
  misc_feature (1)..(170): Homolog of NCBI NO: 15227274 NR Description: nodulin-like protein; protein id: At2g16660.1, by cDNA: gi_17979282, supported by cDNA: gi_20465249 [Arabidopsis
  misc_feature (215)..(471): Homolog of NCBI NO: 15227274 NR Description: nodulin-like protein; protein id: At2g16660.1, by cDNA: gi_17979282, supported by cDNA: gi_20465249 [Arabidopsis
  misc_feature (193)..(470): Homolog of NCBI NO: 15226338 NR Description: nodulin-like protein; protein id: At2g28120.1, by cDNA: gi_16209713, supported by cDNA: gi_17064921, supported
MCILIFVGNNGETYFNTAALVSGVQNFPKSRGPVVGILKGFAGLGGAILSQVYTMIHSSDRASLIFMVAVAPSVVVVPLMFFIRPVGGHRQIRSSDATSFTVIYAVCILLAAYLMAVMLVEDFIDLSHSIIIAFTVVLFAILLVPIFIPIATSCFTASTDPCDTLEEPLLGDQQGQDPGQSTTPDHGPELIFSEVEDEKPKEVDLLPAVERHKRIAQLQAKLMQAAAEGAVRVKRRRGPHRGEDFTLTQALVKADFWLIFFSLLLGSGSGLTVIDNLGQMSQSLGYDNTHVFVSMISIWNFLGRIGGGYFSELIVRDYAYPRPVAIAVAQLVMSVGHIFFAYGWPGAMHIGTLLIGLGYGAHWAIVPATASELFGLKKFGALYNFLTLANPAGSLVFSGLIASSIYDREAERQAQGSLFNPDDVLRCRGSICYFLTSLIMSGFCLIAAALSMILVQRTKPVYTNLYGKTRN

SEQ ID NO: 83823 - DNA, 1245 bp, Arabidopsis thaliana
  misc_feature (1)..(1245): Ceres Seq. ID no. 12671915
  misc_feature: MA Experiment ID: 20000307 Result: Up-regulated in Transcription
  misc_feature: MA Experiment 20000307 PARAMETER Experiment Name: At_Germinating_Seeds_Sub_P Parameter: Age (hr) Value: 24 vs. 0
  misc_feature: MA Experiment 20000307 PARAMETER Experiment Name: At_Germinating_Seeds_Sub_P Parameter: Organism Value: A. thaliana
  misc_feature: MA Experiment 20000307 PARAMETER Experiment Name: At_Germinating_Seeds_Sub_P Parameter: Plant Line Value: WS
  misc_feature: MA Experiment 20000307 PARAMETER Experiment Name: At_Germinating_Seeds_Sub_P Parameter: Tissue Value: Germinating Seeds
atgaattgcttttcatgtttttatttccatgaaaagaaaaaggttccaagagattcagacaacagctaccggagaaatggggaggtgaccggtagagacaacaacaaaacacaccctgagaatccaaagactgtaaatgagcagaacaagaacaatgatgaagacaaagaagtgacaaacaacattgctgctcaaacattcagcttcagggagctagctactgcaactaagaatttcagacaagaatgtctgatcggtgaaggcggctttggaagggtttacaaaggcaaactcgagaaaaccggcatgattgtggcagtgaagcaattagatagaaatggattgcaagggaacaaagagttcatagtagaggtcttgatgttaagtcttttgcatcacaagcatctcgtgaatctcattgggtattgtgctgatggagatcagagacttctcgtctatgagtacatgtctcgcggttcactcgaagatcatctcctcgatctaacaccggaccaaataccgttggattgggacacaaggattagaatcgctctaggagccgcaatgggtcttgaatacttgcatgacaaggcaaatcctccagtgatctacagagatctcaaggcagctaatatccttctagacggtgaattcaatgccaagttatccgatttcggtctggcaaagctaggccctgtcggggacaaacaacatgtgtcttccagagttatgggaacttacggatattgtgctccagagtatcagagaaccggtcagttaactacaaaatccgatgtttatagcttcggagttgtgttgttggagttgataactggacgaagagttattgatactaccagacccaaagatgaacagaatctagtaacttgggctcaaccggtgttcaaagaaccgagtagattcccagagttagcggatccgagtctggagggagtgttcccggagaaagctctgaatcaagcggtggcagtggcagcaatgtgtttacaagaagaggcaacggtacggccactcatgagtgacgttgtaaccgctctcggtttcttaggaaccgctcctgacggctcaatctctgttccacactacgatgatcctcctcagccgtcggatgaaacgtccgtggaggattcagtggcagcggaagaacgggaaagagccgtggctgaggcaatggagtggggagttgcttcaagagcacattcccggaacccaagtgcttcttga

SEQ ID NO: 83824 - protein, 414 aa, Arabidopsis thaliana
  peptide (1)..(414): Ceres Seq. ID no. 12671916
  misc_feature (1)..(414): Homolog of NCBI NO: 18397825 NR Description: putative protein kinase; protein id: At3g07070.1 thaliana] >gi|6642658|gb|AAF20239.1|AC012395_26 putative protein
  misc_feature (1)..(414): Homolog of NCBI NO: 28416685 NR Description: At3g07070 [Arabidopsis thaliana]
  misc_feature (1)..(363): Homolog of NCBI NO: 11994661 NR Description: receptor protein kinase-like protein [Arabidopsis
  misc_feature (59)..(363): Homolog of NCBI NO: 15230190 NR Description: protein kinase, putative; protein id: At3g24790.1
  misc_feature (3)..(392): Homolog of NCBI NO: 15238886 NR Description: protein kinase -like protein; protein id:
  misc_feature (55)..(362): Homolog of NCBI NO: 15235623 NR Description: putative protein; protein id: At4g13190.1
  misc_feature (11)..(368): Homolog of NCBI NO: 34907210 NR Description: putative serine/threonine kinase PBS1 protein
  misc_feature (1)..(378): Homolog of NCBI NO: 15240038 NR Description: protein kinase-like; protein id: At5g13160.1, by cDNA: gi_11559837, supported by cDNA: gi_13937146, supported
  misc_feature (12)..(367): Homolog of NCBI NO: 10445209 NR Description: protein serine/threonine kinase BNK1 [Brassica
  misc_feature (21)..(367): Homolog of NCBI NO: 11259782 NR Description: protein kinase-like - Arabidopsis thaliana
MNCFSCFYFHEKKKVPRDSDNSYRRNGEVTGRDNNKTHPENPKTVNEQNKNNDEDKEVTNNIAAQTFSFRELATATKNFRQECLIGEGGFGRVYKGKLEKTGMIVAVKQLDRNGLQGNKEFIVEVLMLSLLHHKHLVNLIGYCADGDQRLLVYEYMSRGSLEDHLLDLTPDQIPLDWDTRIRIALGAAMGLEYLHDKANPPVIYRDLKAANILLDGEFNAKLSDFGLAKLGPVGDKQHVSSRVMGTYGYCAPEYQRTGQLTTKSDVYSFGVVLLELITGRRVIDTTRPKDEQNLVTWAQPVFKEPSRFPELADPSLEGVFPEKALNQAVAVAAMCLQEEATVRPLMSDVVTALGFLGTAPDGSISVPHYDDPPQPSDETSVEDSVAAEERERAVAEAMEWGVASRAHSRNPSAS

SEQ ID NO: 83825 - protein, 312 aa, Arabidopsis thaliana
  peptide (1)..(312): Ceres Seq. ID no. 12671917
  misc_feature (1)..(312): Homolog of NCBI NO: 18397825 NR Description: putative protein kinase; protein id: At3g07070.1 thaliana] >gi|6642658|gb|AAF20239.1|AC012395_26 putative protein
  misc_feature (1)..(312): Homolog of NCBI NO: 28416685 NR Description: At3g07070 [Arabidopsis thaliana]
  misc_feature (1)..(261): Homolog of NCBI NO: 11994661 NR Description: receptor protein kinase-like protein [Arabidopsis
  misc_feature (1)..(261): Homolog of NCBI NO: 15230190 NR Description: protein kinase, putative; protein id: At3g24790.1
  misc_feature (1)..(290): Homolog of NCBI NO: 15238886 NR Description: protein kinase -like protein; protein id:
  misc_feature (1)..(260): Homolog of NCBI NO: 15235623 NR Description: putative protein; protein id: At4g13190.1
  misc_feature (1)..(266): Homolog of NCBI NO: 34907210 NR Description: putative serine/threonine kinase PBS1 protein
  misc_feature (1)..(276): Homolog of NCBI NO: 15240038 NR Description: protein kinase-like; protein id: At5g13160.1, by cDNA: gi_11559837, supported by cDNA: gi_13937146, supported
  misc_feature (1)..(265): Homolog of NCBI NO: 10445209 NR Description: protein serine/threonine kinase BNK1 [Brassica
  misc_feature (1)..(265): Homolog of NCBI NO: 11259782 NR Description: protein kinase-like - Arabidopsis thaliana
MIVAVKQLDRNGLQGNKEFIVEVLMLSLLHHKHLVNLIGYCADGDQRLLVYEYMSRGSLEDHLLDLTPDQIPLDWDTRIRIALGAAMGLEYLHDKANPPVIYRDLKAANILLDGEFNAKLSDFGLAKLGPVGDKQHVSSRVMGTYGYCAPEYQRTGQLTTKSDVYSFGVVLLELITGRRVIDTTRPKDEQNLVTWAQPVFKEPSRFPELADPSLEGVFPEKALNQAVAVAAMCLQEEATVRPLMSDVVTALGFLGTAPDGSISVPHYDDPPQPSDETSVEDSVAAEERERAVAEAMEWGVASRAHSRNPSAS

SEQ ID NO: 83826 - protein, 288 aa, Arabidopsis thaliana
  peptide (1)..(288): Ceres Seq. ID no. 12671918
  misc_feature (1)..(288): Homolog of NCBI NO: 18397825 NR Description: putative protein kinase; protein id: At3g07070.1 thaliana] >gi|6642658|gb|AAF20239.1|AC012395_26 putative protein
  misc_feature (1)..(288): Homolog of NCBI NO: 28416685 NR Description: At3g07070 [Arabidopsis thaliana]
  misc_feature (1)..(237): Homolog of NCBI NO: 11994661 NR Description: receptor protein kinase-like protein [Arabidopsis
  misc_feature (1)..(237): Homolog of NCBI NO: 15230190 NR Description: protein kinase, putative; protein id: At3g24790.1
  misc_feature (1)..(266): Homolog of NCBI NO: 15238886 NR Description: protein kinase -like protein; protein id:
  misc_feature (1)..(236): Homolog of NCBI NO: 15235623 NR Description: putative protein; protein id: At4g13190.1
  misc_feature (1)..(242): Homolog of NCBI NO: 34907210 NR Description: putative serine/threonine kinase PBS1 protein
  misc_feature (1)..(252): Homolog of NCBI NO: 15240038 NR Description: protein kinase-like; protein id: At5g13160.1, by cDNA: gi_11559837, supported by cDNA: gi_13937146, supported
  misc_feature (1)..(241): Homolog of NCBI NO: 10445209 NR Description: protein serine/threonine kinase BNK1 [Brassica
  misc_feature (1)..(241): Homolog of NCBI NO: 11259782 NR Description: protein kinase-like - Arabidopsis thaliana
MLSLLHHKHLVNLIGYCADGDQRLLVYEYMSRGSLEDHLLDLTPDQIPLDWDTRIRIALGAAMGLEYLHDKANPPVIYRDLKAANILLDGEFNAKLSDFGLAKLGPVGDKQHVSSRVMGTYGYCAPEYQRTGQLTTKSDVYSFGVVLLELITGRRVIDTTRPKDEQNLVTWAQPVFKEPSRFPELADPSLEGVFPEKALNQAVAVAAMCLQEEATVRPLMSDVVTALGFLGTAPDGSISVPHYDDPPQPSDETSVEDSVAAEERERAVAEAMEWGVASRAHSRNPSAS

SEQ ID NO: 83827 - DNA, 708 bp, Arabidopsis thaliana
  misc_feature (1)..(708): Ceres Seq. ID no. 12671935
  misc_feature: MA Experiment ID: 20000180 Result: Down-regulated in Transcription
  misc_feature: MA Experiment 20000180 PARAMETER Experiment Name: At_Germinating_Seeds_P Parameter: Age (hr) Value: 24 vs. 0
  misc_feature: MA Experiment 20000180 PARAMETER Experiment Name: At_Germinating_Seeds_P Parameter: Tissue Value: Germinating Seeds
  misc_feature: MA Experiment ID: 20001451 Result: Down-regulated in Transcription
  misc_feature: MA Experiment 20001451 PARAMETER Experiment Name: At_Far-red-induction_P Parameter: Age (day) Value: 7
  misc_feature: MA Experiment 20001451 PARAMETER Experiment Name: At_Far-red-induction_P Parameter: Light Value: Far-red vs. White
  misc_feature: MA Experiment 20001451 PARAMETER Experiment Name: At_Far-red-induction_P Parameter: Organism Value: A. thaliana
  misc_feature: MA Experiment 20001451 PARAMETER Experiment Name: At_Far-red-induction_P Parameter: Plant Line Value: Columbia
  misc_feature: MA Experiment 20001451 PARAMETER Experiment Name: At_Far-red-induction_P Parameter: Timepoint (hr) Value: 24
  misc_feature: MA Experiment 20001451 PARAMETER Experiment Name: At_Far-red-induction_P Parameter: Tissue Value: Whole Plant
  misc_feature: MA Experiment ID: 20001905 Result: Down-regulated in Transcription
  misc_feature: MA Experiment 20001905 PARAMETER Experiment Name: At_Drought_Reproduction_P Parameter: Age (day) Value: 40
  misc_feature: MA Experiment 20001905 PARAMETER Experiment Name: At_Drought_Reproduction_P Parameter: Organism Value: A. thaliana
  misc_feature: MA Experiment 20001905 PARAMETER Experiment Name: At_Drought_Reproduction_P Parameter: Plant Line Value: WS
  misc_feature: MA Experiment 20001905 PARAMETER Experiment Name: At_Drought_Reproduction_P Parameter: Timepoint (day) Value: 10
  misc_feature: MA Experiment 20001905 PARAMETER Experiment Name: At_Drought_Reproduction_P Parameter: Tissue Value: Rosettes
  misc_feature: MA Experiment 20001905 PARAMETER Experiment Name: At_Drought_Reproduction_P Parameter: Treatment Value: Drought vs. No Drought
atgaactttgtcgtcagacgggtaggctccattttgccgtcgatacgtcacggcggcgtttcccagattcgactcgcgagaacagaggcaggtcagccgagacggcgaaacaagttgccttctcttccgctaaagaagaaggaagagaaatccgagtggtggatagtagacggagagatgcacgagatcggtgatcacgtccctcctcgtgagcgtttcacaatccccagggacaacattccgaacaaacgccgtaagcagctccgtgaccagttcatgcgccgcactcgcctcgtccttaaagaatcggaacatgagccatggtgcaaaaagtatatggaactatataacgagcttagagaaaactgggagaggctttattgggatgaagggtattcaaagaaactcgcaagtgatcatgcaaattatgaatccgctgaagaagacgatgaagattttaatccatacaggaacaggcggtctttcagcgatcaaacaaaggagcaagggtttaatagaactacacaaggtgataattgggagaaagtcagtcaaatcagggataagtttgagtatgatagagaaaggaggatgagagataaagcctttgcaccaatgaatgcagcaccagaatctcaagaatctagggacttgaattggaatgcacaaagacggccatttgatcctgatagattcgcaagggattga

SEQ ID NO: 83828 - protein, 235 aa, Arabidopsis thaliana; identical to SEQ ID NO: 20360
  peptide (1)..(235): Ceres Seq. ID no. 12671936
  misc_feature (1)..(235): Homolog of NCBI NO: 15231465 NR Description: unknown protein; protein id: At3g07440.1 thaliana] >gi|6041842|gb|AAF02151.1|AC009853_11 unknown protein thaliana] >gi|27754318|gb|AAO22612.1| unknown protein
  misc_feature (4)..(193): Homolog of NCBI NO: 26452083 NR Description: unknown protein [Arabidopsis thaliana]

SEQ ID NO: 83829 - protein, 176 aa, Arabidopsis thaliana; identical to SEQ ID NO: 20361
  peptide (1)..(176): Ceres Seq. ID no. 12671937
  misc_feature (1)..(176): Homolog of NCBI NO: 15231465 NR Description: unknown protein; protein id: At3g07440.1 thaliana] >gi|6041842|gb|AAF02151.1|AC009853_11 unknown protein thaliana] >gi|27754318|gb|AAO22612.1| unknown protein
  misc_feature (1)..(134): Homolog of NCBI NO: 26452083 NR Description: unknown protein [Arabidopsis thaliana]

SEQ ID NO: 83830 - protein, 143 aa, Arabidopsis thaliana
  peptide (1)..(143): Ceres Seq. ID no. 12671938
  misc_feature (1)..(143): Homolog of NCBI NO: 15231465 NR Description: unknown protein; protein id: At3g07440.1 thaliana] >gi|6041842|gb|AAF02151.1|AC009853_11 unknown protein thaliana] >gi|27754318|gb|AAO22612.1| unknown protein
  misc_feature (1)..(101): Homolog of NCBI NO: 26452083 NR Description: unknown protein [Arabidopsis thaliana]
MRRTRLVLKESEHEPWCKKYMELYNELRENWERLYWDEGYSKKLASDHANYESAEEDDEDFNPYRNRRSFSDQTKEQGFNRTTQGDNWEKVSQIRDKFEYDRERRMRDKAFAPMNAAPESQESRDLNWNAQRRPFDPDRFARD

SEQ ID NO: 83831 - DNA, 1182 bp, Arabidopsis thaliana
  misc_feature (1)..(1182): Ceres Seq. ID no. 12671947
  misc_feature: MA Experiment ID: 20000171 Result: Up-regulated in Transcription
  misc_feature: MA Experiment 20000171 PARAMETER Experiment Name: At_42deg_Heat_P Parameter: Age (day) Value: 14
  misc_feature: MA Experiment 20000171 PARAMETER Experiment Name: At_42deg_Heat_P Parameter: Organism Value: A. thaliana
  misc_feature: MA Experiment 20000171 PARAMETER Experiment Name: At_42deg_Heat_P Parameter: Plant Line Value: WS
  misc_feature: MA Experiment 20000171 PARAMETER Experiment Name: At_42deg_Heat_P Parameter: Temperature (deg C) Value: 42 vs. 22
  misc_feature: MA Experiment 20000171 PARAMETER Experiment Name: At_42deg_Heat_P Parameter: Timepoint (hr) Value: 1
  misc_feature: MA Experiment 20000171 PARAMETER Experiment Name: At_42deg_Heat_P Parameter: Tissue Value: Aerial
  misc_feature: MA Experiment ID: 20000173 Result: Up-regulated in Transcription
  misc_feature: MA Experiment 20000173 PARAMETER Experiment Name: At_42deg_Heat_P Parameter: Age (day) Value: 14
  misc_feature: MA Experiment 20000173 PARAMETER Experiment Name: At_42deg_Heat_P Parameter: Organism Value: A. thaliana
  misc_feature: MA Experiment 20000173 PARAMETER Experiment Name: At_42deg_Heat_P Parameter: Plant Line Value: WS
  misc_feature: MA Experiment 20000173 PARAMETER Experiment Name: At_42deg_Heat_P Parameter: Temperature (deg C) Value: 42 vs. 22
  misc_feature: MA Experiment 20000173 PARAMETER Experiment Name: At_42deg_Heat_P Parameter: Timepoint (hr) Value: 6
  misc_feature: MA Experiment 20000173 PARAMETER Experiment Name: At_42deg_Heat_P Parameter: Tissue Value: Aerial
  misc_feature: MA Experiment ID: 20001560 Result: Down-regulated in Transcription
  misc_feature: MA Experiment 20001560 PARAMETER Experiment Name: At_Drought_Soil_Dry_P Parameter: Age (day) Value: 28
  misc_feature: MA Experiment 20001560 PARAMETER Experiment Name: At_Drought_Soil_Dry_P Parameter: Organism Value: A. thaliana
  misc_feature: MA Experiment 20001560 PARAMETER Experiment Name: At_Drought_Soil_Dry_P Parameter: Plant Line Value: WS
  misc_feature: MA Experiment 20001560 PARAMETER Experiment Name: At_Drought_Soil_Dry_P Parameter: Post Timepoint (hr) Value: None
  misc_feature: MA Experiment 20001560 PARAMETER Experiment Name: At_Drought_Soil_Dry_P Parameter: Post-Treatment Value: None
  misc_feature: MA Experiment 20001560 PARAMETER Experiment Name: At_Drought_Soil_Dry_P Parameter: Timepoint (day) Value: 14
  misc_feature: MA Experiment 20001560 PARAMETER Experiment Name: At_Drought_Soil_Dry_P Parameter: Treatment Value: Drought vs. No Drought
atggaggcagagatcgtgagacgatcggaggtaacgggattaagaagggaggtggaagaatcgtcaattggtagaggagattgcgatggtgatggcggcgatgtgggagaagatgcggcagggttcgttgggacgagcgggagaggaagaagagatcgagttaaagggccgtggtcgaaggaggaggatgatgtgttgagtgagctcgttaagaggttgggagcgaggaattggagttttatcgctcggagtattcctggtcgttcaggcaagtcttgtcgtcttcgttggtgtaatcagctcaatccaaatcttatacgcaattcatttactgaggtagaggatcaggctatcatcgcagcacatgccatccacggaaacaaatgggctgttatcgcgaagctcctccccggaagaacagataatgctatcaagaaccactggaactctgctttaagacgtcgattcatagactttgaaaaggccaagaatataggaactggaagcttggtcgtggatgattctggatttgacagaacgacaacagtagcctcatcagaagaaactttatcttcaggcggtggttgccatgtaactactccaattgtatctccagaaggcaaagaagctaccacctccatggaaatgtctgaagaacaatgcgtagagaaaacaaacggagaaggtatttctaggcaagatgataaggatcctccaacgcttttccgcccagtgcctcggctcagttcttttaatgcttgcaatcacatggaaggatcaccctctccacatatacaagaccaaaatcagctccaatcatctaaacaagacgcagcaatgctaagattgcttgaaggagcttacagcgaacggtttgtgcctcaaacatgtggaggtggttgttgcagcaacaatcccgatggcagttttcagcaagaatcattgttgggtccagagtttgtggattacttagactcaccaacgtttccgagttccgaactagctgctatagcaacggaaataggcagcctcgcttggctgagaagcggtttagagagtagcagcgtgagggtgatggaagacgcagttggtcggttaaggcctcaaggctccaggggtcatcgagatcattatcttgtatctgaacaggggacgaacataaccaatgtcctgtccacataa

SEQ ID NO: 83832 - protein, 393 aa, Arabidopsis thaliana
  peptide (1)..(393): Ceres Seq. ID no. 12671948
  misc_feature (55)..(101): Pfam Name: Myb-like DNA-binding domain Pfam Description: Myb-like DNA-binding domain
  misc_feature (1)..(393): Homolog of NCBI NO: 15232609 NR Description: myb family transcription factor; protein id:
  misc_feature (17)..(363): Homolog of NCBI NO: 15228182 NR Description: MYB transcription factor - like protein; protein At3g55730.1 [Arabidopsis thaliana] >gi|11274017|pir||T47712 MYB
  misc_feature (26)..(354): Homolog of NCBI NO: 34908320 NR Description: putative MYB transcription factor [Oryza sativa
  misc_feature (223)..(365): Homolog of NCBI NO: 15225582 NR Description: putative MYB family transcription factor; protein At2g39880.1, supported by cDNA: gi_5823308 [Arabidopsis thaliana] probable MYB family transcription factor family transcription
  misc_feature (49)..(155): Homolog of NCBI NO: 15225582 NR Description: putative MYB family transcription factor; protein At2g39880.1, supported by cDNA: gi_5823308 [Arabidopsis thaliana] probable MYB family transcription factor family transcription
  misc_feature (46)..(217): Homolog of NCBI NO: 21593586 NR Description: putative MYB family transcription factor
  misc_feature (46)..(217): Homolog of NCBI NO: 15227806 NR Description: MYB family transcription factor; protein id: supported by cDNA: 40307. [Arabidopsis thaliana]
  misc_feature (37)..(192): Homolog of NCBI NO: 9954116 NR Description: tuber-specific and sucrose-responsive element
  misc_feature (48)..(240): Homolog of NCBI NO: 15235484 NR Description: myb DNA-binding protein (AtMYB73); protein id: supported by cDNA: gi_17380911, supported by cDNA: gi_20258980
  misc_feature (52)..(239): Homolog of NCBI NO: 9954112 NR Description: tuber-specific and sucrose-responsive element
MEAEIVRRSEVTGLRREVEESSIGRGDCDGDGGDVGEDAAGFVGTSGRGRRDRVKGPWSKEEDDVLSELVKRLGARNWSFIARSIPGRSGKSCRLRWCNQLNPNLIRNSFTEVEDQAIIAAHAIHGNKWAVIAKLLPGRTDNAIKNHWNSALRRRFIDFEKAKNIGTGSLVVDDSGFDRTTTVASSEETLSSGGGCHVTTPIVSPEGKEATTSMEMSEEQCVEKTNGEGISRQDDKDPPTLFRPVPRLSSFNACNHMEGSPSPHIQDQNQLQSSKQDAAMLRLLEGAYSERFVPQTCGGGCCSNNPDGSFQQESLLGPEFVDYLDSPTFPSSELAAIATEIGSLAWLRSGLESSSVRVMEDAVGRLRPQGSRGHRDHYLVSEQGTNITNVLST

SEQ ID NO: 83833 - DNA, 1284 bp, Arabidopsis thaliana
  misc_feature (1)..(1284): Ceres Seq. ID no. 12671968
  misc_feature: MA Experiment ID: 20000307 Result: Up-regulated in Transcription
  misc_feature: MA Experiment 20000307 PARAMETER Experiment Name: At_Germinating_Seeds_Sub_P Parameter: Age (hr) Value: 24 vs. 0
  misc_feature: MA Experiment 20000307 PARAMETER Experiment Name: At_Germinating_Seeds_Sub_P Parameter: Organism Value: A. thaliana
  misc_feature: MA Experiment 20000307 PARAMETER Experiment Name: At_Germinating_Seeds_Sub_P Parameter: Plant Line Value: WS
  misc_feature: MA Experiment 20000307 PARAMETER Experiment Name: At_Germinating_Seeds_Sub_P Parameter: Tissue Value: Germinating Seeds
  misc_feature: MA Experiment ID: 20000315 Result: Down-regulated in Transcription
  misc_feature: MA Experiment 20000315 PARAMETER Experiment Name: At_14day_Shoots-Roots_Sub_P Parameter: Age (day) Value: 14
  misc_feature: MA Experiment 20000315 PARAMETER Experiment Name: At_14day_Shoots-Roots_Sub_P Parameter: Organism Value: A. thaliana
  misc_feature: MA Experiment 20000315 PARAMETER Experiment Name: At_14day_Shoots-Roots_Sub_P Parameter: Plant Line Value: WS
  misc_feature: MA Experiment 20000315 PARAMETER Experiment Name: At_14day_Shoots-Roots_Sub_P Parameter: Tissue Value: Shoots vs. Whole Plant
  misc_feature: MA Experiment ID: 20000328 Result: Down-regulated in Transcription
  misc_feature: MA Experiment 20000328 PARAMETER Experiment Name: At_42deg_Heat_Sub_P Parameter: Age (day) Value: 14
  misc_feature: MA Experiment 20000328 PARAMETER Experiment Name: At_42deg_Heat_Sub_P Parameter: Organism Value: A. thaliana
  misc_feature: MA Experiment 20000328 PARAMETER Experiment Name: At_42deg_Heat_Sub_P Parameter: Plant Line Value: WS
  misc_feature: MA Experiment 20000328 PARAMETER Experiment Name: At_42deg_Heat_Sub_P Parameter: Temperature (deg C) Value: 42 vs. 22
  misc_feature: MA Experiment 20000328 PARAMETER Experiment Name: At_42deg_Heat_Sub_P Parameter: Timepoint (hr) Value: 6
  misc_feature: MA Experiment 20000328 PARAMETER Experiment Name: At_42deg_Heat_Sub_P Parameter: Tissue Value: Aerial
  misc_feature: MA Experiment ID: 20000347 Result: Up-regulated in Transcription
  misc_feature: MA Experiment 20000347 PARAMETER Experiment Name: At_2mM_SA_Sub_P Parameter: Age (day) Value: 14
  misc_feature: MA Experiment 20000347 PARAMETER Experiment Name: At_2mM_SA_Sub_P Parameter: Organism Value: A. thaliana
  misc_feature: MA Experiment 20000347 PARAMETER Experiment Name: At_2mM_SA_Sub_P Parameter: Plant Line Value: WS
  misc_feature: MA Experiment 20000347 PARAMETER Experiment Name: At_2mM_SA_Sub_P Parameter: Timepoint (hr) Value: 6
  misc_feature: MA Experiment 20000347 PARAMETER Experiment Name: At_2mM_SA_Sub_P Parameter: Tissue Value: Aerial
  misc_feature: MA Experiment 20000347 PARAMETER Experiment Name: At_2mM_SA_Sub_P Parameter: Treatment Value: 2mM SA vs. No Treatment
atggatcatcatcaagaatcaaatcctctgaaggagattttctctctatcttcgtctcctttcttctcaacgttgaaaatcaagaaacatatatttgttgggatctctcttctcatcaccttcctaatattctctgttatcgtcgttgatcttgccggcttcgagcctcatctctgtttcggattcttattgtcgccccgaaccctaacgaaggaaagaggaaacgacgacgtatgcgactattcatacggaagatgggttcgtcgacgccgtgatgtggacgaaacctcttattatggagaagagtgtcggtttctggatcctggttttcgttgtctgaataatggaagaaaagattctggttttcgacaatggcgatggcaaccacatggctgcgatcttccacgatttaacgcaagtgattttctggagaggagtcggaatgggaggattgtgttcgtcggagattctatcggaagaaaccaatgggaatctcttctgtgtatgctttcacaagcagtgtctaataaatctgagatatatgaagttaatggaaaccctataagcaagcataagggtttcctttcgatgcgatttccggaacaaaacctaaccgttgaatatcatagaacaccgtttctggttgtggttggtcggcctcctgagaactcaccggtagatgtcaaaatgactgttagagtcgatgagtttaactggcagtccaaaaaatgggtcggctctgatgttctagtcttcaatacagggcattggtggaacgaagacaagacctttatcgcgggttgctattttcaggagggagggaaattgaacaagacgatgggagtaatggagggatttgagaagtctttaaagacatggaagtcatgggttttagagagactagattctgagaggagtcatgtcttcttcagaagcttctctcctgtacactacaggaatgggacatggaacttgggtggtttgtgtgatgcagatacagagccagagactgatatgaagaaaatggaacctgaccctatccacaacaattatatttctcaagcaatccaagaaatgagatatgaacatagtaaggttaagtttctgaacattacatatctgaccgagttcaggaaagatgctcatccttcgcggtatcgagaaccgggaactcctgaagatgctcctcaagactgcagtcactggtgcttacccggagtaccggacacatggaacgagattctctatgcgcagcttttggcaatgaattaccgaacaaagtga

SEQ ID NO: 83834 - protein, 427 aa, Arabidopsis thaliana
  peptide (1)..(427): Ceres Seq. ID no. 12671969
  misc_feature (1)..(427): Homolog of NCBI NO: 15229797 NR Description: hypothetical protein; protein id: At3g11570.1
  misc_feature (1)..(427): Homolog of NCBI NO: 9759321 NR Description: gb|AAF00670.1~gene_id:MBL20.11~strong similarity
  misc_feature (56)..(427): Homolog of NCBI NO: 18415139 NR Description: putative protein; protein id: At5g06230.1, by cDNA: gi_13605530 [Arabidopsis thaliana] AT5g06230/MBL20_11 [Arabidopsis thaliana]
  misc_feature (79)..(417): Homolog of NCBI NO: 6862912 NR Description: unknown protein [Arabidopsis thaliana]
  misc_feature (50)..(420): Homolog of NCBI NO: 15239660 NR Description: putative protein; protein id: At5g19160.1
  misc_feature (79)..(420): Homolog of NCBI NO: 32489523 NR Description: OSJNBa0043L24.14 [Oryza sativa (japonica
  misc_feature (75)..(420): Homolog of NCBI NO: 34907406 NR Description: P0018C10.29 [Oryza sativa (japonica
  misc_feature (68)..(427): Homolog of NCBI NO: 22330347 NR Description: hypothetical protein; protein id: At1g60790.1, by cDNA: gi_17979148 [Arabidopsis thaliana] unknown protein [Arabidopsis thaliana]
  misc_feature (79)..(420): Homolog of NCBI NO: 21592371 NR Description: unknown [Arabidopsis thaliana]
  misc_feature (79)..(420): Homolog of NCBI NO: 15242021 NR Description: putative protein; protein id: At5g20590.1,
MDHHQESNPLKEIFSLSSSPFFSTLKIKKHIFVGISLLITFLIFSVIVVDLAGFEPHLCFGFLLSPRTLTKERGNDDVCDYSYGRWVRRRRDVDETSYYGEECRFLDPGFRCLNNGRKDSGFRQWRWQPHGCDLPRFNASDFLERSRNGRIVFVGDSIGRNQWESLLCMLSQAVSNKSEIYEVNGNPISKHKGFLSMRFPEQNLTVEYHRTPFLVVVGRPPENSPVDVKMTVRVDEFNWQSKKWVGSDVLVFNTGHWWNEDKTFIAGCYFQEGGKLNKTMGVMEGFEKSLKTWKSWVLERLDSERSHVFFRSFSPVHYRNGTWNLGGLCDADTEPETDMKKMEPDPIHNNYISQAIQEMRYEHSKVKFLNITYLTEFRKDAHPSRYREPGTPEDAPQDCSHWCLPGVPDTWNEILYAQLLAMNYRTK

SEQ ID NO: 83835 - protein, 259 aa, Arabidopsis thaliana
  peptide (1)..(259): Ceres Seq. ID no. 12671970
  misc_feature (1)..(259): Homolog of NCBI NO: 15229797 NR Description: hypothetical protein; protein id: At3g11570.1
  misc_feature (1)..(259): Homolog of NCBI NO: 9759321 NR Description: gb|AAF00670.1~gene_id:MBL20.11~strong similarity
  misc_feature (1)..(259): Homolog of NCBI NO: 18415139 NR Description: putative protein; protein id: At5g06230.1, by cDNA: gi_13605530 [Arabidopsis thaliana] AT5g06230/MBL20_11 [Arabidopsis thaliana]
  misc_feature (1)..(249): Homolog of NCBI NO: 6862912 NR Description: unknown protein [Arabidopsis thaliana]
  misc_feature (1)..(252): Homolog of NCBI NO: 15239660 NR Description: putative protein; protein id: At5g19160.1
  misc_feature (1)..(252): Homolog of NCBI NO: 32489523 NR Description: OSJNBa0043L24.14 [Oryza sativa (japonica
  misc_feature (1)..(252): Homolog of NCBI NO: 34907406 NR Description: P0018C10.29 [Oryza sativa (japonica
  misc_feature (1)..(259): Homolog of NCBI NO: 22330347 NR Description: hypothetical protein; protein id: At1g60790.1, by cDNA: gi_17979148 [Arabidopsis thaliana] unknown protein [Arabidopsis thaliana]
  misc_feature (1)..(252): Homolog of NCBI NO: 21592371 NR Description: unknown [Arabidopsis thaliana]
  misc_feature (1)..(252): Homolog of NCBI NO: 15242021 NR Description: putative protein; protein id: At5g20590.1,
MLSQAVSNKSEIYEVNGNPISKHKGFLSMRFPEQNLTVEYHRTPFLVVVGRPPENSPVDVKMTVRVDEFNWQSKKWVGSDVLVFNTGHWWNEDKTFIAGCYFQEGGKLNKTMGVMEGFEKSLKTWKSWVLERLDSERSHVFFRSFSPVHYRNGTWNLGGLCDADTEPETDMKKMEPDPIHNNYISQAIQEMRYEHSKVKFLNITYLTEFRKDAHPSRYREPGTPEDAPQDCSHWCLPGVPDTWNEILYAQLLAMNYRTK

SEQ ID NO: 83836 - protein, 231 aa, Arabidopsis thaliana
  peptide (1)..(231): Ceres Seq. ID no. 12671971
  misc_feature (1)..(231): Homolog of NCBI NO: 15229797 NR Description: hypothetical protein; protein id: At3g11570.1
  misc_feature (1)..(231): Homolog of NCBI NO: 9759321 NR Description: gb|AAF00670.1~gene_id:MBL20.11~strong similarity
  misc_feature (1)..(231): Homolog of NCBI NO: 18415139 NR Description: putative protein; protein id: At5g06230.1, by cDNA: gi_13605530 [Arabidopsis thaliana] AT5g06230/MBL20_11 [Arabidopsis thaliana]
  misc_feature (1)..(221): Homolog of NCBI NO: 6862912 NR Description: unknown protein [Arabidopsis thaliana]
  misc_feature (1)..(224): Homolog of NCBI NO: 15239660 NR Description: putative protein; protein id: At5g19160.1
  misc_feature (1)..(224): Homolog of NCBI NO: 32489523 NR Description: OSJNBa0043L24.14 [Oryza sativa (japonica
  misc_feature (1)..(224): Homolog of NCBI NO: 34907406 NR Description: P0018C10.29 [Oryza sativa (japonica
  misc_feature (1)..(231): Homolog of NCBI NO: 22330347 NR Description: hypothetical protein; protein id: At1g60790.1, by cDNA: gi_17979148 [Arabidopsis thaliana] unknown protein [Arabidopsis thaliana]
  misc_feature (1)..(224): Homolog of NCBI NO: 21592371 NR Description: unknown [Arabidopsis thaliana]
  misc_feature (1)..(224): Homolog of NCBI NO: 15242021 NR Description: putative protein; protein id: At5g20590.1,
MRFPEQNLTVEYHRTPFLVVVGRPPENSPVDVKMTVRVDEFNWQSKKWVGSDVLVFNTGHWWNEDKTFIAGCYFQEGGKLNKTMGVMEGFEKSLKTWKSWVLERLDSERSHVFFRSFSPVHYRNGTWNLGGLCDADTEPETDMKKMEPDPIHNNYISQAIQEMRYEHSKVKFLNITYLTEFRKDAHPSRYREPGTPEDAPQDCSHWCLPGVPDTWNEILYAQLLAMNYRTK

SEQ ID NO: 83837 - DNA, 1895 bp, Arabidopsis thaliana
  misc_feature (1)..(1895): Ceres Seq. ID no. 12672004
  misc_feature: MA Experiment ID: 20000437 Result: Up-regulated in Transcription
  misc_feature: MA Experiment 20000437 PARAMETER Experiment Name: At_Drought_P Parameter: Age (day) Value: 8
  misc_feature: MA Experiment 20000437 PARAMETER Experiment Name: At_Drought_P Parameter: Organism Value: A. thaliana
  misc_feature: MA Experiment 20000437 PARAMETER Experiment Name: At_Drought_P Parameter: Plant Line Value: WS
  misc_feature: MA Experiment 20000437 PARAMETER Experiment Name: At_Drought_P Parameter: Timepoint (hr) Value: 24
  misc_feature: MA Experiment 20000437 PARAMETER Experiment Name: At_Drought_P Parameter: Tissue Value: Whole Plant
  misc_feature: MA Experiment 20000437 PARAMETER Experiment Name: At_Drought_P Parameter: Treatment Value: Drought vs. No Drought
aatcttcatctaatctctctctcgtccgtccttggatctctctctccctgaggaaaataatcaggggagcttccgattaatacgagttggttggtttttgctgaattttcgaagctttgtttcttcaatctttgatgctagaaaggtgttttctgcaacaagcaatatgcgacaaagaaatatgatgactggttcagacatggagcagaattctcaaagctttgttccccatcctgaacctcgcattggaactaactatctgtatccagatatcccaccagtgaacactgttcctcatttagaagctcattctctgcaagaaccttatgataacaactcaatgttctacgggcctccacagtaccatcatcaacatgcttcaaatcttggttctggcatgtcaaccgcaccaaatttctatgtcccttatgtgaattatgaagctccaccgagttttctgttgtctcatggaagtaatgatgcagttgttggagttacttccactgaacatgagagaaatgcccattttatggatcacggattcaaaagaaagagttctgaagtaatacctggaaattctcagtatccagttgctccttgttctttccctcaattgaatacatcggagacagcacctttttcattcccacattttggtacttatccacaaccactagatcagagaagtgtgaggaacagagcaggagcagctacaatggatccacttctctctcatggtcataacaacttcagtcaaggaaactatgcagctcatccttttccacctcttggctcaatctggtatgaccaacactgtaatggcaacagatctgatggatcatcttcgctttggtctcaagcacctgccgtaccttatatgcatggtaacattgctactggatctatagaatctggtaatgtttgcttcccaagataccatgaaacatctagtagcagaaaccccacgccatctgtataccaaaggaaccactatattagccatcaccccgtacctcctcctcccatcgtataccctcacatgccttcagcctcatacgctgagactttgcatcctgcttcatacagtcatatgggacaggttcaatcaaccggattcaggataaaccaatatcccggagaagattttgtacctgcagcaattctaagacaccgtgaattgcctcactttagagcaatgcccgcgaatgaaaatgcattttgggaagtaggagacttctacaatgctgttaattatgtcgatcatcatcaagacatgcgcttagacatagaagatatgtcatatgaggagcttcttgctttgagcgaccagattggaactgtgaagacaggcttgtcatcagaagatgttaaagaacttctgaaaagaagaacctcgaccagaattaacctggaagaaggtccatctactgatctagagactgattcttgcacgatatgccaggaaaactacaagaacgaagataagatcgcaacgctggattgcatgcacaaataccatgcagaatgcttgaagaagtggttggttatcaagaacgtttgcccaatctgtaaatcagaggcattggtcatagagaagaagaagaagctaaggttaagtagtagatgagaagaggttgctgctacaacctaaaagaggttatcgctgatggtttttaagacgctttttatctattggttttataagagagaaacagagtcagggtatgtttcagcccccaaattctgtaaatttgtacttttgtgcacattaaagtgacagtctaaagctaagattggcttagtgactataaaaactgtataggctttttttggttctttgtacattctggttgctcctagagttaaactttcttcatctaaaacatctcttttgt

SEQ ID NO: 83838 - protein, 486 aa, Arabidopsis thaliana
  peptide (1)..(486): Ceres Seq. ID no. 12672005
  misc_feature (428)..(468): Pfam Name: Zinc finger, C3HC4 type (RING finger) Pfam Description: Zinc finger, C3HC4 type (RING finger)
  misc_feature (1)..(486): Homolog of NCBI NO: 8777490 NR Description: RING-finger protein (C-terminal)-like
  misc_feature (1)..(486): Homolog of NCBI NO: 18400621 NR Description: RING zinc finger protein, putative; protein id: supported by cDNA: gi_14326492 [Arabidopsis thaliana] AT3g15070/K15M2_22 [Arabidopsis thaliana]
  misc_feature (1)..(479): Homolog of NCBI NO: 20466834 NR Description: unknown protein [Arabidopsis thaliana]
  misc_feature (1)..(479): Homolog of NCBI NO: 22330219 NR Description: unknown protein; protein id: At1g53190.1,
  misc_feature (1)..(429): Homolog of NCBI NO: 25405973 NR Description: protein F12M16.10 [imported] - Arabidopsis >gi|7769853|gb|AAF69531.1|AC008007_6 F12M16.10 [Arabidopsis
  misc_feature (125)..(479): Homolog of NCBI NO: 25405973 NR Description: protein F12M16.10 [imported] - Arabidopsis >gi|7769853|gb|AAF69531.1|AC008007_6 F12M16.10 [Arabidopsis
  misc_feature (126)..(473): Homolog of NCBI NO: 34910942 NR Description: putative U2 snRNP auxiliary factor [Oryza sativa
  misc_feature (348)..(473): Homolog of NCBI NO: 38345496 NR Description: OSJNBa0010D21.9 [Oryza sativa (japonica
MRQRNMMTGSDMEQNSQSFVPHPEPRIGTNYLYPDIPPVNTVPHLEAHSLQEPYDNNSMFYGPPQYHHQHASNLGSGMSTAPNFYVPYVNYEAPPSFLLSHGSNDAVVGVTSTEHERNAHFMDHGFKRKSSEVIPGNSQYPVAPCSFPQLNTSETAPFSFPHFGTYPQPLDQRSVRNRAGAATMDPLLSHGHNNFSQGNYAAHPFPPLGSIWYDQHCNGNRSDGSSSLWSQAPAVPYMHGNIATGSIESGNVCFPRYHETSSSRNPTPSVYQRNHYISHHPVPPPPIVYPHMPSASYAETLHPASYSHMGQVQSTGFRINQYPGEDFVPAAILRHRELPHFRAMPANENAFWEVGDFYNAVNYVDHHQDMRLDIEDMSYEELLALSDQIGTVKTGLSSEDVKELLKRRTSTRINLEEGPSTDLETDSCTICQENYKNEDKIATLDCMHKYHAECLKKWLVIKNVCPICKSEALVIEKKKKLRLSSR

SEQ ID NO: 83839 - protein, 481 aa, Arabidopsis thaliana
  peptide (1)..(481): Ceres Seq. ID no. 12672006
  misc_feature (423)..(463): Pfam Name: Zinc finger, C3HC4 type (RING finger) Pfam Description: Zinc finger, C3HC4 type (RING finger)
  misc_feature (1)..(481): Homolog of NCBI NO: 8777490 NR Description: RING-finger protein (C-terminal)-like
  misc_feature (1)..(481): Homolog of NCBI NO: 18400621 NR Description: RING zinc finger protein, putative; protein id: supported by cDNA: gi_14326492 [Arabidopsis thaliana] AT3g15070/K15M2_22 [Arabidopsis thaliana]
  misc_feature (1)..(474): Homolog of NCBI NO: 20466834 NR Description: unknown protein [Arabidopsis thaliana]
  misc_feature (1)..(474): Homolog of NCBI NO: 22330219 NR Description: unknown protein; protein id: At1g53190.1,
  misc_feature (1)..(424): Homolog of NCBI NO: 25405973 NR Description: protein F12M16.10 [imported] - Arabidopsis >gi|7769853|gb|AAF69531.1|AC008007_6 F12M16.10 [Arabidopsis
  misc_feature (120)..(474): Homolog of NCBI NO: 25405973 NR Description: protein F12M16.10 [imported] - Arabidopsis >gi|7769853|gb|AAF69531.1|AC008007_6 F12M16.10 [Arabidopsis
  misc_feature (121)..(468): Homolog of NCBI NO: 34910942 NR Description: putative U2 snRNP auxiliary factor [Oryza sativa
  misc_feature (343)..(468): Homolog of NCBI NO: 38345496 NR Description: OSJNBa0010D21.9 [Oryza sativa (japonica
MMTGSDMEQNSQSFVPHPEPRIGTNYLYPDIPPVNTVPHLEAHSLQEPYDNNSMFYGPPQYHHQHASNLGSGMSTAPNFYVPYVNYEAPPSFLLSHGSNDAVVGVTSTEHERNAHFMDHGFKRKSSEVIPGNSQYPVAPCSFPQLNTSETAPFSFPHFGTYPQPLDQRSVRNRAGAATMDPLLSHGHNNFSQGNYAAHPFPPLGSIWYDQHCNGNRSDGSSSLWSQAPAVPYMHGNIATGSIESGNVCFPRYHETSSSRNPTPSVYQRNHYISHHPVPPPPIVYPHMPSASYAETLHPASYSHMGQVQSTGFRINQYPGEDFVPAAILRHRELPHFRAMPANENAFWEVGDFYNAVNYVDHHQDMRLDIEDMSYEELLALSDQIGTVKTGLSSEDVKELLKRRTSTRINLEEGPSTDLETDSCTICQENYKNEDKIATLDCMHKYHAECLKKWLVIKNVCPICKSEALVIEKKKKLRLSSR

SEQ ID NO: 83840 - protein, 480 aa, Arabidopsis thaliana
  peptide (1)..(480): Ceres Seq. ID no. 12672007
  misc_feature (422)..(462): Pfam Name: Zinc finger, C3HC4 type (RING finger) Pfam Description: Zinc finger, C3HC4 type (RING finger)
  misc_feature (1)..(480): Homolog of NCBI NO: 8777490 NR Description: RING-finger protein (C-terminal)-like
  misc_feature (1)..(480): Homolog of NCBI NO: 18400621 NR Description: RING zinc finger protein, putative; protein id: supported by cDNA: gi_14326492 [Arabidopsis thaliana] AT3g15070/K15M2_22 [Arabidopsis thaliana]
  misc_feature (1)..(473): Homolog of NCBI NO: 20466834 NR Description: unknown protein [Arabidopsis thaliana]
  misc_feature (1)..(473): Homolog of NCBI NO: 22330219 NR Description: unknown protein; protein id: At1g53190.1,
  misc_feature (1)..(423): Homolog of NCBI NO: 25405973 NR Description: protein F12M16.10 [imported] - Arabidopsis >gi|7769853|gb|AAF69531.1|AC008007_6 F12M16.10 [Arabidopsis
  misc_feature (119)..(473): Homolog of NCBI NO: 25405973 NR Description: protein F12M16.10 [imported] - Arabidopsis >gi|7769853|gb|AAF69531.1|AC008007_6 F12M16.10 [Arabidopsis
  misc_feature (120)..(467): Homolog of NCBI NO: 34910942 NR Description: putative U2 snRNP auxiliary factor [Oryza sativa
  misc_feature (342)..(467): Homolog of NCBI NO: 38345496 NR Description: OSJNBa0010D21.9 [Oryza sativa (japonica
MTGSDMEQNSQSFVPHPEPRIGTNYLYPDIPPVNTVPHLEAHSLQEPYDNNSMFYGPPQYHHQHASNLGSGMSTAPNFYVPYVNYEAPPSFLLSHGSNDAVVGVTSTEHERNAHFMDHGFKRKSSEVIPGNSQYPVAPCSFPQLNTSETAPFSFPHFGTYPQPLDQRSVRNRAGAATMDPLLSHGHNNFSQGNYAAHPFPPLGSIWYDQHCNGNRSDGSSSLWSQAPAVPYMHGNIATGSIESGNVCFPRYHETSSSRNPTPSVYQRNHYISHHPVPPPPIVYPHMPSASYAETLHPASYSHMGQVQSTGFRINQYPGEDFVPAAILRHRELPHFRAMPANENAFWEVGDFYNAVNYVDHHQDMRLDIEDMSYEELLALSDQIGTVKTGLSSEDVKELLKRRTSTRINLEEGPSTDLETDSCTICQENYKNEDKIATLDCMHKYHAECLKKWLVIKNVCPICKSEALVIEKKKKLRLSSR

SEQ ID NO: 83841 - DNA, 1191 bp, Arabidopsis thaliana
  misc_feature (1)..(1191): Ceres Seq. ID no. 12672049
  misc_feature: MA Experiment ID: 20000184 Result: Up-regulated in Transcription
  misc_feature: MA Experiment 20000184 PARAMETER Experiment Name: At_Shoots__P Parameter: Age (day) Value: 7
  misc_feature: MA Experiment 20000184 PARAMETER Experiment Name: At_Shoots__P Parameter: Tissue Value: Shoots vs. Whole Plant
  misc_feature: MA Experiment ID: 20000438 Result: Up-regulated in Transcription
  misc_feature: MA Experiment 20000438 PARAMETER Experiment Name: At_Shoots__P Parameter: Age (day) Value: 14
  misc_feature: MA Experiment 20000438 PARAMETER Experiment Name: At_Shoots__P Parameter: Tissue Value: Shoots vs. Whole Plant
atgagctacactttctttctccttttgctctctcttgtccactccactttctcttcattagctcctacggatcgagccgcgctccaatccatcagagactctttaaccgacatgcccggttcagccttcttctcctcttgggacttcacagttcctgacccttgttcctccttctctggccttacctgctcttctcgcggccgtgtcaccggcttaactcttggccctaatctctcaggctctctctccccttccatctccattctaacccacttaacccaactcattctctaccccggttcagtcaccggtcctctccctcctcggttcgattccctccctctccttcgagtcatttccttaacaagaaaccgtttaaccggtcctatacccgtatctttctcatctctctcaaatctccacactcttgaccttagctataaccaactctctggctctctccctccttttctcaccactcttcctcgactcaaagtccttgttttagcctcaaaccatttctccaacaaccttaagcctgtctctagcccattgttccatttagacctaaagatgaaccaaatctccggccaactcccacccgctttcccgactactctccggtacttatctctatccggaaactcaatgcagggcacaatcaatgccatggagccattaacagagctaatatacatcgatctaagcatgaaccaatttaccggcgcaatccctagctcactctttagtcccacaatctcaacaatgttcctacaacgaaacaacttcacatccattgccacctcaaacgccacgtcattgttacctgagggctccattgttgatctgagccataactcaatctccggagagctaactcccgcgcttgtcggagcagaggctttgttcttgaacaacaaccgtctcactggagacattccagaggaatacgtcaagagcttaatcaacggtacaacaaaacagctcttcttgcaacataactacttcacgagattcccttggaactctggtctccaactaccagactctgtttcgctctgtttgtcatataactgtatggagacagatccagtcgttggtttgtccacgtgtccgatcgaagttgcacctctgctctcaagacctgcttcacaatgttcaagattctataatcacagctccactggttaa

SEQ ID NO: 83842 - protein, 396 aa, Arabidopsis thaliana
  peptide (1)..(396): Ceres Seq. ID no. 12672050
  misc_feature (139)..(162): Pfam Name: Leucine Rich Repeat Pfam Description: Leucine Rich Repeat
  misc_feature (1)..(396): Homolog of NCBI NO: 15229088 NR Description: leucine rich repeat protein family; protein id:
  misc_feature (7)..(389): Homolog of NCBI NO: 25406734 NR Description: protein F21B7.6 [imported] - Arabidopsis thaliana F21B7.6 [Arabidopsis thaliana]
  misc_feature (7)..(389): Homolog of NCBI NO: 30678566 NR Description: leucine rich repeat protein family [Arabidopsis
  misc_feature (3)..(389): Homolog of NCBI NO: 15236232 NR Description: leucine rich repeat protein family; protein id:
  misc_feature (4)..(387): Homolog of NCBI NO: 15231699 NR Description: leucine rich repeat protein family; protein id:
  misc_feature (7)..(389): Homolog of NCBI NO: 15239346 NR Description: leucine rich repeat protein family; protein id:
  misc_feature (6)..(344): Homolog of NCBI NO: 15239123 NR Description: leucine-rich repeat transmembrane protein kinase, protein id: At5g65700.1, supported by cDNA: gi_20466695
  misc_feature (1)..(344): Homolog of NCBI NO: 15229189 NR Description: leucine-rich repeat transmembrane protein kinase, protein id: At3g49670.1 [Arabidopsis thaliana]
MSYTFFLLLLSLVHSTFSSLAPTDRAALQSIRDSLTDMPGSAFFSSWDFTVPDPCSSFSGLTCSSRGRVTGLTLGPNLSGSLSPSISILTHLTQLILYPGSVTGPLPPRFDSLPLLRVISLTRNRLTGPIPVSFSSLSNLHTLDLSYNQLSGSLPPFLTTLPRLKVLVLASNHFSNNLKPVSSPLFHLDLKMNQISGQLPPAFPTTLRYLSLSGNSMQGTINAMEPLTELIYIDLSMNQFTGAIPSSLFSPTISTMFLQRNNFTSIATSNATSLLPEGSIVDLSHNSISGELTPALVGAEALFLNNNRLTGDIPEEYVKSLINGTTKQLFLQHNYFTRFPWNSGLQLPDSVSLCLSYNCMETDPVVGLSTCPIEVAPLLSRPASQCSRFYNHSSTG

SEQ ID NO: 83843 - protein, 359 aa, Arabidopsis thaliana
  peptide (1)..(359): Ceres Seq. ID no. 12672051
  misc_feature (102)..(125): Pfam Name: Leucine Rich Repeat Pfam Description: Leucine Rich Repeat
  misc_feature (1)..(359): Homolog of NCBI NO: 15229088 NR Description: leucine rich repeat protein family; protein id:
  misc_feature (1)..(352): Homolog of NCBI NO: 25406734 NR Description: protein F21B7.6 [imported] - Arabidopsis thaliana F21B7.6 [Arabidopsis thaliana]
  misc_feature (1)..(352): Homolog of NCBI NO: 30678566 NR Description: leucine rich repeat protein family [Arabidopsis
  misc_feature (1)..(352): Homolog of NCBI NO: 15236232 NR Description: leucine rich repeat protein family; protein id:
  misc_feature (1)..(350): Homolog of NCBI NO: 15231699 NR Description: leucine rich repeat protein family; protein id:
  misc_feature (1)..(352): Homolog of NCBI NO: 15239346 NR Description: leucine rich repeat protein family; protein id:
  misc_feature (1)..(307): Homolog of NCBI NO: 15239123 NR Description: leucine-rich repeat transmembrane protein kinase, protein id: At5g65700.1, supported by cDNA: gi_20466695
  misc_feature (1)..(307): Homolog of NCBI NO: 15229189 NR Description: leucine-rich repeat transmembrane protein kinase, protein id: At3g49670.1 [Arabidopsis thaliana]
MPGSAFFSSWDFTVPDPCSSFSGLTCSSRGRVTGLTLGPNLSGSLSPSISILTHLTQLILYPGSVTGPLPPRFDSLPLLRVISLTRNRLTGPIPVSFSSLSNLHTLDLSYNQLSGSLPPFLTTLPRLKVLVLASNHFSNNLKPVSSPLFHLDLKMNQISGQLPPAFPTTLRYLSLSGNSMQGTINAMEPLTELIYIDLSMNQFTGAIPSSLFSPTISTMFLQRNNFTSIATSNATSLLPEGSIVDLSHNSISGELTPALVGAEALFLNNNRLTGDIPEEYVKSLINGTTKQLFLQHNYFTRFPWNSGLQLPDSVSLCLSYNCMETDPVVGLSTCPIEVAPLLSRPASQCSRFYNHSSTG

SEQ ID NO: 83844 - protein, 205 aa, Arabidopsis thaliana
  peptide (1)..(205): Ceres Seq. ID no. 12672052
  misc_feature (1)..(205): Homolog of NCBI NO: 15229088 NR Description: leucine rich repeat protein family; protein id:
  misc_feature (1)..(198): Homolog of NCBI NO: 25406734 NR Description: protein F21B7.6 [imported] - Arabidopsis thaliana F21B7.6 [Arabidopsis thaliana]
  misc_feature (1)..(198): Homolog of NCBI NO: 30678566 NR Description: leucine rich repeat protein family [Arabidopsis
  misc_feature (1)..(198): Homolog of NCBI NO: 15236232 NR Description: leucine rich repeat protein family; protein id:
  misc_feature (1)..(196): Homolog of NCBI NO: 15231699 NR Description: leucine rich repeat protein family; protein id:
  misc_feature (1)..(198): Homolog of NCBI NO: 15239346 NR Description: leucine rich repeat protein family; protein id:
  misc_feature (1)..(153): Homolog of NCBI NO: 15239123 NR Description: leucine-rich repeat transmembrane protein kinase, protein id: At5g65700.1, supported by cDNA: gi_20466695
  misc_feature (1)..(153): Homolog of NCBI NO: 15229189 NR Description: leucine-rich repeat transmembrane protein kinase, protein id: At3g49670.1 [Arabidopsis thaliana]
MNQISGQLPPAFPTTLRYLSLSGNSMQGTINAMEPLTELIYIDLSMNQFTGAIPSSLFSPTISTMFLQRNNFTSIATSNATSLLPEGSIVDLSHNSISGELTPALVGAEALFLNNNRLTGDIPEEYVKSLINGTTKQLFLQHNYFTRFPWNSGLQLPDSVSLCLSYNCMETDPVVGLSTCPIEVAPLLSRPASQCSRFYNHSSTG

SEQ ID NO: 83845 - DNA, 972 bp, Arabidopsis thaliana
  misc_feature (1)..(972): Ceres Seq. ID no. 12672056
  misc_feature: MA Experiment ID: 108461 Result: Up-regulated in Transcription
  misc_feature: MA Experiment 108461 PARAMETER Experiment Name: At_Germinating_Seeds_cDNA_P Parameter: Age (day) Value: 1 vs. 0
  misc_feature: MA Experiment 108461 PARAMETER Experiment Name: At_Germinating_Seeds_cDNA_P Parameter: Tissue Value: Germinating Seeds
  misc_feature: MA Experiment ID: 108463 Result: Up-regulated in Transcription
  misc_feature: MA Experiment 108463 PARAMETER Experiment Name: At_Germinating_Seeds_cDNA_P Parameter: Age (day) Value: 3 vs. 0
  misc_feature: MA Experiment 108463 PARAMETER Experiment Name: At_Germinating_Seeds_cDNA_P Parameter: Tissue Value: Germinating Seeds
  misc_feature: MA Experiment ID: 108577 Result: Down-regulated in Transcription
  misc_feature: MA Experiment 108577 PARAMETER Experiment Name: At_42deg_Heat_cDNA_P Parameter: Temperature (deg C) Value: 42 vs. 22
  misc_feature: MA Experiment 108577 PARAMETER Experiment Name: At_42deg_Heat_cDNA_P Parameter: Timepoint (hr) Value: 6
  misc_feature: MA Experiment 108577 PARAMETER Experiment Name: At_42deg_Heat_cDNA_P Parameter: Tissue Value: Aerial
  misc_feature: MA Experiment ID: 20000069 Result: Up-regulated in Transcription
  misc_feature: MA Experiment 20000069 PARAMETER Experiment Name: At_100uM_ABA_Mutants_cDNA_P Parameter: Plant Line Value: CS23
  misc_feature: MA Experiment 20000069 PARAMETER Experiment Name: At_100uM_ABA_Mutants_cDNA_P Parameter: Timepoint (hr) Value: 6
  misc_feature: MA Experiment 20000069 PARAMETER Experiment Name: At_100uM_ABA_Mutants_cDNA_P Parameter: Tissue Value: Aerial
  misc_feature: MA Experiment 20000069 PARAMETER Experiment Name: At_100uM_ABA_Mutants_cDNA_P Parameter: Treatment Value: 100uM ABA vs. No Treatment
  misc_feature: MA Experiment ID: 20000111 Result: Down-regulated in Transcription
  misc_feature: MA Experiment 20000111 PARAMETER Experiment Name: At_42deg_Heat_cDNA_P Parameter: Temperature (deg C) Value: 42 vs. 22
  misc_feature: MA Experiment 20000111 PARAMETER Experiment Name: At_42deg_Heat_cDNA_P Parameter: Timepoint (hr) Value: 6
  misc_feature: MA Experiment 20000111 PARAMETER Experiment Name: At_42deg_Heat_cDNA_P Parameter: Tissue Value: Aerial
  misc_feature: MA Experiment ID: 20000113 Result: Down-regulated in Transcription
  misc_feature: MA Experiment 20000113 PARAMETER Experiment Name: At_42deg_Heat_cDNA_P Parameter: Temperature (deg C) Value: 42 vs. 22
  misc_feature: MA Experiment 20000113 PARAMETER Experiment Name: At_42deg_Heat_cDNA_P Parameter: Timepoint (hr) Value: 8
  misc_feature: MA Experiment 20000113 PARAMETER Experiment Name: At_42deg_Heat_cDNA_P Parameter: Tissue Value: Aerial
  misc_feature: MA Experiment ID: 20000179 Result: Up-regulated in Transcription
  misc_feature: MA Experiment 20000179 PARAMETER Experiment Name: At_Germinating_Seeds_P Parameter: Age (hr) Value: 6 vs. 0
  misc_feature: MA Experiment 20000179 PARAMETER Experiment Name: At_Germinating_Seeds_P Parameter: Tissue Value: Germinating Seeds
  misc_feature: MA Experiment ID: 20000180 Result: Up-regulated in Transcription
  misc_feature: MA Experiment 20000180 PARAMETER Experiment Name: At_Germinating_Seeds_P Parameter: Age (hr) Value: 24 vs. 0
  misc_feature: MA Experiment 20000180 PARAMETER Experiment Name: At_Germinating_Seeds_P Parameter: Tissue Value: Germinating Seeds
  misc_feature: MA Experiment ID: 20000214 Result: Down-regulated in Transcription
  misc_feature: MA Experiment 20000214 PARAMETER Experiment Name: At_4deg_Cold_P Parameter: Timepoint (hr) Value: 6
  misc_feature: MA Experiment ID: 20000227 Result: Up-regulated in Transcription
  misc_feature: MA Experiment 20000227 PARAMETER Experiment Name: At_Root-Tips-vs-Tops_P Parameter: Tissue Value: Root Tips vs. Root Tops
atgcaggtcaagatctcaaactacggcaccaccatcacctctttgtctgttcccgacaagaacgggaaactgggggatgtagttctcggattcgactcggtggatccatatgtgaaagggcttgcaccatactttgggtgcattgttggtcgtgtggcaaatcggatcaaggagggaaaattcagtctcaatggagttaactacactttgcctatcaacaagcctcctaatagtctccacggtggtaacaagggtttcgataagaagatatgggaagttgcagggcacaagagagacggcgaaaaacctttcatcactttcaaatatcacagtgccgatggagaagaaggttaccctggtgcggtttctgtcacggcgacatacactctcacgtcagccacgacaatgagacttgacatggaagctgttccagagaacaaagatactcccatcaacttagctcaacatacatactggaacttagcaggtcatgactcaggaaacattctagaccataagattcagatatgggggtctcatatcacgccggttgacgaatacacagttcctacaggagagatcttgcctgtaaagggaactcctttcgatttcactgaggagaagcggataggcgagtctattggagaggttggtatcggatacgatcataactacgtgttggactgtcctgatcaagagaaggaggggctgaaacacgcagcgaagctcagtgatgctgctagctcaagggtactgaacttgtggaccaatgtgccgggaatgcagttttataccgggaactatgtgaatggagtggttgggaaagggaatgcggtttacgggaaacatgcgggtgtgtgccttgagacgcagggattcccgaacgcgattaaccagtcgaatttcccgtctgttgtggttaaggctggtgagaagtacaatcacacgatgctgtttgagttttcagcttga

SEQ ID NO: 83846 - protein, 323 aa, Arabidopsis thaliana; identical to SEQ ID NO: 26039
  peptide (1)..(323): Ceres Seq. ID no. 12672057
  misc_feature (1)..(320): Pfam Name: Aldose 1-epimerase Pfam Description: Aldose 1-epimerase
  misc_feature (1)..(323): Homolog of NCBI NO: 14532616 NR Description: putative aldose 1-epimerase [Arabidopsis thaliana]
  misc_feature (1)..(323): Homolog of NCBI NO: 30684727 NR Description: aldose 1-epimerase family [Arabidopsis thaliana]
  misc_feature (4)..(323): Homolog of NCBI NO: 37531218 NR Description: putative aldose 1-epimerase - like protein [Oryza
  misc_feature (1)..(323): Homolog of NCBI NO: 15228261 NR Description: aldose 1-epimerase - like protein; protein id: supported by cDNA: 119313., supported by cDNA: gi_17381241
  misc_feature (1)..(323): Homolog of NCBI NO: 21537069 NR Description: aldose 1-epimerase-like protein [Arabidopsis
  misc_feature (3)..(322): Homolog of NCBI NO: 7430313 NR Description: probable aldose 1-epimerase (EC 5.1.3.3) - common
  misc_feature (3)..(322): Homolog of NCBI NO: 15824567 NR Description: non-cell-autonomous protein pathway2;
  misc_feature (1)..(322): Homolog of NCBI NO: 15242223 NR Description: putative aldose 1-epimerase - like protein;
  misc_feature (3)..(322): Homolog of NCBI NO: 15824565 NR Description: non-cell-autonomous protein pathway1;
  misc_feature (2)..(323): Homolog of NCBI NO: 32474327 NR Description: aldose 1-epimerase [Pirellula sp.]

SEQ ID NO: 83847 - protein, 188 aa, Arabidopsis thaliana; identical to SEQ ID NO: 26040
  peptide (1)..(188): Ceres Seq. ID no. 12672058
  misc_feature (1)..(185): Pfam Name: Aldose 1-epimerase Pfam Description: Aldose 1-epimerase
  misc_feature (1)..(188): Homolog of NCBI NO: 14532616 NR Description: putative aldose 1-epimerase [Arabidopsis thaliana]
  misc_feature (1)..(188): Homolog of NCBI NO: 30684727 NR Description: aldose 1-epimerase family [Arabidopsis thaliana]
  misc_feature (1)..(188): Homolog of NCBI NO: 37531218 NR Description: putative aldose 1-epimerase - like protein [Oryza
  misc_feature (1)..(188): Homolog of NCBI NO: 15228261 NR Description: aldose 1-epimerase - like protein; protein id: supported by cDNA: 119313., supported by cDNA: gi_17381241
  misc_feature (1)..(188): Homolog of NCBI NO: 21537069 NR Description: aldose 1-epimerase-like protein [Arabidopsis
  misc_feature (1)..(187): Homolog of NCBI NO: 7430313 NR Description: probable aldose 1-epimerase (EC 5.1.3.3) - common
  misc_feature (1)..(187): Homolog of NCBI NO: 15824567 NR Description: non-cell-autonomous protein pathway2;
  misc_feature (1)..(187): Homolog of NCBI NO: 15242223 NR Description: putative aldose 1-epimerase - like protein;
  misc_feature (1)..(187): Homolog of NCBI NO: 15824565 NR Description: non-cell-autonomous protein pathway1;
  misc_feature (1)..(188): Homolog of NCBI NO: 32474327 NR Description: aldose 1-epimerase [Pirellula sp.]

SEQ ID NO: 83848 - protein, 184 aa, Arabidopsis thaliana
  peptide (1)..(184): Ceres Seq. ID no. 12672059
  misc_feature (1)..(181): Pfam Name: Aldose 1-epimerase Pfam Description: Aldose 1-epimerase
  misc_feature (1)..(184): Homolog of NCBI NO: 14532616 NR Description: putative aldose 1-epimerase [Arabidopsis thaliana]
  misc_feature (1)..(184): Homolog of NCBI NO: 30684727 NR Description: aldose 1-epimerase family [Arabidopsis thaliana]
  misc_feature (1)..(184): Homolog of NCBI NO: 37531218 NR Description: putative aldose 1-epimerase - like protein [Oryza
  misc_feature (1)..(184): Homolog of NCBI NO: 15228261 NR Description: aldose 1-epimerase - like protein; protein id: supported by cDNA: 119313., supported by cDNA: gi_17381241
  misc_feature (1)..(184): Homolog of NCBI NO: 21537069 NR Description: aldose 1-epimerase-like protein [Arabidopsis
  misc_feature (1)..(183): Homolog of NCBI NO: 7430313 NR Description: probable aldose 1-epimerase (EC 5.1.3.3) - common
  misc_feature (1)..(183): Homolog of NCBI NO: 15824567 NR Description: non-cell-autonomous protein pathway2;
  misc_feature (1)..(183): Homolog of NCBI NO: 15242223 NR Description: putative aldose 1-epimerase - like protein;
  misc_feature (1)..(183): Homolog of NCBI NO: 15824565 NR Description: non-cell-autonomous protein pathway1;
  misc_feature (1)..(184): Homolog of NCBI NO: 32474327 NR Description: aldose 1-epimerase [Pirellula sp.]
MEAVPENKDTPINLAQHTYWNLAGHDSGNILDHKIQIWGSHITPVDEYTVPTGEILPVKGTPFDFTEEKRIGESIGEVGIGYDHNYVLDCPDQEKEGLKHAAKLSDAASSRVLNLWTNVPGMQFYTGNYVNGVVGKGNAVYGKHAGVCLETQGFPNAINQSNFPSVVVKAGEKYNHTMLFEFSA

SEQ ID NO: 83849 - DNA, 1098 bp, Arabidopsis thaliana
  misc_feature (1)..(1098): Ceres Seq. ID no. 12672092
  misc_feature: MA Experiment ID: 20000171 Result: Down-regulated in Transcription
  misc_feature: MA Experiment 20000171 PARAMETER Experiment Name: At_42deg_Heat_P Parameter: Age (day) Value: 14
  misc_feature: MA Experiment 20000171 PARAMETER Experiment Name: At_42deg_Heat_P Parameter: Organism Value: A. thaliana
  misc_feature: MA Experiment 20000171 PARAMETER Experiment Name: At_42deg_Heat_P Parameter: Plant Line Value: WS
  misc_feature: MA Experiment 20000171 PARAMETER Experiment Name: At_42deg_Heat_P Parameter: Temperature (deg C) Value: 42 vs. 22
  misc_feature: MA Experiment 20000171 PARAMETER Experiment Name: At_42deg_Heat_P Parameter: Timepoint (hr) Value: 1
  misc_feature: MA Experiment 20000171 PARAMETER Experiment Name: At_42deg_Heat_P Parameter: Tissue Value: Aerial
  misc_feature: MA Experiment ID: 20000173 Result: Down-regulated in Transcription
  misc_feature: MA Experiment 20000173 PARAMETER Experiment Name: At_42deg_Heat_P Parameter: Age (day) Value: 14
  misc_feature: MA Experiment 20000173 PARAMETER Experiment Name: At_42deg_Heat_P Parameter: Organism Value: A. thaliana
  misc_feature: MA Experiment 20000173 PARAMETER Experiment Name: At_42deg_Heat_P Parameter: Plant Line Value: WS
  misc_feature: MA Experiment 20000173 PARAMETER Experiment Name: At_42deg_Heat_P Parameter: Temperature (deg C) Value: 42 vs. 22
  misc_feature: MA Experiment 20000173 PARAMETER Experiment Name: At_42deg_Heat_P Parameter: Timepoint (hr) Value: 6
  misc_feature: MA Experiment 20000173 PARAMETER Experiment Name: At_42deg_Heat_P Parameter: Tissue Value: Aerial
  misc_feature: MA Experiment ID: 20000184 Result: Up-regulated in Transcription
  misc_feature: MA Experiment 20000184 PARAMETER Experiment Name: At_Shoots__P Parameter: Age (day) Value: 7
  misc_feature: MA Experiment 20000184 PARAMETER Experiment Name: At_Shoots__P Parameter: Tissue Value: Shoots vs. Whole Plant
  misc_feature: MA Experiment ID: 20000185 Result: Down-regulated in Transcription
  misc_feature: MA Experiment 20000185 PARAMETER Experiment Name: At_Roots__P Parameter: Age (day) Value: 7 vs. 21
  misc_feature: MA Experiment 20000185 PARAMETER Experiment Name: At_Roots__P Parameter: Organism Value: A. thaliana
  misc_feature: MA Experiment 20000185 PARAMETER Experiment Name: At_Roots__P Parameter: Tissue Value: Roots vs. Whole Plant
  misc_feature: MA Experiment ID: 20000264 Result: Up-regulated in Transcription
  misc_feature: MA Experiment 20000264 PARAMETER Experiment Name: At_Open_Flower_P Parameter: Age (day) Value: 21
  misc_feature: MA Experiment 20000264 PARAMETER Experiment Name: At_Open_Flower_P Parameter: Plant Line Value: WS
  misc_feature: MA Experiment 20000264 PARAMETER Experiment Name: At_Open_Flower_P Parameter: Tissue Value: Open Flower vs. Whole Plant
  misc_feature: MA Experiment ID: 20000265 Result: Up-regulated in Transcription
  misc_feature: MA Experiment 20000265 PARAMETER Experiment Name: At_Open_Flower_P Parameter: Age (day) Value: 21
  misc_feature: MA Experiment 20000265 PARAMETER Experiment Name: At_Open_Flower_P Parameter: Plant Line Value: WS
  misc_feature: MA Experiment 20000265 PARAMETER Experiment Name: At_Open_Flower_P Parameter: Tissue Value: Closed Flower vs. Whole Plant
  misc_feature: MA Experiment ID: 20000286 Result: Up-regulated in Transcription
  misc_feature: MA Experiment 20000286 PARAMETER Experiment Name: At_Open_Flower_P Parameter: Age (day) Value: 21
  misc_feature: MA Experiment 20000286 PARAMETER Experiment Name: At_Open_Flower_P Parameter: Plant Line Value: WS
  misc_feature: MA Experiment 20000286 PARAMETER Experiment Name: At_Open_Flower_P Parameter: Tissue Value: Half Open vs. Whole Plant
  misc_feature: MA Experiment ID: 20000438 Result: Up-regulated in Transcription
  misc_feature: MA Experiment 20000438 PARAMETER Experiment Name: At_Shoots__P Parameter: Age (day) Value: 14
  misc_feature: MA Experiment 20000438 PARAMETER Experiment Name: At_Shoots__P Parameter: Tissue Value: Shoots vs. Whole Plant
  misc_feature: MA Experiment ID: 20000439 Result: Down-regulated in Transcription
  misc_feature: MA Experiment 20000439 PARAMETER Experiment Name: At_Roots__P Parameter: Age (day) Value: 14 vs. 21
  misc_feature: MA Experiment 20000439 PARAMETER Experiment Name: At_Roots__P Parameter: Organism Value: A. thaliana
  misc_feature: MA Experiment 20000439 PARAMETER Experiment Name: At_Roots__P Parameter: Tissue Value: Roots vs. Whole Plant
  misc_feature: MA Experiment ID: 20000794 Result: Up-regulated in Transcription
  misc_feature: MA Experiment 20000794 PARAMETER Experiment Name: At_Petals_P Parameter: Age (day) Value: 23-25 days
  misc_feature: MA Experiment 20000794 PARAMETER Experiment Name: At_Petals_P Parameter: Plant Line Value: WS
  misc_feature: MA Experiment 20000794 PARAMETER Experiment Name: At_Petals_P Parameter: Tissue Value: Petals vs. Whole plant
  misc_feature: MA Experiment ID: 20001450 Result: Up-regulated in Transcription
  misc_feature: MA Experiment 20001450 PARAMETER Experiment Name: At_Far-red-induction_P Parameter: Age (day) Value: 7
  misc_feature: MA Experiment 20001450 PARAMETER Experiment Name: At_Far-red-induction_P Parameter: Light Value: Far-red vs. White
  misc_feature: MA Experiment 20001450 PARAMETER Experiment Name: At_Far-red-induction_P Parameter: Organism Value: A. thaliana
  misc_feature: MA Experiment 20001450 PARAMETER Experiment Name: At_Far-red-induction_P Parameter: Plant Line Value: Columbia
  misc_feature: MA Experiment 20001450 PARAMETER Experiment Name: At_Far-red-induction_P Parameter: Timepoint (hr) Value: 8
  misc_feature: MA Experiment 20001450 PARAMETER Experiment Name: At_Far-red-induction_P Parameter: Tissue Value: Whole Plant
atgaatctcaacgtcgtcgttttactcctactccttctaatctcatccgccacgtgttgtccgccgtcagaccgccgtgcacttctagctttccgatcagctcttcacgagccttacctcggcattttcaactcatggacaggccaagactgttgccacaactggtacggtattagctgcgactcgctcactcaccgagtcgccgacataaatctccgcggcgagtcagaagatccaatcttcgaacgagctcaccgaaccggttacatgaccggacacatctccgcctcgatatgtgagctcactcgtctctccgccattacaatcgccgattggaaaggtatctccggcgaaatccctaaatgtatcactcgtcttccttttctccgtacactcgacttaatcggaaaccaaatctccggtgggattccatacgacatcggaagattaaaccggttagctgttttaaacgtagccgataaccgaatctccggttcaattccaaaatcattaaccaatctctctagcttaatgcatttagatctccgtaacaacttaatctccggtgtaatcccgtcggacgtcggaagattaaaaatgctcagccgtgcgttattatccggtaaccgaataaccggtcggatcccagaatcattaaccaatatctaccggttagctgacgtggatctctccggtaaccaactctacggtacaatcccaccgtctctaggacgtatgtcggtactagccacacttaacctcgacggaaacaaaatctccggcgagatacctcaaactctgatgacgtcgtcggtgatgaatctgaatttgagccggaacttgctacaagggaagatacctgaagggtttggaccaaggtcttacttcacagttcttgatttgtcgtataataatctgaaaggaccaataccgagatcgatctcaggtgcgtcgtttattggtcatttggatcttagccataaccatctctgtgggaggattccggtaggttcaccgtttgatcatcttgaagcggcgtcgtttatgtttaacgactgtctttgtggtaaacctttaagagcttgcttgaaaaattga

SEQ ID NO: 83850 - protein, 365 aa, Arabidopsis thaliana; identical to SEQ ID NO: 39970
  peptide (1)..(365): Ceres Seq. ID no. 12672093
  misc_feature (128)..(151): Pfam Name: Leucine Rich Repeat Pfam Description: Leucine Rich Repeat
  misc_feature (1)..(365): Homolog of NCBI NO: 15232373 NR Description: disease resistance protein family (LRR); protein At3g20820.1, supported by cDNA: gi_17380931 [Arabidopsis
  misc_feature (43)..(362): Homolog of NCBI NO: 25004882 NR Description: polygalacturonase inhibitor-like protein [Cicer
  misc_feature (4)..(364): Homolog of NCBI NO: 21593689 NR Description: leucine rich repeat protein, putative
  misc_feature (4)..(364): Homolog of NCBI NO: 15239943 NR Description: leucine rich repeat protein family; protein id: supported by cDNA: 41409., supported by cDNA: gi_14532721
  misc_feature (4)..(364): Homolog of NCBI NO: 14532722 NR Description: unknown protein [Arabidopsis thaliana]
  misc_feature (6)..(362): Homolog of NCBI NO: 38566726 NR Description: leucine rich repeat protein [Cicer arietinum]
  misc_feature (4)..(359): Homolog of NCBI NO: 15230539 NR Description: DNA-damage-repair/toleration protein, putative protein id: At3g12610.1 [Arabidopsis thaliana]
  misc_feature (22)..(355): Homolog of NCBI NO: 421844 NR Description: DRT100 protein precursor - Arabidopsis thaliana
  misc_feature (6)..(328): Homolog of NCBI NO: 15225296 NR Description: disease resistance protien-related (LRR); protein At2g26380.1 [Arabidopsis thaliana] >gi|7487889|pir||T00971
  misc_feature (6)..(335): Homolog of NCBI NO: 21536600 NR Description: putative disease resistance protein [Arabidopsis

SEQ ID NO: 83851 - protein, 276 aa, Arabidopsis thaliana; identical to SEQ ID NO: 39971
  peptide (1)..(276): Ceres Seq. ID no. 12672094
  misc_feature (39)..(62): Pfam Name: Leucine Rich Repeat Pfam Description: Leucine Rich Repeat
  misc_feature (1)..(276): Homolog of NCBI NO: 15232373 NR Description: disease resistance protein family (LRR); protein At3g20820.1, supported by cDNA: gi_17380931 [Arabidopsis
  misc_feature (1)..(273): Homolog of NCBI NO: 25004882 NR Description: polygalacturonase inhibitor-like protein [Cicer
  misc_feature (1)..(275): Homolog of NCBI NO: 21593689 NR Description: leucine rich repeat protein, putative
  misc_feature (1)..(275): Homolog of NCBI NO: 15239943 NR Description: leucine rich repeat protein family; protein id: supported by cDNA: 41409., supported by cDNA: gi_14532721
  misc_feature (1)..(275): Homolog of NCBI NO: 14532722 NR Description: unknown protein [Arabidopsis thaliana]
  misc_feature (1)..(273): Homolog of NCBI NO: 38566726 NR Description: leucine rich repeat protein [Cicer arietinum]
  misc_feature (1)..(270): Homolog of NCBI NO: 15230539 NR Description: DNA-damage-repair/toleration protein, putative protein id: At3g12610.1 [Arabidopsis thaliana]
  misc_feature (1)..(266): Homolog of NCBI NO: 421844 NR Description: DRT100 protein precursor - Arabidopsis thaliana
  misc_feature (1)..(239): Homolog of NCBI NO: 15225296 NR Description: disease resistance protien-related (LRR); protein At2g26380.1 [Arabidopsis thaliana] >gi|7487889|pir||T00971
  misc_feature (1)..(246): Homolog of NCBI NO: 21536600 NR Description: putative disease resistance protein [Arabidopsis

SEQ ID NO: 83852 - protein, 188 aa, Arabidopsis thaliana
  peptide (1)..(188): Ceres Seq. ID no. 12672095
  misc_feature (1)..(188): Homolog of NCBI NO: 15232373 NR Description: disease resistance protein family (LRR); protein At3g20820.1, supported by cDNA: gi_17380931 [Arabidopsis
  misc_feature (1)..(185): Homolog of NCBI NO: 25004882 NR Description: polygalacturonase inhibitor-like protein [Cicer
  misc_feature (1)..(187): Homolog of NCBI NO: 21593689 NR Description: leucine rich repeat protein, putative
  misc_feature (1)..(187): Homolog of NCBI NO: 15239943 NR Description: leucine rich repeat protein family; protein id: supported by cDNA: 41409., supported by cDNA: gi_14532721
  misc_feature (1)..(187): Homolog of NCBI NO: 14532722 NR Description: unknown protein [Arabidopsis thaliana]
  misc_feature (1)..(185): Homolog of NCBI NO: 38566726 NR Description: leucine rich repeat protein [Cicer arietinum]
  misc_feature (1)..(182): Homolog of NCBI NO: 15230539 NR Description: DNA-damage-repair/toleration protein, putative protein id: At3g12610.1 [Arabidopsis thaliana]
  misc_feature (1)..(178): Homolog of NCBI NO: 421844 NR Description: DRT100 protein precursor - Arabidopsis thaliana
  misc_feature (1)..(151): Homolog of NCBI NO: 15225296 NR Description: disease resistance protien-related (LRR); protein At2g26380.1 [Arabidopsis thaliana] >gi|7487889|pir||T00971
  misc_feature (1)..(158): Homolog of NCBI NO: 21536600 NR Description: putative disease resistance protein [Arabidopsis
MHLDLRNNLISGVIPSDVGRLKMLSRALLSGNRITGRIPESLTNIYRLADVDLSGNQLYGTIPPSLGRMSVLATLNLDGNKISGEIPQTLMTSSVMNLNLSRNLLQGKIPEGFGPRSYFTVLDLSYNNLKGPIPRSISGASFIGHLDLSHNHLCGRIPVGSPFDHLEAASFMFNDCLCGKPLRACLKN

SEQ ID NO: 83853 - DNA, 1548 bp, Arabidopsis thaliana
  misc_feature (1)..(1548): Ceres Seq. ID no. 12672152
atgcagattgagatggaagagaagtttgaagattggagaggcaaagaggcaatttctggcaaacatggtgggattaaagctgctttcattgcttgtgttgtagagacgatggagaatatggtgttcttagcatgttcaaccaacttcatgatgtactttacgaaatcaatgaattactcaacacccaaagcagcaaccatggtgactaatttcgtagggacatcgtttttgctcactattttcggtggttttgtcgcggactcttttctcactcgcttcgctgctttcgtcctctttggttccattgaactcctgggtttgatcatgttgacactccaagctcatatcactaagttacaacctcaaggaggtaaaaaaccttcgactcctcaatcaacggttctattcactggactttatgcaatagctattggtgttggaggtgtcaaggggtcgttgcctgctcatggaggcgaccagatcggtactagaaaccagaggctgatctcaggattcttcaattggtatttcttctctgtctgccttggaggtttcttggcagtaacacttatggtttggatcgaggagaacataggatggagctccagcttcactatatctaccgcggttttagcctctgcgatcttcgttttcgttgcgggatgcccgatgtatcgattcaagcgcccagcagggagtcctttgaccagaattgtgaatgtgtttgtttctgccgcaagaaaccgaaataggtttgtaacggatgcagaggtggtgacacagaatcataactctaccgacaaaagcattcatcacaacaagttcaagtttttgaataaagcaaagctcaacaacaagatatcagcaacacaagttgaagaaacaagaacgtttctagctctccttccaatatttgggagcacaattataatgaactgttgtgtcgcacaaatgggaaccttctccgttcaacaaggcatggtgacaaacagaaaactctcgcgttcctttgagatccccgtggcttccctcaatgccattcctctactgtgcatgctctcttctttagctttatacgagcttttcggcaaaaggatcttatccaatagcgaaagatcgtccagcttcaatttgaaacgtataggatacggtttagctctcacctctatttcaatggcggttgcagccatcgtggaggtcaaaagaaaacatgaagcggttcacaacaacatcaagatttctgtgttctggctagagcttcaatttgttatgttgagtctctcggatatgttgactgttggaggaatgttagagttcttctttagagaatctccagcgagtatgaggagcatgagcaccgcgttagggtggtgctccaccgcaatgggtttcttcctcagctcggttcttgtggaggttgttaatggcatcacgggatggctccgcgacgatcttaatgagtccaggctcgaactattttatttggttttatgtgttcttaatacccttaatctttttaattatattttctgggcgaaaagatattag

SEQ ID NO: 83854 - protein, 515 aa, Arabidopsis thaliana
  peptide (1)..(515): Ceres Seq. ID no. 12672153
  misc_feature (93)..(460): Pfam Name: POT family Pfam Description: POT family
  misc_feature (1)..(515): Homolog of NCBI NO: 15230826 NR Description: nitrate transporter, putative; protein id: [Arabidopsis thaliana] >gi|9294183|dbj|BAB02085.1| nitrate
  misc_feature (1)..(515): Homolog of NCBI NO: 15230829 NR Description: nitrate transporter, putative; protein id:
  misc_feature (241)..(515): Homolog of NCBI NO: 22329803 NR Description: nitrate transporter, putative; protein id: supported by cDNA: gi_18175947, supported by cDNA: gi_20465362 thaliana] >gi|18175948|gb|AAL59956.1| putative nitrate
  misc_feature (1)..(274): Homolog of NCBI NO: 22329803 NR Description: nitrate transporter, putative; protein id: supported by cDNA: gi_18175947, supported by cDNA: gi_20465362 thaliana] >gi|18175948|gb|AAL59956.1| putative nitrate
  misc_feature (241)..(515): Homolog of NCBI NO: 25403281 NR Description: protein T7N9.10 [imported] - Arabidopsis thaliana
  misc_feature (7)..(274): Homolog of NCBI NO: 25403281 NR Description: protein T7N9.10 [imported] - Arabidopsis thaliana
  misc_feature (273)..(515): Homolog of NCBI NO: 17064754 NR Description: nitrate transporter (NTL1) [Arabidopsis thaliana]
  misc_feature (1)..(246): Homolog of NCBI NO: 17064754 NR Description: nitrate transporter (NTL1) [Arabidopsis thaliana]
  misc_feature (273)..(515): Homolog of NCBI NO: 11358579 NR Description: nitrate transporter NTL1 [validated] - thaliana >gi|3377517|gb|AAC28086.1| nitrate transporter NTL1
  misc_feature (1)..(246): Homolog of NCBI NO: 11358579 NR Description: nitrate transporter NTL1 [validated] - thaliana >gi|3377517|gb|AAC28086.1| nitrate transporter NTL1
MQIEMEEKFEDWRGKEAISGKHGGIKAAFIACVVETMENMVFLACSTNFMMYFTKSMNYSTPKAATMVTNFVGTSFLLTIFGGFVADSFLTRFAAFVLFGSIELLGLIMLTLQAHITKLQPQGGKKPSTPQSTVLFTGLYAIAIGVGGVKGSLPAHGGDQIGTRNQRLISGFFNWYFFSVCLGGFLAVTLMVWIEENIGWSSSFTISTAVLASAIFVFVAGCPMYRFKRPAGSPLTRIVNVFVSAARNRNRFVTDAEVVTQNHNSTDKSIHHNKFKFLNKAKLNNKISATQVEETRTFLALLPIFGSTIIMNCCVAQMGTFSVQQGMVTNRKLSRSFEIPVASLNAIPLLCMLSSLALYELFGKRILSNSERSSSFNLKRIGYGLALTSISMAVAAIVEVKRKHEAVHNNIKISVFWLELQFVMLSLSDMLTVGGMLEFFFRESPASMRSMSTALGWCSTAMGFFLSSVLVEVVNGITGWLRDDLNESRLELFYLVLCVLNTLNLFNYIFWAKRY

SEQ ID NO: 83855 - protein, 511 aa, Arabidopsis thaliana
  peptide (1)..(511): Ceres Seq. ID no. 12672154
  misc_feature (89)..(456): Pfam Name: POT family Pfam Description: POT family
  misc_feature (1)..(511): Homolog of NCBI NO: 15230826 NR Description: nitrate transporter, putative; protein id: [Arabidopsis thaliana] >gi|9294183|dbj|BAB02085.1| nitrate
  misc_feature (1)..(511): Homolog of NCBI NO: 15230829 NR Description: nitrate transporter, putative; protein id:
  misc_feature (237)..(511): Homolog of NCBI NO: 22329803 NR Description: nitrate transporter, putative; protein id: supported by cDNA: gi_18175947, supported by cDNA: gi_20465362 thaliana] >gi|18175948|gb|AAL59956.1| putative nitrate
  misc_feature (1)..(270): Homolog of NCBI NO: 22329803 NR Description: nitrate transporter, putative; protein id: supported by cDNA: gi_18175947, supported by cDNA: gi_20465362 thaliana] >gi|18175948|gb|AAL59956.1| putative nitrate
  misc_feature (237)..(511): Homolog of NCBI NO: 25403281 NR Description: protein T7N9.10 [imported] - Arabidopsis thaliana
  misc_feature (3)..(270): Homolog of NCBI NO: 25403281 NR Description: protein T7N9.10 [imported] - Arabidopsis thaliana
  misc_feature (269)..(511): Homolog of NCBI NO: 17064754 NR Description: nitrate transporter (NTL1) [Arabidopsis thaliana]
  misc_feature (1)..(242): Homolog of NCBI NO: 17064754 NR Description: nitrate transporter (NTL1) [Arabidopsis thaliana]
  misc_feature (269)..(511): Homolog of NCBI NO: 11358579 NR Description: nitrate transporter NTL1 [validated] - thaliana >gi|3377517|gb|AAC28086.1| nitrate transporter NTL1
  misc_feature (1)..(242): Homolog of NCBI NO: 11358579 NR Description: nitrate transporter NTL1 [validated] - thaliana >gi|3377517|gb|AAC28086.1| nitrate transporter NTL1
MEEKFEDWRGKEAISGKHGGIKAAFIACVVETMENMVFLACSTNFMMYFTKSMNYSTPKAATMVTNFVGTSFLLTIFGGFVADSFLTRFAAFVLFGSIELLGLIMLTLQAHITKLQPQGGKKPSTPQSTVLFTGLYAIAIGVGGVKGSLPAHGGDQIGTRNQRLISGFFNWYFFSVCLGGFLAVTLMVWIEENIGWSSSFTISTAVLASAIFVFVAGCPMYRFKRPAGSPLTRIVNVFVSAARNRNRFVTDAEVVTQNHNSTDKSIHHNKFKFLNKAKLNNKISATQVEETRTFLALLPIFGSTIIMNCCVAQMGTFSVQQGMVTNRKLSRSFEIPVASLNAIPLLCMLSSLALYELFGKRILSNSERSSSFNLKRIGYGLALTSISMAVAAIVEVKRKHEAVHNNIKISVFWLELQFVMLSLSDMLTVGGMLEFFFRESPASMRSMSTALGWCSTAMGFFLSSVLVEVVNGITGWLRDDLNESRLELFYLVLCVLNTLNLFNYIFWAKRY

SEQ ID NO: 83856 - protein, 479 aa, Arabidopsis thaliana
  peptide (1)..(479): Ceres Seq. ID no. 12672155
  misc_feature (57)..(424): Pfam Name: POT family Pfam Description: POT family
  misc_feature (1)..(479): Homolog of NCBI NO: 15230826 NR Description: nitrate transporter, putative; protein id: [Arabidopsis thaliana] >gi|9294183|dbj|BAB02085.1| nitrate
  misc_feature (1)..(479): Homolog of NCBI NO: 15230829 NR Description: nitrate transporter, putative; protein id:
  misc_feature (205)..(479): Homolog of NCBI NO: 22329803 NR Description: nitrate transporter, putative; protein id: supported by cDNA: gi_18175947, supported by cDNA: gi_20465362 thaliana] >gi|18175948|gb|AAL59956.1| putative nitrate
  misc_feature (1)..(238): Homolog of NCBI NO: 22329803 NR Description: nitrate transporter, putative; protein id: supported by cDNA: gi_18175947, supported by cDNA: gi_20465362 thaliana] >gi|18175948|gb|AAL59956.1| putative nitrate
  misc_feature (205)..(479): Homolog of NCBI NO: 25403281 NR Description: protein T7N9.10 [imported] - Arabidopsis thaliana
  misc_feature (1)..(238): Homolog of NCBI NO: 25403281 NR Description: protein T7N9.10 [imported] - Arabidopsis thaliana
  misc_feature (237)..(479): Homolog of NCBI NO: 17064754 NR Description: nitrate transporter (NTL1) [Arabidopsis thaliana]
  misc_feature (1)..(210): Homolog of NCBI NO: 17064754 NR Description: nitrate transporter (NTL1) [Arabidopsis thaliana]
  misc_feature (237)..(479): Homolog of NCBI NO: 11358579 NR Description: nitrate transporter NTL1 [validated] - thaliana >gi|3377517|gb|AAC28086.1| nitrate transporter NTL1
  misc_feature (1)..(210): Homolog of NCBI NO: 11358579 NR Description: nitrate transporter NTL1 [validated] - thaliana >gi|3377517|gb|AAC28086.1| nitrate transporter NTL1
MENMVFLACSTNFMMYFTKSMNYSTPKAATMVTNFVGTSFLLTIFGGFVADSFLTRFAAFVLFGSIELLGLIMLTLQAHITKLQPQGGKKPSTPQSTVLFTGLYAIAIGVGGVKGSLPAHGGDQIGTRNQRLISGFFNWYFFSVCLGGFLAVTLMVWIEENIGWSSSFTISTAVLASAIFVFVAGCPMYRFKRPAGSPLTRIVNVFVSAARNRNRFVTDAEVVTQNHNSTDKSIHHNKFKFLNKAKLNNKISATQVEETRTFLALLPIFGSTIIMNCCVAQMGTFSVQQGMVTNRKLSRSFEIPVASLNAIPLLCMLSSLALYELFGKRILSNSERSSSFNLKRIGYGLALTSISMAVAAIVEVKRKHEAVHNNIKISVFWLELQFVMLSLSDMLTVGGMLEFFFRESPASMRSMSTALGWCSTAMGFFLSSVLVEVVNGITGWLRDDLNESRLELFYLVLCVLNTLNLFNYIFWAKRY

SEQ ID NO: 83857 - DNA, 1302 bp, Arabidopsis thaliana
  misc_feature (1)..(1302): Ceres Seq. ID no. 12672156
  misc_feature: MA Experiment ID: 20000327 Result: Down-regulated in Transcription
  misc_feature: MA Experiment 20000327 PARAMETER Experiment Name: At_42deg_Heat_Sub_P Parameter: Age (day) Value: 14
  misc_feature: MA Experiment 20000327 PARAMETER Experiment Name: At_42deg_Heat_Sub_P Parameter: Organism Value: A. thaliana
  misc_feature: MA Experiment 20000327 PARAMETER Experiment Name: At_42deg_Heat_Sub_P Parameter: Plant Line Value: WS
  misc_feature: MA Experiment 20000327 PARAMETER Experiment Name: At_42deg_Heat_Sub_P Parameter: Temperature (deg C) Value: 42 vs. 22
  misc_feature: MA Experiment 20000327 PARAMETER Experiment Name: At_42deg_Heat_Sub_P Parameter: Timepoint (hr) Value: 1
  misc_feature: MA Experiment 20000327 PARAMETER Experiment Name: At_42deg_Heat_Sub_P Parameter: Tissue Value: Aerial
  misc_feature: MA Experiment ID: 20000328 Result: Down-regulated in Transcription
  misc_feature: MA Experiment 20000328 PARAMETER Experiment Name: At_42deg_Heat_Sub_P Parameter: Age (day) Value: 14
  misc_feature: MA Experiment 20000328 PARAMETER Experiment Name: At_42deg_Heat_Sub_P Parameter: Organism Value: A. thaliana
  misc_feature: MA Experiment 20000328 PARAMETER Experiment Name: At_42deg_Heat_Sub_P Parameter: Plant Line Value: WS
  misc_feature: MA Experiment 20000328 PARAMETER Experiment Name: At_42deg_Heat_Sub_P Parameter: Temperature (deg C) Value: 42 vs. 22
  misc_feature: MA Experiment 20000328 PARAMETER Experiment Name: At_42deg_Heat_Sub_P Parameter: Timepoint (hr) Value: 6
  misc_feature: MA Experiment 20000328 PARAMETER Experiment Name: At_42deg_Heat_Sub_P Parameter: Tissue Value: Aerial
  misc_feature: MA Experiment ID: 20000347 Result: Up-regulated in Transcription
  misc_feature: MA Experiment 20000347 PARAMETER Experiment Name: At_2mM_SA_Sub_P Parameter: Age (day) Value: 14
  misc_feature: MA Experiment 20000347 PARAMETER Experiment Name: At_2mM_SA_Sub_P Parameter: Organism Value: A. thaliana
  misc_feature: MA Experiment 20000347 PARAMETER Experiment Name: At_2mM_SA_Sub_P Parameter: Plant Line Value: WS
  misc_feature: MA Experiment 20000347 PARAMETER Experiment Name: At_2mM_SA_Sub_P Parameter: Timepoint (hr) Value: 6
  misc_feature: MA Experiment 20000347 PARAMETER Experiment Name: At_2mM_SA_Sub_P Parameter: Tissue Value: Aerial
  misc_feature: MA Experiment 20000347 PARAMETER Experiment Name: At_2mM_SA_Sub_P Parameter: Treatment Value: 2mM SA vs. No Treatment
  misc_feature: MA Experiment ID: 20000440 Result: Down-regulated in Transcription
  misc_feature: MA Experiment 20000440 PARAMETER Experiment Name: At_Closed-Flower__Sub_P Parameter: Tissue Value: Closed Flower vs. Whole Plant
atgaagttgcagcacgttgtgtacctggtggctattttcttcgtggtggctattttcgtgattgcatgtatagaagagaataagtacttagtctggattatgattattcttgcaaacaccaccaacattttgagcctcgtgcgtagcattagctatataaaaaatataaggaagcaccagaaggacaccaagatccaacgacaattattctttgagaaaaatggcggtggcatgttgatagagcgactctcgggggcagggtcatcaaacattgatttcaaaatctttacggaggaagacatgaaggaagcaactaatggttatgatgtgagcagaatcttgggtcaaggaggccaatggacagtctacaaagggatattgcctgacaactccatcgttgctataaagaaaactcggctaggagacaacaaccaagtagagcagttcatcaacgaagtgctcgtgctttcacaaattaaccacaggaacgttgtcaagctcttgggttgctgtctagagactgaagttcccttgttggtctatgaattcattaccggtggctcccttttcgatcacttgcacggttccatgtttgtttcttctcttacatgggaacaccgcctggagatagcaatagaagttgctggagctatagcgtatcttcactccggtgcttctattccaatcatccatcgcgatatcaaaactgaaaatattctcttggatgaaaacttaactgcaaaagtagctgactttggcgcttcaaagttgaagccaatggataaagaacagctcaccactatggtgcaaggcactctcggatatttagacccagaatactataccacatggcttctgaacgaaaagagcgatgtttatagctttggggtagtcctcatggaactgatatcaggtcaaaaggcattgtgctttgaaaggccagagacttcaaaacatttggtgagttactttgttttggccacgaaagagaataggttgcatgagattattgacgaccaagtgttgaacgaggaaaaccagagggaaatccatgaagctgcaagagttgctgttgaatgtacaagactaaagggagaggaaaggccaaggatgatagaagtagctgcagagctagaaacgttgagagccaaaacgaccaaacataattggttggatcagtatcctgaagagaatgtacacttgcttggtagtaacatcgtgtcagcacaaggccataccagtagccgtggttatgacaacaacaagaatgtagcaaggtttgacattgaagctggccgctga

SEQ ID NO: 83858 - protein, 433 aa, Arabidopsis thaliana
  peptide (1)..(433): Ceres Seq. ID no. 12672157
  misc_feature (1)..(433): Homolog of NCBI NO: 15230844 NR Description: WAK-like kinase (WLK); protein id: At3g25490.1
  misc_feature (25)..(433): Homolog of NCBI NO: 15218170 NR Description: wall-associated kinase 5; protein id: At1g21230.1
  misc_feature (35)..(433): Homolog of NCBI NO: 15218171 NR Description: wall-associated kinase 3; protein id: At1g21240.1
  misc_feature (43)..(433): Homolog of NCBI NO: 25287657 NR Description: F16F4.8 protein - Arabidopsis thaliana
  misc_feature (28)..(433): Homolog of NCBI NO: 15218167 NR Description: wall-associated kinase 4; protein id: At1g21210.1
  misc_feature (28)..(433): Homolog of NCBI NO: 25287665 NR Description: hypothetical protein F16F4.10 [imported] -
  misc_feature (28)..(433): Homolog of NCBI NO: 3355308 NR Description: wall-associated kinase 4 [Arabidopsis thaliana]
  misc_feature (26)..(433): Homolog of NCBI NO: 18394970 NR Description: wall-associated kinase 1; protein id:
  misc_feature (26)..(433): Homolog of NCBI NO: 25751318 NR Description: probable serine/threonine-specific protein kinase
  misc_feature (28)..(433): Homolog of NCBI NO: 15218959 NR Description: wall-associated kinase 2; protein id: supported by cDNA: gi_17064909 [Arabidopsis thaliana]
MKLQHVVYLVAIFFVVAIFVIACIEENKYLVWIMIILANTTNILSLVRSISYIKNIRKHQKDTKIQRQLFFEKNGGGMLIERLSGAGSSNIDFKIFTEEDMKEATNGYDVSRILGQGGQWTVYKGILPDNSIVAIKKTRLGDNNQVEQFINEVLVLSQINHRNVVKLLGCCLETEVPLLVYEFITGGSLFDHLHGSMFVSSLTWEHRLEIAIEVAGAIAYLHSGASIPIIHRDIKTENILLDENLTAKVADFGASKLKPMDKEQLTTMVQGTLGYLDPEYYTTWLLNEKSDVYSFGVVLMELISGQKALCFERPETSKHLVSYFVLATKENRLHEIIDDQVLNEENQREIHEAARVAVECTRLKGEERPRMIEVAAELETLRAKTTKHNWLDQYPEENVHLLGSNIVSAQGHTSSRGYDNNKNVARFDIEAGR

SEQ ID NO: 83859 - protein, 400 aa, Arabidopsis thaliana
  peptide (1)..(400): Ceres Seq. ID no. 12672158
  misc_feature (1)..(400): Homolog of NCBI NO: 15230844 NR Description: WAK-like kinase (WLK); protein id: At3g25490.1
  misc_feature (1)..(400): Homolog of NCBI NO: 15218170 NR Description: wall-associated kinase 5; protein id: At1g21230.1
  misc_feature (2)..(400): Homolog of NCBI NO: 15218171 NR Description: wall-associated kinase 3; protein id: At1g21240.1
  misc_feature (10)..(400): Homolog of NCBI NO: 25287657 NR Description: F16F4.8 protein - Arabidopsis thaliana
  misc_feature (1)..(400): Homolog of NCBI NO: 15218167 NR Description: wall-associated kinase 4; protein id: At1g21210.1
  misc_feature (1)..(400): Homolog of NCBI NO: 25287665 NR Description: hypothetical protein F16F4.10 [imported] -
  misc_feature (1)..(400): Homolog of NCBI NO: 3355308 NR Description: wall-associated kinase 4 [Arabidopsis thaliana]
  misc_feature (1)..(400): Homolog of NCBI NO: 18394970 NR Description: wall-associated kinase 1; protein id:
  misc_feature (1)..(400): Homolog of NCBI NO: 25751318 NR Description: probable serine/threonine-specific protein kinase
  misc_feature (1)..(400): Homolog of NCBI NO: 15218959 NR Description: wall-associated kinase 2; protein id: supported by cDNA: gi_17064909 [Arabidopsis thaliana]
MIILANTTNILSLVRSISYIKNIRKHQKDTKIQRQLFFEKNGGGMLIERLSGAGSSNIDFKIFTEEDMKEATNGYDVSRILGQGGQWTVYKGILPDNSIVAIKKTRLGDNNQVEQFINEVLVLSQINHRNVVKLLGCCLETEVPLLVYEFITGGSLFDHLHGSMFVSSLTWEHRLEIAIEVAGAIAYLHSGASIPIIHRDIKTENILLDENLTAKVADFGASKLKPMDKEQLTTMVQGTLGYLDPEYYTTWLLNEKSDVYSFGVVLMELISGQKALCFERPETSKHLVSYFVLATKENRLHEIIDDQVLNEENQREIHEAARVAVECTRLKGEERPRMIEVAAELETLRAKTTKHNWLDQYPEENVHLLGSNIVSAQGHTSSRGYDNNKNVARFDIEAGR

SEQ ID NO: 83860 - protein, 356 aa, Arabidopsis thaliana
  peptide (1)..(356): Ceres Seq. ID no. 12672159
  misc_feature (1)..(356): Homolog of NCBI NO: 15230844 NR Description: WAK-like kinase (WLK); protein id: At3g25490.1
  misc_feature (1)..(356): Homolog of NCBI NO: 15218170 NR Description: wall-associated kinase 5; protein id: At1g21230.1
  misc_feature (1)..(356): Homolog of NCBI NO: 15218171 NR Description: wall-associated kinase 3; protein id: At1g21240.1
  misc_feature (1)..(356): Homolog of NCBI NO: 25287657 NR Description: F16F4.8 protein - Arabidopsis thaliana
  misc_feature (1)..(356): Homolog of NCBI NO: 15218167 NR Description: wall-associated kinase 4; protein id: At1g21210.1
  misc_feature (1)..(356): Homolog of NCBI NO: 25287665 NR Description: hypothetical protein F16F4.10 [imported] -
  misc_feature (1)..(356): Homolog of NCBI NO: 3355308 NR Description: wall-associated kinase 4 [Arabidopsis thaliana]
  misc_feature (1)..(356): Homolog of NCBI NO: 18394970 NR Description: wall-associated kinase 1; protein id:
  misc_feature (1)..(356): Homolog of NCBI NO: 25751318 NR Description: probable serine/threonine-specific protein kinase
  misc_feature (1)..(356): Homolog of NCBI NO: 15218959 NR Description: wall-associated kinase 2; protein id: supported by cDNA: gi_17064909 [Arabidopsis thaliana]
MLIERLSGAGSSNIDFKIFTEEDMKEATNGYDVSRILGQGGQWTVYKGILPDNSIVAIKKTRLGDNNQVEQFINEVLVLSQINHRNVVKLLGCCLETEVPLLVYEFITGGSLFDHLHGSMFVSSLTWEHRLEIAIEVAGAIAYLHSGASIPIIHRDIKTENILLDENLTAKVADFGASKLKPMDKEQLTTMVQGTLGYLDPEYYTTWLLNEKSDVYSFGVVLMELISGQKALCFERPETSKHLVSYFVLATKENRLHEIIDDQVLNEENQREIHEAARVAVECTRLKGEERPRMIEVAAELETLRAKTTKHNWLDQYPEENVHLLGSNIVSAQGHTSSRGYDNNKNVARFDIEAGR

SEQ ID NO: 83861 - DNA, 1494 bp, Arabidopsis thaliana
  misc_feature (1)..(1494): Ceres Seq. ID no. 12672178
  misc_feature: MA Experiment ID: 20000180 Result: Down-regulated in Transcription
  misc_feature: MA Experiment 20000180 PARAMETER Experiment Name: At_Germinating_Seeds_P Parameter: Age (hr) Value: 24 vs. 0
  misc_feature: MA Experiment 20000180 PARAMETER Experiment Name: At_Germinating_Seeds_P Parameter: Tissue Value: Germinating Seeds
  misc_feature: MA Experiment ID: 20000443 Result: Down-regulated in Transcription
  misc_feature: MA Experiment 20000443 PARAMETER Experiment Name: At_1uM_BR-BRZ__P Parameter: Tissue Value: Shoot Apices
  misc_feature: MA Experiment 20000443 PARAMETER Experiment Name: At_1uM_BR-BRZ__P Parameter: Treatment Value: 1uM BRZ vs. No Treatment
  misc_feature: MA Experiment ID: 20001248 Result: Up-regulated in Transcription
  misc_feature: MA Experiment 20001248 PARAMETER Experiment Name: At_Far-red-induction_P Parameter: Age (day) Value: 7
  misc_feature: MA Experiment 20001248 PARAMETER Experiment Name: At_Far-red-induction_P Parameter: Light Value: Far-red vs. White
  misc_feature: MA Experiment 20001248 PARAMETER Experiment Name: At_Far-red-induction_P Parameter: Organism Value: A. thaliana
  misc_feature: MA Experiment 20001248 PARAMETER Experiment Name: At_Far-red-induction_P Parameter: Plant Line Value: Columbia
  misc_feature: MA Experiment 20001248 PARAMETER Experiment Name: At_Far-red-induction_P Parameter: Timepoint (hr) Value: 4
  misc_feature: MA Experiment 20001248 PARAMETER Experiment Name: At_Far-red-induction_P Parameter: Tissue Value: Whole Plant
atggagatgttacttggtggacaagcaaccaatggagctcttcgttcaaagacgaagatagtttgtactcttggaccagcttcaagatcggtggagatgattgagaagcttctcaaggctggtatgaacgtagcccggttcaatttctcccatggttctcactcttaccatcaagaaactctcgataatctcagaaccgccatggacaacactggtatcctctgcgccgtcatgctcgacacaaagagtcctgtgatacgaaccgggtttctcaaagaaggcaaaccgatacagctaaagcaaggtcaagagatcaccatctcaattgattacaagatacaaggagattccaacactatctccatgagctacaagaaacttgcagaggatctcaaacctggtgacgtgatcctttgttcagacggaacaatctctctaaatgtcttgtcctgtgacaagtatctcggtcttgttcgttgccgatgcgagaactctgctcttcttggagaaagaaaaaacgttaatcttcctggaattgtagttgatctcccaacactcactgagaaagataaagaagatattatgcaatggggagttccgaacaaaatcgacattatcgctctctcttttgttcgtaaaggatctgacctaatccaagtaaggaaattacttggagagcactcaaagagcatcatgcttatgtcaaaggtggagaatcaagaaggagtaatgaatttcgataagatcctggagaattctgatgctttcatggtggctagaggagatcttgggatggagataccaatcgaaaagatgtttcttgctcagaaaacaatgatcaacaaggctaatgctcatgggaaaccagtggtcacagccacacagatgcttgaatccatgacagtctctcctcgcccgactagagctgaagctaccgacgtagcaaacgcggttcttgacgggacagattgcgttatgcttagcggagaaactgctgctggagctcaccctgagactgccgtgttaacaatgtcaaggatctgcaaagaagcagaggatttcatagattacgacattctccacaagaaaaccctaggaatggtttcgttaccgttatctccaatcgagagcttagctgcttcagctgtttcgactgcgcggagtgttttcgcgtccgcgatcgttgttctcactagaggcggttacacggcggagcttgtggctaaatacaggccaagcgttccgattctgtcggtgattatgccagagattgctgaatgctcggactcggtagctcatgtggcgagacgtggtttgatttaccgtgggattattccggtggtgggatgttcagctagagattcaacggaggagatgattagattagctataggatttgccaagacgaagggaatttgtaagactggagattccattgtggctttgcacaagattgatggttcatctattgtcaggatagtgagcgtcgagtaa

SEQ ID NO: 83862 - protein, 497 aa, Arabidopsis thaliana
  peptide (1)..(497): Ceres Seq. ID no. 12672179
  misc_feature (375)..(495): Pfam Name: Pyruvate kinase, alpha/beta domain Pfam Description: Pyruvate kinase, alpha/beta domain
  misc_feature (1)..(497): Homolog of NCBI NO: 15230952 NR Description: putative pyruvate kinase; protein id: At3g25960.1 thaliana] >gi|9279601|dbj|BAB01059.1| pyruvate kinase
  misc_feature (1)..(497): Homolog of NCBI NO: 15228164 NR Description: pyruvate kinase - like protein; protein id:
  misc_feature (59)..(497): Homolog of NCBI NO: 15228196 NR Description: pyruvate kinase - like protein; protein id:
  misc_feature (1)..(40): Homolog of NCBI NO: 15228196 NR Description: pyruvate kinase - like protein; protein id:
  misc_feature (1)..(497): Homolog of NCBI NO: 15229214 NR Description: putative pyruvate kinase; protein id: At3g04050.1 thaliana] >gi|6223649|gb|AAF05863.1|AC011698_14 putative pyruvate
  misc_feature (15)..(497): Homolog of NCBI NO: 15241190 NR Description: pyruvate kinase; protein id: At5g56350.1, by cDNA: 31580., supported by cDNA: gi_15450941, supported by gi_17978780 [Arabidopsis thaliana] >gi|10177833|dbj|BAB11262.1|
  misc_feature (15)..(497): Homolog of NCBI NO: 2497543 NR Description: Pyruvate kinase, cytosolic isozyme
  misc_feature (15)..(497): Homolog of NCBI NO: 15236190 NR Description: pyruvate kinase like protein; protein id: [Arabidopsis thaliana] >gi|4033431|sp|O65595|KPYC_ARATH Probable kinase, cytosolic isozyme (PK) >gi|7434442|pir||T05065 pyruvate
MEMLLGGQATNGALRSKTKIVCTLGPASRSVEMIEKLLKAGMNVARFNFSHGSHSYHQETLDNLRTAMDNTGILCAVMLDTKSPVIRTGFLKEGKPIQLKQGQEITISIDYKIQGDSNTISMSYKKLAEDLKPGDVILCSDGTISLNVLSCDKYLGLVRCRCENSALLGERKNVNLPGIVVDLPTLTEKDKEDIMQWGVPNKIDIIALSFVRKGSDLIQVRKLLGEHSKSIMLMSKVENQEGVMNFDKILENSDAFMVARGDLGMEIPIEKMFLAQKTMINKANAHGKPVVTATQMLESMTVSPRPTRAEATDVANAVLDGTDCVMLSGETAAGAHPETAVLTMSRICKEAEDFIDYDILHKKTLGMVSLPLSPIESLAASAVSTARSVFASAIVVLTRGGYTAELVAKYRPSVPILSVIMPEIAECSDSVAHVARRGLIYRGIIPVVGCSARDSTEEMIRLAIGFAKTKGICKTGDSIVALHKIDGSSIVRIVSVE

SEQ ID NO: 83863 - protein, 495 aa, Arabidopsis thaliana
  peptide (1)..(495): Ceres Seq. ID no. 12672180
  misc_feature (373)..(493): Pfam Name: Pyruvate kinase, alpha/beta domain Pfam Description: Pyruvate kinase, alpha/beta domain
  misc_feature (1)..(495): Homolog of NCBI NO: 15230952 NR Description: putative pyruvate kinase; protein id: At3g25960.1 thaliana] >gi|9279601|dbj|BAB01059.1| pyruvate kinase
  misc_feature (1)..(495): Homolog of NCBI NO: 15228164 NR Description: pyruvate kinase - like protein; protein id:
  misc_feature (57)..(495): Homolog of NCBI NO: 15228196 NR Description: pyruvate kinase - like protein; protein id:
  misc_feature (1)..(38): Homolog of NCBI NO: 15228196 NR Description: pyruvate kinase - like protein; protein id:
  misc_feature (1)..(495): Homolog of NCBI NO: 15229214 NR Description: putative pyruvate kinase; protein id: At3g04050.1 thaliana] >gi|6223649|gb|AAF05863.1|AC011698_14 putative pyruvate
  misc_feature (13)..(495): Homolog of NCBI NO: 15241190 NR Description: pyruvate kinase; protein id: At5g56350.1, by cDNA: 31580., supported by cDNA: gi_15450941, supported by gi_17978780 [Arabidopsis thaliana] >gi|10177833|dbj|BAB11262.1|
  misc_feature (13)..(495): Homolog of NCBI NO: 2497543 NR Description: Pyruvate kinase, cytosolic isozyme
  misc_feature (13)..(495): Homolog of NCBI NO: 15236190 NR Description: pyruvate kinase like protein; protein id: [Arabidopsis thaliana] >gi|4033431|sp|O65595|KPYC_ARATH Probable kinase, cytosolic isozyme (PK) >gi|7434442|pir||T05065 pyruvate
MLLGGQATNGALRSKTKIVCTLGPASRSVEMIEKLLKAGMNVARFNFSHGSHSYHQETLDNLRTAMDNTGILCAVMLDTKSPVIRTGFLKEGKPIQLKQGQEITISIDYKIQGDSNTISMSYKKLAEDLKPGDVILCSDGTISLNVLSCDKYLGLVRCRCENSALLGERKNVNLPGIVVDLPTLTEKDKEDIMQWGVPNKIDIIALSFVRKGSDLIQVRKLLGEHSKSIMLMSKVENQEGVMNFDKILENSDAFMVARGDLGMEIPIEKMFLAQKTMINKANAHGKPVVTATQMLESMTVSPRPTRAEATDVANAVLDGTDCVMLSGETAAGAHPETAVLTMSRICKEAEDFIDYDILHKKTLGMVSLPLSPIESLAASAVSTARSVFASAIVVLTRGGYTAELVAKYRPSVPILSVIMPEIAECSDSVAHVARRGLIYRGIIPVVGCSARDSTEEMIRLAIGFAKTKGICKTGDSIVALHKIDGSSIVRIVSVE

SEQ ID NO: 83864 - protein, 465 aa, Arabidopsis thaliana
  peptide (1)..(465): Ceres Seq. ID no. 12672181
  misc_feature (343)..(463): Pfam Name: Pyruvate kinase, alpha/beta domain Pfam Description: Pyruvate kinase, alpha/beta domain
  misc_feature (1)..(465): Homolog of NCBI NO: 15230952 NR Description: putative pyruvate kinase; protein id: At3g25960.1 thaliana] >gi|9279601|dbj|BAB01059.1| pyruvate kinase
  misc_feature (1)..(465): Homolog of NCBI NO: 15228164 NR Description: pyruvate kinase - like protein; protein id:
  misc_feature (27)..(465): Homolog of NCBI NO: 15228196 NR Description: pyruvate kinase - like protein; protein id:
  misc_feature (1)..(465): Homolog of NCBI NO: 15229214 NR Description: putative pyruvate kinase; protein id: At3g04050.1 thaliana] >gi|6223649|gb|AAF05863.1|AC011698_14 putative pyruvate
  misc_feature (1)..(465): Homolog of NCBI NO: 15241190 NR Description: pyruvate kinase; protein id: At5g56350.1, by cDNA: 31580., supported by cDNA: gi_15450941, supported by gi_17978780 [Arabidopsis thaliana] >gi|10177833|dbj|BAB11262.1|
  misc_feature (1)..(465): Homolog of NCBI NO: 2497543 NR Description: Pyruvate kinase, cytosolic isozyme
  misc_feature (1)..(465): Homolog of NCBI NO: 15236190 NR Description: pyruvate kinase like protein; protein id: [Arabidopsis thaliana] >gi|4033431|sp|O65595|KPYC_ARATH Probable kinase, cytosolic isozyme (PK) >gi|7434442|pir||T05065 pyruvate
MIEKLLKAGMNVARFNFSHGSHSYHQETLDNLRTAMDNTGILCAVMLDTKSPVIRTGFLKEGKPIQLKQGQEITISIDYKIQGDSNTISMSYKKLAEDLKPGDVILCSDGTISLNVLSCDKYLGLVRCRCENSALLGERKNVNLPGIVVDLPTLTEKDKEDIMQWGVPNKIDIIALSFVRKGSDLIQVRKLLGEHSKSIMLMSKVENQEGVMNFDKILENSDAFMVARGDLGMEIPIEKMFLAQKTMINKANAHGKPVVTATQMLESMTVSPRPTRAEATDVANAVLDGTDCVMLSGETAAGAHPETAVLTMSRICKEAEDFIDYDILHKKTLGMVSLPLSPIESLAASAVSTARSVFASAIVVLTRGGYTAELVAKYRPSVPILSVIMPEIAECSDSVAHVARRGLIYRGIIPVVGCSARDSTEEMIRLAIGFAKTKGICKTGDSIVALHKIDGSSIVRIVSVE

SEQ ID NO: 83865 - DNA, 2204 bp, Arabidopsis thaliana
  misc_feature (1)..(2204): Ceres Seq. ID no. 12672182
  misc_feature: MA Experiment ID: 20000227 Result: Down-regulated in Transcription
  misc_feature: MA Experiment 20000227 PARAMETER Experiment Name: At_Root-Tips-vs-Tops_P Parameter: Tissue Value: Root Tips vs. Root Tops
gttctctctttctctttctctcttctttgaattcccaaagtgattgaatcaaaaacttcgtttgattacaattcgatttcccccacacaaaaaaagagatcttgttttaatttcgcggcgagggttcggtttggctttcccgttgatcgcgttgttcttcttcttctttggtgattcaatttcttcaattcaatcaaattcgtatctttcttcttctttgataatgtttaggatttaggtttcgtaatttctgaaaaccctagtttagtttttgttcgagaaaaaagaaaaggaaaacaaaaaaaaaaaggaaaaatcaaatttattcaattcattctttttgtgttacccaaattcggttgttaatacgtctcaatttcgaatttcttttctagggttttttagggttccaaggaagctctcaaaatttctggtgcctagtatttttttgttgccatctgaaatcaagagtttcctttttctctccatagatctattaattcatctttcgattatccaaaaaaaaaaataactttttagtttatcttcggatctgatctatcttctttagggggttttgagtttttctagggattgtgtacaaaagagggatttttttggttttgttaggtttaaagtgtatatagagattaatagaaatggctttaaatttttcacatagacctttttcttctcatctatctgaggaaccaatgatgatagccaatgggaattggtgttcaagtttcgataatggaaggaagaatactggaggagatgcttcttctgttgatatacttgatgttttgccatctgatccgtttggtatggatatcaacaatactttcacggctattactggatggcttgaggatttggaggatgattataataaccaatatggaagaagaagaagagatgacatttggattggtgatggaaaccgtcagcagctgtttgctggattgagtttcttttggaacaatgcaatgcagtttcagagtagtggttacagttatggatcagagtcattgtttggtggggcgtttgatgggtctctgttttccacatgtaaattccctgaaagtagtggggaaaataatgggtttggaggggcattagatggtgatggatcttgtcatggtgctttcatatctgctagtagtgttgatgaggtattgagccatgagaatgcgaggaatggtgaagttgtaggaagtagtgatcgctgcaataatggagaagaggatgcgtatgttcatccagcgattggtttttgtctttatcacttgcgagggaaggatcttctttcagttagtatggtttgcaagtctttgcatactactgtttgtgatgacacgttactttggaagcatatccacatttgtcgaccgttgaatgagaagatcacggaagaggctctactgcatttaactgagagggctcagggtactatgcagtgtttgaggatcgtagattgctgtagaattactgatgattgtcttaagcgggtggtggcgcgcaaccgacaagtagtcaagattggtgtgcctggatgcacaaggataactatcgatggtattttgagcgtcttgagggatctgaagtctgcgggaaagcttcaagtgaagcatttacaacttcgtggcctctttggagtgactaaagatcactacgatgaactgattgacttgttgaacattgacaataaagtcaagcagactattcagaagccgcgtttttaccatagaggagaagcttgtgtgtcctgtgatgatgaccgggcactagatattgagatgtgcccaaagtgtcaaaattttaagcttgtgtatgactgtccagcagaagattgtaaagggaaaaagaaaggttctgaggaatgccgtgcttgttctctttgcatacagaggtgttatcattgtggtcggtgcatcattgacactgaatacgaagaaatgttttgtttagagcttttgtgtgctgtttgttcgaagccgacccctaagttaactctctaggtataaaattccatctgagcctttctcttctctatgattgaatgactcagtctccacggttcaatggagatgatcttcaactatctctagaacctttttttttttaaacaataaaaatatgttccatttcatatttgttgaacactcttatctttattattggagatctattaaaagtttgca

SEQ ID NO: 83866 - protein, 453 aa, Arabidopsis thaliana
  peptide (1)..(453): Ceres Seq. ID no. 12672183
  misc_feature (1)..(453): Homolog of NCBI NO: 18404757 NR Description: expressed protein; protein id: At3g26000.1, by cDNA: gi_16604357 [Arabidopsis thaliana] gb|AAD12709.1~gene_id:MPE11.17~similar to unknown protein
  misc_feature (1)..(453): Homolog of NCBI NO: 22655121 NR Description: expressed protein [Arabidopsis thaliana]
  misc_feature (92)..(446): Homolog of NCBI NO: 38345348 NR Description: OSJNBa0081L15.21 [Oryza sativa (japonica
  misc_feature (181)..(444): Homolog of NCBI NO: 18405307 NR Description: expressed protein; protein id: At3g27290.1, by cDNA: gi_16974557 [Arabidopsis thaliana] gene_id:K17E12.11~unknown protein [Arabidopsis thaliana]
  misc_feature (201)..(450): Homolog of NCBI NO: 38175497 NR Description: F-box protein family-like protein [Oryza sativa
  misc_feature (195)..(424): Homolog of NCBI NO: 21536590 NR Description: unknown [Arabidopsis thaliana]
  misc_feature (195)..(424): Homolog of NCBI NO: 18379265 NR Description: expressed protein; protein id: At2g01620.1, by cDNA: 104853. [Arabidopsis thaliana] >gi|25371193|pir||A84427
  misc_feature (276)..(450): Homolog of NCBI NO: 21536590 NR Description: unknown [Arabidopsis thaliana]
  misc_feature (276)..(450): Homolog of NCBI NO: 18379265 NR Description: expressed protein; protein id: At2g01620.1, by cDNA: 104853. [Arabidopsis thaliana] >gi|25371193|pir||A84427
MALNFSHRPFSSHLSEEPMMIANGNWCSSFDNGRKNTGGDASSVDILDVLPSDPFGMDINNTFTAITGWLEDLEDDYNNQYGRRRRDDIWIGDGNRQQLFAGLSFFWNNAMQFQSSGYSYGSESLFGGAFDGSLFSTCKFPESSGENNGFGGALDGDGSCHGAFISASSVDEVLSHENARNGEVVGSSDRCNNGEEDAYVHPAIGFCLYHLRGKDLLSVSMVCKSLHTTVCDDTLLWKHIHICRPLNEKITEEALLHLTERAQGTMQCLRIVDCCRITDDCLKRVVARNRQVVKIGVPGCTRITIDGILSVLRDLKSAGKLQVKHLQLRGLFGVTKDHYDELIDLLNIDNKVKQTIQKPRFYHRGEACVSCDDDRALDIEMCPKCQNFKLVYDCPAEDCKGKKKGSEECRACSLCIQRCYHCGRCIIDTEYEEMFCLELLCAVCSKPTPKLTL

SEQ ID NO: 83867 - protein, 435 aa, Arabidopsis thaliana
  peptide (1)..(435): Ceres Seq. ID no. 12672184
  misc_feature (1)..(435): Homolog of NCBI NO: 18404757 NR Description: expressed protein; protein id: At3g26000.1, by cDNA: gi_16604357 [Arabidopsis thaliana] gb|AAD12709.1~gene_id:MPE11.17~similar to unknown protein
  misc_feature (1)..(435): Homolog of NCBI NO: 22655121 NR Description: expressed protein [Arabidopsis thaliana]
  misc_feature (74)..(428): Homolog of NCBI NO: 38345348 NR Description: OSJNBa0081L15.21 [Oryza sativa (japonica
  misc_feature (163)..(426): Homolog of NCBI NO: 18405307 NR Description: expressed protein; protein id: At3g27290.1, by cDNA: gi_16974557 [Arabidopsis thaliana] gene_id:K17E12.11~unknown protein [Arabidopsis thaliana]
  misc_feature (183)..(432): Homolog of NCBI NO: 38175497 NR Description: F-box protein family-like protein [Oryza sativa
  misc_feature (177)..(406): Homolog of NCBI NO: 21536590 NR Description: unknown [Arabidopsis thaliana]
  misc_feature (177)..(406): Homolog of NCBI NO: 18379265 NR Description: expressed protein; protein id: At2g01620.1, by cDNA: 104853. [Arabidopsis thaliana] >gi|25371193|pir||A84427
  misc_feature (258)..(432): Homolog of NCBI NO: 21536590 NR Description: unknown [Arabidopsis thaliana]
  misc_feature (258)..(432): Homolog of NCBI NO: 18379265 NR Description: expressed protein; protein id: At2g01620.1, by cDNA: 104853. [Arabidopsis thaliana] >gi|25371193|pir||A84427
MMIANGNWCSSFDNGRKNTGGDASSVDILDVLPSDPFGMDINNTFTAITGWLEDLEDDYNNQYGRRRRDDIWIGDGNRQQLFAGLSFFWNNAMQFQSSGYSYGSESLFGGAFDGSLFSTCKFPESSGENNGFGGALDGDGSCHGAFISASSVDEVLSHENARNGEVVGSSDRCNNGEEDAYVHPAIGFCLYHLRGKDLLSVSMVCKSLHTTVCDDTLLWKHIHICRPLNEKITEEALLHLTERAQGTMQCLRIVDCCRITDDCLKRVVARNRQVVKIGVPGCTRITIDGILSVLRDLKSAGKLQVKHLQLRGLFGVTKDHYDELIDLLNIDNKVKQTIQKPRFYHRGEACVSCDDDRALDIEMCPKCQNFKLVYDCPAEDCKGKKKGSEECRACSLCIQRCYHCGRCIIDTEYEEMFCLELLCAVCSKPTPKLTL

SEQ ID NO: 83868 - protein, 434 aa, Arabidopsis thaliana
  peptide (1)..(434): Ceres Seq. ID no. 12672185
  misc_feature (1)..(434): Homolog of NCBI NO: 18404757 NR Description: expressed protein; protein id: At3g26000.1, by cDNA: gi_16604357 [Arabidopsis thaliana] gb|AAD12709.1~gene_id:MPE11.17~similar to unknown protein
  misc_feature (1)..(434): Homolog of NCBI NO: 22655121 NR Description: expressed protein [Arabidopsis thaliana]
  misc_feature (73)..(427): Homolog of NCBI NO: 38345348 NR Description: OSJNBa0081L15.21 [Oryza sativa (japonica
  misc_feature (162)..(425): Homolog of NCBI NO: 18405307 NR Description: expressed protein; protein id: At3g27290.1, by cDNA: gi_16974557 [Arabidopsis thaliana] gene_id:K17E12.11~unknown protein [Arabidopsis thaliana]
  misc_feature (182)..(431): Homolog of NCBI NO: 38175497 NR Description: F-box protein family-like protein [Oryza sativa
  misc_feature (176)..(405): Homolog of NCBI NO: 21536590 NR Description: unknown [Arabidopsis thaliana]
  misc_feature (176)..(405): Homolog of NCBI NO: 18379265 NR Description: expressed protein; protein id: At2g01620.1, by cDNA: 104853. [Arabidopsis thaliana] >gi|25371193|pir||A84427
  misc_feature (257)..(431): Homolog of NCBI NO: 21536590 NR Description: unknown [Arabidopsis thaliana]
  misc_feature (257)..(431): Homolog of NCBI NO: 18379265 NR Description: expressed protein; protein id: At2g01620.1, by cDNA: 104853. [Arabidopsis thaliana] >gi|25371193|pir||A84427
MIANGNWCSSFDNGRKNTGGDASSVDILDVLPSDPFGMDINNTFTAITGWLEDLEDDYNNQYGRRRRDDIWIGDGNRQQLFAGLSFFWNNAMQFQSSGYSYGSESLFGGAFDGSLFSTCKFPESSGENNGFGGALDGDGSCHGAFISASSVDEVLSHENARNGEVVGSSDRCNNGEEDAYVHPAIGFCLYHLRGKDLLSVSMVCKSLHTTVCDDTLLWKHIHICRPLNEKITEEALLHLTERAQGTMQCLRIVDCCRITDDCLKRVVARNRQVVKIGVPGCTRITIDGILSVLRDLKSAGKLQVKHLQLRGLFGVTKDHYDELIDLLNIDNKVKQTIQKPRFYHRGEACVSCDDDRALDIEMCPKCQNFKLVYDCPAEDCKGKKKGSEECRACSLCIQRCYHCGRCIIDTEYEEMFCLELLCAVCSKPTPKLTL

SEQ ID NO: 83869 - DNA, 1509 bp, Arabidopsis thaliana
  misc_feature (1)..(1509): Ceres Seq. ID no. 12672190
  misc_feature: MA Experiment ID: 20001450 Result: Up-regulated in Transcription
  misc_feature: MA Experiment 20001450 PARAMETER Experiment Name: At_Far-red-induction_P Parameter: Age (day) Value: 7
  misc_feature: MA Experiment 20001450 PARAMETER Experiment Name: At_Far-red-induction_P Parameter: Light Value: Far-red vs. White
  misc_feature: MA Experiment 20001450 PARAMETER Experiment Name: At_Far-red-induction_P Parameter: Organism Value: A. thaliana
  misc_feature: MA Experiment 20001450 PARAMETER Experiment Name: At_Far-red-induction_P Parameter: Plant Line Value: Columbia
  misc_feature: MA Experiment 20001450 PARAMETER Experiment Name: At_Far-red-induction_P Parameter: Timepoint (hr) Value: 8
  misc_feature: MA Experiment 20001450 PARAMETER Experiment Name: At_Far-red-induction_P Parameter: Tissue Value: Whole Plant
atggcaatctctttgctctgtctttttctcatcaccttcgtttcgttaaccattgttggctgcaagatcaaacgctctatatggaatcttcccccaagccctcctaagttaccggtcatcggaaacttacaccaagttggagaattgcctcacaggtcatttcgacgtctagccgaaagaaccggacatgttatgcttcttcacttagggtttgtccctgtaactgttatctcatcgagagaagcagctgaagaagttcttagaactcatgacctagactgttgcagcaggcctaaccttgtggggtctaggctaatctctcggggttttaaagatctcaattttactccatatggtgaagagtggaaggagcgacgtaggttcttggttggtgagcttttctgttctaaaaagcttcagtcttttatatatatcaaagaagtagaatgtaactttctggtcaagaaactgtcggaatcagcagtggatcaatctccagtcgatttgagcaaaacccttttctggctagctgcgagtatcctgtttagagttgcttttggacagagtttccacgagagtgagtttaccgatacagacaagatcgatgaacttgtatttgaaaccgagacagctcaaggtagtttcacttgctctgatttcttccctatcgccggacttggatggcttgttgactggatttccggacaacacaagaggctcaacgatgttttcctcaagctcgatgctctgttacagcatgtgattgatgatcattcaaaccctggaagatcgaaagatcacaaagatattgtcgatgtgatgttggatgtgatgcataaacaaggcaaagatgattctttgaggctcacaatagatcatattaaggggcttctcacgaatataataatcgcagggatagacacaggagctctgaccatgatatggacaatgacagagctcgctagaaaccccgaaataatgaagaaagttcaaggcgagatccgagatcgccttggcaacaatagggagagaattaccaaagaagatcttgataaagttcctttcttgaacttggtgatcaaggaaacattcagattacacccagtagctcctcttttgctcccacgggaaacaatggctcacgtcaaggttcaaggctatgatattcctcccaagagacggatcttggtcaacgcttgggcgataggaagagatcctaaactatggactgacccggaagagtttaagcccgagaggtttatcgatagccctgtggactatagaggacaacattttgagctcttaccgttcgggtctggacgaaggatatgtcccgggatggcgatggggatggctactctggaattgggactcttgaacttactttacttcttcgattggaagttgcctgatgggatgtcacataaagatatcgatactgaagaagctggtactcttacagtcgttaagaaagtacatctaaagcttgttccagttcgagttccatga

SEQ ID NO: 83870 - protein, 502 aa, Arabidopsis thaliana
  peptide (1)..(502): Ceres Seq. ID no. 12672191
  misc_feature (31)..(496): Pfam Name: Cytochrome P450 Pfam Description: Cytochrome P450
  misc_feature (1)..(502): Homolog of NCBI NO: 15231517 NR Description: cytochrome p450 family; protein id: At3g26160.1 thaliana] >gi|13878388|sp|Q9LTM6|C72H_ARATH Cytochrome P450 71B17
  misc_feature (1)..(501): Homolog of NCBI NO: 15231516 NR Description: cytochrome p450 family; protein id: At3g26150.1 thaliana] >gi|13878389|sp|Q9LTM7|C72G_ARATH Cytochrome P450 71B16
  misc_feature (1)..(501): Homolog of NCBI NO: 15231520 NR Description: cytochrome p450 family; protein id: At3g26170.1, by cDNA: 262802. [Arabidopsis thaliana] Cytochrome P450 71B19 >gi|11994436|dbj|BAB02438.1| cytochrome
  misc_feature (1)..(501): Homolog of NCBI NO: 21554748 NR Description: cytochrome P450, putative [Arabidopsis thaliana]
  misc_feature (1)..(501): Homolog of NCBI NO: 15231522 NR Description: cytochrome p450 family; protein id: At3g26180.1, by cDNA: gi_15810462, supported by cDNA: gi_16226473 [Arabidopsis >gi|13878386|sp|Q9LTM3|C72K_ARATH Cytochrome P450 71B20
  misc_feature (1)..(501): Homolog of NCBI NO: 16226474 NR Description: AT3g26180/MTC11_8 [Arabidopsis thaliana]
  misc_feature (34)..(252): Homolog of NCBI NO: 11994435 NR Description: cytochrome P450 [Arabidopsis thaliana]
  misc_feature (300)..(500): Homolog of NCBI NO: 11994435 NR Description: cytochrome P450 [Arabidopsis thaliana]
  misc_feature (5)..(500): Homolog of NCBI NO: 15222174 NR Description: cytochrome p450 family; protein id: At1g13080.1, by cDNA: gi_3164139 [Arabidopsis thaliana]
  misc_feature (3)..(499): Homolog of NCBI NO: 15222182 NR Description: cytochrome p450 family; protein id: At1g13110.1, by cDNA: gi_18087622 [Arabidopsis thaliana]
MAISLLCLFLITFVSLTIVGCKIKRSIWNLPPSPPKLPVIGNLHQVGELPHRSFRRLAERTGHVMLLHLGFVPVTVISSREAAEEVLRTHDLDCCSRPNLVGSRLISRGFKDLNFTPYGEEWKERRRFLVGELFCSKKLQSFIYIKEVECNFLVKKLSESAVDQSPVDLSKTLFWLAASILFRVAFGQSFHESEFTDTDKIDELVFETETAQGSFTCSDFFPIAGLGWLVDWISGQHKRLNDVFLKLDALLQHVIDDHSNPGRSKDHKDIVDVMLDVMHKQGKDDSLRLTIDHIKGLLTNIIIAGIDTGALTMIWTMTELARNPEIMKKVQGEIRDRLGNNRERITKEDLDKVPFLNLVIKETFRLHPVAPLLLPRETMAHVKVQGYDIPPKRRILVNAWAIGRDPKLWTDPEEFKPERFIDSPVDYRGQHFELLPFGSGRRICPGMAMGMATLELGLLNLLYFFDWKLPDGMSHKDIDTEEAGTLTVVKKVHLKLVPVRVP

SEQ ID NO: 83871 - protein, 438 aa, Arabidopsis thaliana
  peptide (1)..(438): Ceres Seq. ID no. 12672192
  misc_feature (1)..(432): Pfam Name: Cytochrome P450 Pfam Description: Cytochrome P450
  misc_feature (1)..(438): Homolog of NCBI NO: 15231517 NR Description: cytochrome p450 family; protein id: At3g26160.1 thaliana] >gi|13878388|sp|Q9LTM6|C72H_ARATH Cytochrome P450 71B17
  misc_feature (1)..(437): Homolog of NCBI NO: 15231516 NR Description: cytochrome p450 family; protein id: At3g26150.1 thaliana] >gi|13878389|sp|Q9LTM7|C72G_ARATH Cytochrome P450 71B16
  misc_feature (1)..(437): Homolog of NCBI NO: 15231520 NR Description: cytochrome p450 family; protein id: At3g26170.1, by cDNA: 262802. [Arabidopsis thaliana] Cytochrome P450 71B19 >gi|11994436|dbj|BAB02438.1| cytochrome
  misc_feature (1)..(437): Homolog of NCBI NO: 21554748 NR Description: cytochrome P450, putative [Arabidopsis thaliana]
  misc_feature (1)..(437): Homolog of NCBI NO: 15231522 NR Description: cytochrome p450 family; protein id: At3g26180.1, by cDNA: gi_15810462, supported by cDNA: gi_16226473 [Arabidopsis >gi|13878386|sp|Q9LTM3|C72K_ARATH Cytochrome P450 71B20
  misc_feature (1)..(437): Homolog of NCBI NO: 16226474 NR Description: AT3g26180/MTC11_8 [Arabidopsis thaliana]
  misc_feature (1)..(188): Homolog of NCBI NO: 11994435 NR Description: cytochrome P450 [Arabidopsis thaliana]
  misc_feature (236)..(436): Homolog of NCBI NO: 11994435 NR Description: cytochrome P450 [Arabidopsis thaliana]
  misc_feature (1)..(436): Homolog of NCBI NO: 15222174 NR Description: cytochrome p450 family; protein id: At1g13080.1, by cDNA: gi_3164139 [Arabidopsis thaliana]
  misc_feature (1)..(435): Homolog of NCBI NO: 15222182 NR Description: cytochrome p450 family; protein id: At1g13110.1, by cDNA: gi_18087622 [Arabidopsis thaliana]
MLLHLGFVPVTVISSREAAEEVLRTHDLDCCSRPNLVGSRLISRGFKDLNFTPYGEEWKERRRFLVGELFCSKKLQSFIYIKEVECNFLVKKLSESAVDQSPVDLSKTLFWLAASILFRVAFGQSFHESEFTDTDKIDELVFETETAQGSFTCSDFFPIAGLGWLVDWISGQHKRLNDVFLKLDALLQHVIDDHSNPGRSKDHKDIVDVMLDVMHKQGKDDSLRLTIDHIKGLLTNIIIAGIDTGALTMIWTMTELARNPEIMKKVQGEIRDRLGNNRERITKEDLDKVPFLNLVIKETFRLHPVAPLLLPRETMAHVKVQGYDIPPKRRILVNAWAIGRDPKLWTDPEEFKPERFIDSPVDYRGQHFELLPFGSGRRICPGMAMGMATLELGLLNLLYFFDWKLPDGMSHKDIDTEEAGTLTVVKKVHLKLVPVRVP

SEQ ID NO: 83872 - DNA, 1773 bp, Arabidopsis thaliana
  misc_feature (1)..(1773): Ceres Seq. ID no. 12672193
  misc_feature: MA Experiment ID: 20000166 Result: Down-regulated in Transcription
  misc_feature: MA Experiment 20000166 PARAMETER Experiment Name: At_100uM_ABA_P Parameter: Age (day) Value: 14
  misc_feature: MA Experiment 20000166 PARAMETER Experiment Name: At_100uM_ABA_P Parameter: Organism Value: A. thaliana
  misc_feature: MA Experiment 20000166 PARAMETER Experiment Name: At_100uM_ABA_P Parameter: Plant Line Value: WS
  misc_feature: MA Experiment 20000166 PARAMETER Experiment Name: At_100uM_ABA_P Parameter: Timepoint (hr) Value: 1
  misc_feature: MA Experiment 20000166 PARAMETER Experiment Name: At_100uM_ABA_P Parameter: Tissue Value: Aerial
  misc_feature: MA Experiment 20000166 PARAMETER Experiment Name: At_100uM_ABA_P Parameter: Treatment Value: 100uM ABA vs. No Treatment
  misc_feature: MA Experiment ID: 20000169 Result: Down-regulated in Transcription
  misc_feature: MA Experiment 20000169 PARAMETER Experiment Name: At_100uM_ABA_P Parameter: Age (day) Value: 14
  misc_feature: MA Experiment 20000169 PARAMETER Experiment Name: At_100uM_ABA_P Parameter: Organism Value: A. thaliana
  misc_feature: MA Experiment 20000169 PARAMETER Experiment Name: At_100uM_ABA_P Parameter: Plant Line Value: WS
  misc_feature: MA Experiment 20000169 PARAMETER Experiment Name: At_100uM_ABA_P Parameter: Timepoint (hr) Value: 6
  misc_feature: MA Experiment 20000169 PARAMETER Experiment Name: At_100uM_ABA_P Parameter: Tissue Value: Aerial
  misc_feature: MA Experiment 20000169 PARAMETER Experiment Name: At_100uM_ABA_P Parameter: Treatment Value: 100uM ABA vs. No Treatment
  misc_feature: MA Experiment ID: 20000171 Result: Down-regulated in Transcription
  misc_feature: MA Experiment 20000171 PARAMETER Experiment Name: At_42deg_Heat_P Parameter: Age (day) Value: 14
  misc_feature: MA Experiment 20000171 PARAMETER Experiment Name: At_42deg_Heat_P Parameter: Organism Value: A. thaliana
  misc_feature: MA Experiment 20000171 PARAMETER Experiment Name: At_42deg_Heat_P Parameter: Plant Line Value: WS
  misc_feature: MA Experiment 20000171 PARAMETER Experiment Name: At_42deg_Heat_P Parameter: Temperature (deg C) Value: 42 vs. 22
  misc_feature: MA Experiment 20000171 PARAMETER Experiment Name: At_42deg_Heat_P Parameter: Timepoint (hr) Value: 1
  misc_feature: MA Experiment 20000171 PARAMETER Experiment Name: At_42deg_Heat_P Parameter: Tissue Value: Aerial
  misc_feature: MA Experiment ID: 20000180 Result: Down-regulated in Transcription
  misc_feature: MA Experiment 20000180 PARAMETER Experiment Name: At_Germinating_Seeds_P Parameter: Age (hr) Value: 24 vs. 0
  misc_feature: MA Experiment 20000180 PARAMETER Experiment Name: At_Germinating_Seeds_P Parameter: Tissue Value: Germinating Seeds
  misc_feature: MA Experiment ID: 20000184 Result: Down-regulated in Transcription
  misc_feature: MA Experiment 20000184 PARAMETER Experiment Name: At_Shoots__P Parameter: Age (day) Value: 7
  misc_feature: MA Experiment 20000184 PARAMETER Experiment Name: At_Shoots__P Parameter: Tissue Value: Shoots vs. Whole Plant
  misc_feature: MA Experiment ID: 20000234 Result: Down-regulated in Transcription
  misc_feature: MA Experiment 20000234 PARAMETER Experiment Name: At_Siliques_P Parameter: Age (day) Value: 21
  misc_feature: MA Experiment 20000234 PARAMETER Experiment Name: At_Siliques_P Parameter: Organism Value: A. thaliana
  misc_feature: MA Experiment 20000234 PARAMETER Experiment Name: At_Siliques_P Parameter: Plant Line Value: WS
  misc_feature: MA Experiment 20000234 PARAMETER Experiment Name: At_Siliques_P Parameter: Tissue Value: Less Than 5mm Siliques vs. Whole Plant
  misc_feature: MA Experiment ID: 20000235 Result: Down-regulated in Transcription
  misc_feature: MA Experiment 20000235 PARAMETER Experiment Name: At_Siliques_P Parameter: Age (day) Value: 21
  misc_feature: MA Experiment 20000235 PARAMETER Experiment Name: At_Siliques_P Parameter: Organism Value: A. thaliana
  misc_feature: MA Experiment 20000235 PARAMETER Experiment Name: At_Siliques_P Parameter: Plant Line Value: WS
  misc_feature: MA Experiment 20000235 PARAMETER Experiment Name: At_Siliques_P Parameter: Tissue Value: 5-10mm Siliques vs. Whole Plant
  misc_feature: MA Experiment ID: 20000264 Result: Down-regulated in Transcription
  misc_feature: MA Experiment 20000264 PARAMETER Experiment Name: At_Open_Flower_P Parameter: Age (day) Value: 21
  misc_feature: MA Experiment 20000264 PARAMETER Experiment Name: At_Open_Flower_P Parameter: Plant Line Value: WS
  misc_feature: MA Experiment 20000264 PARAMETER Experiment Name: At_Open_Flower_P Parameter: Tissue Value: Open Flower vs. Whole Plant
  misc_feature: MA Experiment ID: 20000265 Result: Down-regulated in Transcription
  misc_feature: MA Experiment 20000265 PARAMETER Experiment Name: At_Open_Flower_P Parameter: Age (day) Value: 21
  misc_feature: MA Experiment 20000265 PARAMETER Experiment Name: At_Open_Flower_P Parameter: Plant Line Value: WS
  misc_feature: MA Experiment 20000265 PARAMETER Experiment Name: At_Open_Flower_P Parameter: Tissue Value: Closed Flower vs. Whole Plant
  misc_feature: MA Experiment ID: 20000438 Result: Down-regulated in Transcription
  misc_feature: MA Experiment 20000438 PARAMETER Experiment Name: At_Shoots__P Parameter: Age (day) Value: 14
  misc_feature: MA Experiment 20000438 PARAMETER Experiment Name: At_Shoots__P Parameter: Tissue Value: Shoots vs. Whole Plant
  misc_feature: MA Experiment ID: 20000439 Result: Down-regulated in Transcription
  misc_feature: MA Experiment 20000439 PARAMETER Experiment Name: At_Roots__P Parameter: Age (day) Value: 14 vs. 21
  misc_feature: MA Experiment 20000439 PARAMETER Experiment Name: At_Roots__P Parameter: Organism Value: A. thaliana
  misc_feature: MA Experiment 20000439 PARAMETER Experiment Name: At_Roots__P Parameter: Tissue Value: Roots vs. Whole Plant
  misc_feature: MA Experiment ID: 20000441 Result: Up-regulated in Transcription
  misc_feature: MA Experiment 20000441 PARAMETER Experiment Name: At_1uM_BR-BRZ__P Parameter: Tissue Value: Shoot Apices
  misc_feature: MA Experiment 20000441 PARAMETER Experiment Name: At_1uM_BR-BRZ__P Parameter: Treatment Value: 1uM BR vs. No Treatment
  misc_feature: MA Experiment ID: 20000443 Result: Up-regulated in Transcription
  misc_feature: MA Experiment 20000443 PARAMETER Experiment Name: At_1uM_BR-BRZ__P Parameter: Tissue Value: Shoot Apices
  misc_feature: MA Experiment 20000443 PARAMETER Experiment Name: At_1uM_BR-BRZ__P Parameter: Treatment Value: 1uM BRZ vs. No Treatment
  misc_feature: MA Experiment ID: 20000453 Result: Down-regulated in Transcription
  misc_feature: MA Experiment 20000453 PARAMETER Experiment Name: At_100uM_ABA_P Parameter: Age (day) Value: 15
  misc_feature: MA Experiment 20000453 PARAMETER Experiment Name: At_100uM_ABA_P Parameter: Organism Value: A. thaliana
  misc_feature: MA Experiment 20000453 PARAMETER Experiment Name: At_100uM_ABA_P Parameter: Plant Line Value: WS
  misc_feature: MA Experiment 20000453 PARAMETER Experiment Name: At_100uM_ABA_P Parameter: Timepoint (hr) Value: 24
  misc_feature: MA Experiment 20000453 PARAMETER Experiment Name: At_100uM_ABA_P Parameter: Tissue Value: Aerial
  misc_feature: MA Experiment 20000453 PARAMETER Experiment Name: At_100uM_ABA_P Parameter: Treatment Value: 100uM ABA vs. No Treatment
  misc_feature: MA Experiment ID: 20000460 Result: Down-regulated in Transcription
  misc_feature: MA Experiment 20000460 PARAMETER Experiment Name: At_10percent_PEG_P Parameter: Age (day) Value: 12
  misc_feature: MA Experiment 20000460 PARAMETER Experiment Name: At_10percent_PEG_P Parameter: Organism Value: A. thaliana
  misc_feature: MA Experiment 20000460 PARAMETER Experiment Name: At_10percent_PEG_P Parameter: Plant Line Value: WS
  misc_feature: MA Experiment 20000460 PARAMETER Experiment Name: At_10percent_PEG_P Parameter: Timepoint (day) Value: 12
  misc_feature: MA Experiment 20000460 PARAMETER Experiment Name: At_10percent_PEG_P Parameter: Tissue Value: Whole Plant
  misc_feature: MA Experiment 20000460 PARAMETER Experiment Name: At_10percent_PEG_P Parameter: Treatment Value: 10percent PEG vs. No Treatment
  misc_feature: MA Experiment ID: 20000527 Result: Down-regulated in Transcription
  misc_feature: MA Experiment 20000527 PARAMETER Experiment Name: At_10percent_PEG_P Parameter: Age (day) Value: 20
  misc_feature: MA Experiment 20000527 PARAMETER Experiment Name: At_10percent_PEG_P Parameter: Organism Value: A. thaliana
  misc_feature: MA Experiment 20000527 PARAMETER Experiment Name: At_10percent_PEG_P Parameter: Plant Line Value: WS
  misc_feature: MA Experiment 20000527 PARAMETER Experiment Name: At_10percent_PEG_P Parameter: Timepoint (day) Value: 20
  misc_feature: MA Experiment 20000527 PARAMETER Experiment Name: At_10percent_PEG_P Parameter: Tissue Value: Whole Plant
  misc_feature: MA Experiment 20000527 PARAMETER Experiment Name: At_10percent_PEG_P Parameter: Treatment Value: 10percent PEG vs. No Treatment
  misc_feature: MA Experiment ID: 20000606 Result: Up-regulated in Transcription
  misc_feature: MA Experiment 20000606 PARAMETER Experiment Name: At_CS8548_Mutant_P Parameter: Age (day) Value: 14
  misc_feature: MA Experiment 20000606 PARAMETER Experiment Name: At_CS8548_Mutant_P Parameter: Plant Line Value: CS8548 vs. wt
  misc_feature: MA Experiment 20000606 PARAMETER Experiment Name: At_CS8548_Mutant_P Parameter: Tissue Value: Whole Plant
  misc_feature: MA Experiment ID: 20000794 Result: Down-regulated in Transcription
  misc_feature: MA Experiment 20000794 PARAMETER Experiment Name: At_Petals_P Parameter: Age (day) Value: 23-25 days
  misc_feature: MA Experiment 20000794 PARAMETER Experiment Name: At_Petals_P Parameter: Plant Line Value: WS
  misc_feature: MA Experiment 20000794 PARAMETER Experiment Name: At_Petals_P Parameter: Tissue Value: Petals vs. Whole plant
  misc_feature: MA Experiment ID: 20001554 Result: Down-regulated in Transcription
  misc_feature: MA Experiment 20001554 PARAMETER Experiment Name: At_Drought_Soil_Dry_P Parameter: Age (day) Value: 21
  misc_feature: MA Experiment 20001554 PARAMETER Experiment Name: At_Drought_Soil_Dry_P Parameter: Organism Value: A. thaliana
  misc_feature: MA Experiment 20001554 PARAMETER Experiment Name: At_Drought_Soil_Dry_P Parameter: Plant Line Value: WS
  misc_feature: MA Experiment 20001554 PARAMETER Experiment Name: At_Drought_Soil_Dry_P Parameter: Post Timepoint (hr) Value: None
  misc_feature: MA Experiment 20001554 PARAMETER Experiment Name: At_Drought_Soil_Dry_P Parameter: Post-Treatment Value: None
  misc_feature: MA Experiment 20001554 PARAMETER Experiment Name: At_Drought_Soil_Dry_P Parameter: Timepoint (day) Value: 7
  misc_feature: MA Experiment 20001554 PARAMETER Experiment Name: At_Drought_Soil_Dry_P Parameter: Treatment Value: Drought vs. No Drought
  misc_feature: MA Experiment ID: 20001557 Result: Up-regulated in Transcription
  misc_feature: MA Experiment 20001557 PARAMETER Experiment Name: At_Drought_Soil_Dry_P Parameter: Age (day) Value: 27
  misc_feature: MA Experiment 20001557 PARAMETER Experiment Name: At_Drought_Soil_Dry_P Parameter: Organism Value: A. thaliana
  misc_feature: MA Experiment 20001557 PARAMETER Experiment Name: At_Drought_Soil_Dry_P Parameter: Plant Line Value: WS
  misc_feature: MA Experiment 20001557 PARAMETER Experiment Name: At_Drought_Soil_Dry_P Parameter: Post Timepoint (hr) Value: 3
  misc_feature: MA Experiment 20001557 PARAMETER Experiment Name: At_Drought_Soil_Dry_P Parameter: Post-Treatment Value: Re-Water vs. No Drought
  misc_feature: MA Experiment 20001557 PARAMETER Experiment Name: At_Drought_Soil_Dry_P Parameter: Timepoint (day) Value: 13
  misc_feature: MA Experiment 20001557 PARAMETER Experiment Name: At_Drought_Soil_Dry_P Parameter: Treatment Value: Drought vs. No Drought
  misc_feature: MA Experiment ID: 20001558 Result: Up-regulated in Transcription
  misc_feature: MA Experiment 20001558 PARAMETER Experiment Name: At_Drought_Soil_Dry_P Parameter: Age (day) Value: 27
  misc_feature: MA Experiment 20001558 PARAMETER Experiment Name: At_Drought_Soil_Dry_P Parameter: Organism Value: A. thaliana
  misc_feature: MA Experiment 20001558 PARAMETER Experiment Name: At_Drought_Soil_Dry_P Parameter: Plant Line Value: WS
  misc_feature: MA Experiment 20001558 PARAMETER Experiment Name: At_Drought_Soil_Dry_P Parameter: Post Timepoint (hr) Value: 6
  misc_feature: MA Experiment 20001558 PARAMETER Experiment Name: At_Drought_Soil_Dry_P Parameter: Post-Treatment Value: Re-Water vs. No Drought
  misc_feature: MA Experiment 20001558 PARAMETER Experiment Name: At_Drought_Soil_Dry_P Parameter: Timepoint (day) Value: 13
  misc_feature: MA Experiment 20001558 PARAMETER Experiment Name: At_Drought_Soil_Dry_P Parameter: Treatment Value: Drought vs. No Drought
  misc_feature: MA Experiment ID: 20001904 Result: Up-regulated in Transcription
  misc_feature: MA Experiment 20001904 PARAMETER Experiment Name: At_Drought_Reproduction_P Parameter: Age (day) Value: 37
  misc_feature: MA Experiment 20001904 PARAMETER Experiment Name: At_Drought_Reproduction_P Parameter: Organism Value: A. thaliana
  misc_feature: MA Experiment 20001904 PARAMETER Experiment Name: At_Drought_Reproduction_P Parameter: Plant Line Value: WS
  misc_feature: MA Experiment 20001904 PARAMETER Experiment Name: At_Drought_Reproduction_P Parameter: Timepoint (day) Value: 7
  misc_feature: MA Experiment 20001904 PARAMETER Experiment Name: At_Drought_Reproduction_P Parameter: Tissue Value: Rosettes
  misc_feature: MA Experiment 20001904 PARAMETER Experiment Name: At_Drought_Reproduction_P Parameter: Treatment Value: Drought vs. No Drought
actccaaaacataaaacaataaccttagaaagaaaaaaaagagaaaaaaacagatcaaatcaagaatgtcgatctctctctatttccttttgctcttgcctctctttttaatcttcttcaaaaagctctcaccttctaaaggaaagcttcctcctggacctctaggtcttccgattatcgggaacttgcaccaacttggaaaatctctccatagatcttttcataaactttctcaaaactatggacccgtgatgtttctacatttcggtgtggtccctgtggttgtggtctccacaagagaagcagctgaagaagttctcaagactcatgatctcgagacttgtacccgaccaaagctaacagcgaccaaattgttttcttacaactacaaagacattggcttcgctcaatacggtgatgactggagagagatgaggaagcttgcgatgctcgagctttttagctcgaaaaagctcaaggctttcaggtatattagagaagaagagagtgaagtcctagtcaataaactctcgaaatctgctgagacacgaactatggtagacttgagaaaagctcttttctcttataccgctagtatcgtatgtagactcgcttttggacagaacttccatgagtgcgattttgtcgatatggataaagttgaagatcttgtgctcgaatctgagaccaatcttggctcattcgcgttcactgacttcttccccgcaggtcttgggtgggttatagaccggatctctggccaacattcggagttgcacaaagcctttgctagacttagtaatttctttcaacatgtgatcgatgatcacttgaagcccgggcaatctcaagatcattcagacatcattggtgtcatgttagatatgatcaataaagagagtaaagtcggttccttccaagtcacctacgaccatcttaaaggagtcatgtcggatgtgtttttagcgggagtgaacgcaggagcgatcacaatgatatgggcgatgacagagctagccagacatccgagagtgatgaagaaacttcaacaagagattcgagaaatactcggagacaacaaagaaaaaatcacggaacaagatctcgaaaaggttcactacttgaaacttgtgatcgaagaaacattcagattacatcctccagctcctctcttgctacctagagagacaatgtctgacttaaagattcaaggctacaatattcccaagaacacgatgatagagatcaatacttattcaataggacgcgatcctaattgctgggaaaaccctaacgatttcaacccggagagatttatcgatagccctgtcgaatataagggtcaacattacgagttgttgccttttggtgctggtcgcaggatttgtccaggaatggctacggggataactatcgtcgagctcggtttacttaatgttctttacttctttgattggagtttgcctgatggaatgaaaattgaagacatagacatggaagaagctggagctttcgtcgtcgccaagaaagtccctcttgagctgattccaactccacatcagtggtgaagttatgaagaggtgtaaataatctaataagatcaagattttctcttgcgatcggtttcatttttattatattgttatttgttacgttcatgagttgttgttatcagtagacatttgtatgttcattatgttttttgtttattttaatgttcattatgtttaattcatgtttgaaataaagaaacgtccgattgtgacattagtt

SEQ ID NO: 83873 - protein, 500 aa, Arabidopsis thaliana
  peptide (1)..(500): Ceres Seq. ID no. 12672194
  misc_feature (29)..(495): Pfam Name: Cytochrome P450 Pfam Description: Cytochrome P450
  misc_feature (1)..(500): Homolog of NCBI NO: 15231525 NR Description: cytochrome p450 family; protein id: At3g26200.1, by cDNA: gi_13430717 [Arabidopsis thaliana] Cytochrome P450 71B22 >gi|11994439|dbj|BAB02441.1| cytochrome
  misc_feature (1)..(498): Homolog of NCBI NO: 15231524 NR Description: cytochrome p450 family; protein id: At3g26190.1 thaliana] >gi|13878385|sp|Q9LTM2|C72L_ARATH Cytochrome P450 71B21
  misc_feature (1)..(500): Homolog of NCBI NO: 15229913 NR Description: cytochrome p450 family; protein id: At3g44250.1
  misc_feature (1)..(500): Homolog of NCBI NO: 15231782 NR Description: cytochrome P450 monooxygenase; protein id: supported by cDNA: gi_3164131 [Arabidopsis thaliana]
  misc_feature (2)..(496): Homolog of NCBI NO: 13878369 NR Description: CYTOCHROME P450 71B8
  misc_feature (1)..(496): Homolog of NCBI NO: 15231786 NR Description: cytochrome p450 family; protein id: At3g53300.1, by cDNA: gi_15810490 [Arabidopsis thaliana] Cytochrome P450 71B31 >gi|11249493|pir||T46176 probable
  misc_feature (1)..(496): Homolog of NCBI NO: 15810491 NR Description: putative cytochrome P450 protein [Arabidopsis
  misc_feature (63)..(500): Homolog of NCBI NO: 15724230 NR Description: AT3g53280/T4D2_200 [Arabidopsis thaliana]
  misc_feature (63)..(500): Homolog of NCBI NO: 22655216 NR Description: cytochrome P450 71B5 [Arabidopsis thaliana]
  misc_feature (72)..(496): Homolog of NCBI NO: 22327366 NR Description: similar to cytochrome p450 family; protein id:
MSISLYFLLLLPLFLIFFKKLSPSKGKLPPGPLGLPIIGNLHQLGKSLHRSFHKLSQNYGPVMFLHFGVVPVVVVSTREAAEEVLKTHDLETCTRPKLTATKLFSYNYKDIGFAQYGDDWREMRKLAMLELFSSKKLKAFRYIREEESEVLVNKLSKSAETRTMVDLRKALFSYTASIVCRLAFGQNFHECDFVDMDKVEDLVLESETNLGSFAFTDFFPAGLGWVIDRISGQHSELHKAFARLSNFFQHVIDDHLKPGQSQDHSDIIGVMLDMINKESKVGSFQVTYDHLKGVMSDVFLAGVNAGAITMIWAMTELARHPRVMKKLQQEIREILGDNKEKITEQDLEKVHYLKLVIEETFRLHPPAPLLLPRETMSDLKIQGYNIPKNTMIEINTYSIGRDPNCWENPNDFNPERFIDSPVEYKGQHYELLPFGAGRRICPGMATGITIVELGLLNVLYFFDWSLPDGMKIEDIDMEEAGAFVVAKKVPLELIPTPHQW

SEQ ID NO: 83874 - protein, 438 aa, Arabidopsis thaliana
  peptide (1)..(438): Ceres Seq. ID no. 12672195
  misc_feature (1)..(433): Pfam Name: Cytochrome P450 Pfam Description: Cytochrome P450
  misc_feature (1)..(438): Homolog of NCBI NO: 15231525 NR Description: cytochrome p450 family; protein id: At3g26200.1, by cDNA: gi_13430717 [Arabidopsis thaliana] Cytochrome P450 71B22 >gi|11994439|dbj|BAB02441.1| cytochrome
  misc_feature (1)..(436): Homolog of NCBI NO: 15231524 NR Description: cytochrome p450 family; protein id: At3g26190.1 thaliana] >gi|13878385|sp|Q9LTM2|C72L_ARATH Cytochrome P450 71B21
  misc_feature (1)..(438): Homolog of NCBI NO: 15229913 NR Description: cytochrome p450 family; protein id: At3g44250.1
  misc_feature (1)..(438): Homolog of NCBI NO: 15231782 NR Description: cytochrome P450 monooxygenase; protein id: supported by cDNA: gi_3164131 [Arabidopsis thaliana]
  misc_feature (1)..(434): Homolog of NCBI NO: 13878369 NR Description: CYTOCHROME P450 71B8
  misc_feature (1)..(434): Homolog of NCBI NO: 15231786 NR Description: cytochrome p450 family; protein id: At3g53300.1, by cDNA: gi_15810490 [Arabidopsis thaliana] Cytochrome P450 71B31 >gi|11249493|pir||T46176 probable
  misc_feature (1)..(434): Homolog of NCBI NO: 15810491 NR Description: putative cytochrome P450 protein [Arabidopsis
  misc_feature (1)..(438): Homolog of NCBI NO: 15724230 NR Description: AT3g53280/T4D2_200 [Arabidopsis thaliana]
  misc_feature (1)..(438): Homolog of NCBI NO: 22655216 NR Description: cytochrome P450 71B5 [Arabidopsis thaliana]
  misc_feature (10)..(434): Homolog of NCBI NO: 22327366 NR Description: similar to cytochrome p450 family; protein id:
MFLHFGVVPVVVVSTREAAEEVLKTHDLETCTRPKLTATKLFSYNYKDIGFAQYGDDWREMRKLAMLELFSSKKLKAFRYIREEESEVLVNKLSKSAETRTMVDLRKALFSYTASIVCRLAFGQNFHECDFVDMDKVEDLVLESETNLGSFAFTDFFPAGLGWVIDRISGQHSELHKAFARLSNFFQHVIDDHLKPGQSQDHSDIIGVMLDMINKESKVGSFQVTYDHLKGVMSDVFLAGVNAGAITMIWAMTELARHPRVMKKLQQEIREILGDNKEKITEQDLEKVHYLKLVIEETFRLHPPAPLLLPRETMSDLKIQGYNIPKNTMIEINTYSIGRDPNCWENPNDFNPERFIDSPVEYKGQHYELLPFGAGRRICPGMATGITIVELGLLNVLYFFDWSLPDGMKIEDIDMEEAGAFVVAKKVPLELIPTPHQW

SEQ ID NO: 83875 - protein, 378 aa, Arabidopsis thaliana
  peptide (1)..(378): Ceres Seq. ID no. 12672196
  misc_feature (1)..(373): Pfam Name: Cytochrome P450 Pfam Description: Cytochrome P450
  misc_feature (1)..(378): Homolog of NCBI NO: 15231525 NR Description: cytochrome p450 family; protein id: At3g26200.1, by cDNA: gi_13430717 [Arabidopsis thaliana] Cytochrome P450 71B22 >gi|11994439|dbj|BAB02441.1| cytochrome
  misc_feature (1)..(376): Homolog of NCBI NO: 15231524 NR Description: cytochrome p450 family; protein id: At3g26190.1 thaliana] >gi|13878385|sp|Q9LTM2|C72L_ARATH Cytochrome P450 71B21
  misc_feature (1)..(378): Homolog of NCBI NO: 15229913 NR Description: cytochrome p450 family; protein id: At3g44250.1
  misc_feature (1)..(378): Homolog of NCBI NO: 15231782 NR Description: cytochrome P450 monooxygenase; protein id: supported by cDNA: gi_3164131 [Arabidopsis thaliana]
  misc_feature (1)..(374): Homolog of NCBI NO: 13878369 NR Description: CYTOCHROME P450 71B8
  misc_feature (1)..(374): Homolog of NCBI NO: 15231786 NR Description: cytochrome p450 family; protein id: At3g53300.1, by cDNA: gi_15810490 [Arabidopsis thaliana] Cytochrome P450 71B31 >gi|11249493|pir||T46176 probable
  misc_feature (1)..(374): Homolog of NCBI NO: 15810491 NR Description: putative cytochrome P450 protein [Arabidopsis
  misc_feature (1)..(378): Homolog of NCBI NO: 15724230 NR Description: AT3g53280/T4D2_200 [Arabidopsis thaliana]
  misc_feature (1)..(378): Homolog of NCBI NO: 22655216 NR Description: cytochrome P450 71B5 [Arabidopsis thaliana]
  misc_feature (1)..(374): Homolog of NCBI NO: 22327366 NR Description: similar to cytochrome p450 family; protein id:
MRKLAMLELFSSKKLKAFRYIREEESEVLVNKLSKSAETRTMVDLRKALFSYTASIVCRLAFGQNFHECDFVDMDKVEDLVLESETNLGSFAFTDFFPAGLGWVIDRISGQHSELHKAFARLSNFFQHVIDDHLKPGQSQDHSDIIGVMLDMINKESKVGSFQVTYDHLKGVMSDVFLAGVNAGAITMIWAMTELARHPRVMKKLQQEIREILGDNKEKITEQDLEKVHYLKLVIEETFRLHPPAPLLLPRETMSDLKIQGYNIPKNTMIEINTYSIGRDPNCWENPNDFNPERFIDSPVEYKGQHYELLPFGAGRRICPGMATGITIVELGLLNVLYFFDWSLPDGMKIEDIDMEEAGAFVVAKKVPLELIPTPHQW

SEQ ID NO: 83876 - DNA, 1506 bp, Arabidopsis thaliana
  misc_feature (1)..(1506): Ceres Seq. ID no. 12672200
  misc_feature: MA Experiment ID: 20000184 Result: Down-regulated in Transcription
  misc_feature: MA Experiment 20000184 PARAMETER Experiment Name: At_Shoots__P Parameter: Age (day) Value: 7
  misc_feature: MA Experiment 20000184 PARAMETER Experiment Name: At_Shoots__P Parameter: Tissue Value: Shoots vs. Whole Plant
  misc_feature: MA Experiment ID: 20000234 Result: Down-regulated in Transcription
  misc_feature: MA Experiment 20000234 PARAMETER Experiment Name: At_Siliques_P Parameter: Age (day) Value: 21
  misc_feature: MA Experiment 20000234 PARAMETER Experiment Name: At_Siliques_P Parameter: Organism Value: A. thaliana
  misc_feature: MA Experiment 20000234 PARAMETER Experiment Name: At_Siliques_P Parameter: Plant Line Value: WS
  misc_feature: MA Experiment 20000234 PARAMETER Experiment Name: At_Siliques_P Parameter: Tissue Value: Less Than 5mm Siliques vs. Whole Plant
  misc_feature: MA Experiment ID: 20000235 Result: Down-regulated in Transcription
  misc_feature: MA Experiment 20000235 PARAMETER Experiment Name: At_Siliques_P Parameter: Age (day) Value: 21
  misc_feature: MA Experiment 20000235 PARAMETER Experiment Name: At_Siliques_P Parameter: Organism Value: A. thaliana
  misc_feature: MA Experiment 20000235 PARAMETER Experiment Name: At_Siliques_P Parameter: Plant Line Value: WS
  misc_feature: MA Experiment 20000235 PARAMETER Experiment Name: At_Siliques_P Parameter: Tissue Value: 5-10mm Siliques vs. Whole Plant
  misc_feature: MA Experiment ID: 20000452 Result: Down-regulated in Transcription
  misc_feature: MA Experiment 20000452 PARAMETER Experiment Name: At_CS6879_Shoots-Roots_P Parameter: Age (day) Value: 14
  misc_feature: MA Experiment 20000452 PARAMETER Experiment Name: At_CS6879_Shoots-Roots_P Parameter: Organism Value: A. thaliana
  misc_feature: MA Experiment 20000452 PARAMETER Experiment Name: At_CS6879_Shoots-Roots_P Parameter: Plant Line Value: CS6879 vs. WS
  misc_feature: MA Experiment 20000452 PARAMETER Experiment Name: At_CS6879_Shoots-Roots_P Parameter: Tissue Value: Shoots
  misc_feature: MA Experiment ID: 20000495 Result: Down-regulated in Transcription
  misc_feature: MA Experiment 20000495 PARAMETER Experiment Name: At_Guard_Cells_P Parameter: Harvest Date Value: 8/2/2002
  misc_feature: MA Experiment 20000495 PARAMETER Experiment Name: At_Guard_Cells_P Parameter: Organism Value: A. thaliana
  misc_feature: MA Experiment 20000495 PARAMETER Experiment Name: At_Guard_Cells_P Parameter: Tissue Value: Guard Cells vs. Leaves
  misc_feature: MA Experiment ID: 20000794 Result: Down-regulated in Transcription
  misc_feature: MA Experiment 20000794 PARAMETER Experiment Name: At_Petals_P Parameter: Age (day) Value: 23-25 days
  misc_feature: MA Experiment 20000794 PARAMETER Experiment Name: At_Petals_P Parameter: Plant Line Value: WS
  misc_feature: MA Experiment 20000794 PARAMETER Experiment Name: At_Petals_P Parameter: Tissue Value: Petals vs. Whole plant
  misc_feature: MA Experiment ID: 20001450 Result: Up-regulated in Transcription
  misc_feature: MA Experiment 20001450 PARAMETER Experiment Name: At_Far-red-induction_P Parameter: Age (day) Value: 7
  misc_feature: MA Experiment 20001450 PARAMETER Experiment Name: At_Far-red-induction_P Parameter: Light Value: Far-red vs. White
  misc_feature: MA Experiment 20001450 PARAMETER Experiment Name: At_Far-red-induction_P Parameter: Organism Value: A. thaliana
  misc_feature: MA Experiment 20001450 PARAMETER Experiment Name: At_Far-red-induction_P Parameter: Plant Line Value: Columbia
  misc_feature: MA Experiment 20001450 PARAMETER Experiment Name: At_Far-red-induction_P Parameter: Timepoint (hr) Value: 8
  misc_feature: MA Experiment 20001450 PARAMETER Experiment Name: At_Far-red-induction_P Parameter: Tissue Value: Whole Plant
  misc_feature: MA Experiment ID: 20001557 Result: Down-regulated in Transcription
  misc_feature: MA Experiment 20001557 PARAMETER Experiment Name: At_Drought_Soil_Dry_P Parameter: Age (day) Value: 27
  misc_feature: MA Experiment 20001557 PARAMETER Experiment Name: At_Drought_Soil_Dry_P Parameter: Organism Value: A. thaliana
  misc_feature: MA Experiment 20001557 PARAMETER Experiment Name: At_Drought_Soil_Dry_P Parameter: Plant Line Value: WS
  misc_feature: MA Experiment 20001557 PARAMETER Experiment Name: At_Drought_Soil_Dry_P Parameter: Post Timepoint (hr) Value: 3
  misc_feature: MA Experiment 20001557 PARAMETER Experiment Name: At_Drought_Soil_Dry_P Parameter: Post-Treatment Value: Re-Water vs. No Drought
  misc_feature: MA Experiment 20001557 PARAMETER Experiment Name: At_Drought_Soil_Dry_P Parameter: Timepoint (day) Value: 13
  misc_feature: MA Experiment 20001557 PARAMETER Experiment Name: At_Drought_Soil_Dry_P Parameter: Treatment Value: Drought vs. No Drought
  misc_feature: MA Experiment ID: 20001558 Result: Down-regulated in Transcription
  misc_feature: MA Experiment 20001558 PARAMETER Experiment Name: At_Drought_Soil_Dry_P Parameter: Age (day) Value: 27
  misc_feature: MA Experiment 20001558 PARAMETER Experiment Name: At_Drought_Soil_Dry_P Parameter: Organism Value: A. thaliana
  misc_feature: MA Experiment 20001558 PARAMETER Experiment Name: At_Drought_Soil_Dry_P Parameter: Plant Line Value: WS
  misc_feature: MA Experiment 20001558 PARAMETER Experiment Name: At_Drought_Soil_Dry_P Parameter: Post Timepoint (hr) Value: 6
  misc_feature: MA Experiment 20001558 PARAMETER Experiment Name: At_Drought_Soil_Dry_P Parameter: Post-Treatment Value: Re-Water vs. No Drought
  misc_feature: MA Experiment 20001558 PARAMETER Experiment Name: At_Drought_Soil_Dry_P Parameter: Timepoint (day) Value: 13
  misc_feature: MA Experiment 20001558 PARAMETER Experiment Name: At_Drought_Soil_Dry_P Parameter: Treatment Value: Drought vs. No Drought
  misc_feature: MA Experiment ID: 20001560 Result: Down-regulated in Transcription
  misc_feature: MA Experiment 20001560 PARAMETER Experiment Name: At_Drought_Soil_Dry_P Parameter: Age (day) Value: 28
  misc_feature: MA Experiment 20001560 PARAMETER Experiment Name: At_Drought_Soil_Dry_P Parameter: Organism Value: A. thaliana
  misc_feature: MA Experiment 20001560 PARAMETER Experiment Name: At_Drought_Soil_Dry_P Parameter: Plant Line Value: WS
  misc_feature: MA Experiment 20001560 PARAMETER Experiment Name: At_Drought_Soil_Dry_P Parameter: Post Timepoint (hr) Value: None
  misc_feature: MA Experiment 20001560 PARAMETER Experiment Name: At_Drought_Soil_Dry_P Parameter: Post-Treatment Value: None
  misc_feature: MA Experiment 20001560 PARAMETER Experiment Name: At_Drought_Soil_Dry_P Parameter: Timepoint (day) Value: 14
  misc_feature: MA Experiment 20001560 PARAMETER Experiment Name: At_Drought_Soil_Dry_P Parameter: Treatment Value: Drought vs. No Drought
atggcgattcttcaatctttcctattgcttctatcccttccctttctcttcacgttaatctacaccaagaagatgaaggaatcgaaacggaatcttcctcctggtccagcaaagcttccgatcgtcggaaacctacaccagctacaagggatggttcacagatgtcttcatgagctctccaagaaacacggaccagtgatgcatctccagctagggtttgtcccactggtcttgatctcatcgagtgaagcagctgaagaggctcttaaaacacatgacattgagtgttgtacgcgacctaacactaacgccgcaagggttttctcccgtaacaacaaaaacatcggccttggggcatacagtgatgaatggagagagctgcgtaaggttgcggttcgtgagtatttcagcgtaaaaaaggtacaatctttcaggtatgttagggaggaagagaatcacttgatggtcaagaaactgagagacttggctttgaagcaatctccggtggatttgagcaaaaccctcttttgcctagctgcaagtaccgtattcagacctgtctttggacagagtttctcagataacaagcatttcagcgaggaaaagatcgaagaactggtgtttgaagctcagaaaagtttaactttcaaattttctgatctttttcctattcctggtcttggatggtttataggctttgtgtcaggccaacataagggccttcacaaagtgttcatcgaggttgataattttcttaatcatatgattgacgatcatcaaaagcagaaccaacctcaagatcgttctgatatcgtcggctccctcttagatatgatacataatcaagaacaagataaatctttcaagctcaccattgatcatctcaagggaatcacccaagatatatttctggctgggatagacacaagtgccattaccatgatttgggcgatggcagaacttgttaacaacccgagagtcatgaagaaagttcaagacgagattcggtcttgcattggaataaaaaaggagagaatcgaggaagaagatgtcggtaagctacagtacttgaagcttgtgatcaaagaaaccttaagactacacccagcagctcctcttttacttccaagggaaacaatggctgatatcaagattcaaggctacgacattcctcgaaaaaccctccttttagttagcgcatggtcgttgggacgagatccgaaatactggaaaaatcctgaggagtttaacccggagaggtttatcgattgtcctgtggattacaaaggacatagctttgagtttttaccatttggttctggtaggaggttttgtccaggaatggcttcggcgattgcgaccattgaattgacgctcttgaatttgctttacttctttgactggaagttgcctgaggagatgaaagatatgaacatggaagaatctggtgatgtcacaattgttaagaaagttcctcttgagctgctcccggttctttatcattga

SEQ ID NO: 83877 - protein, 501 aa, Arabidopsis thaliana
  peptide (1)..(501): Ceres Seq. ID no. 12672201
  misc_feature (33)..(495): Pfam Name: Cytochrome P450 Pfam Description: Cytochrome P450
  misc_feature (1)..(501): Homolog of NCBI NO: 15231534 NR Description: cytochrome p450 family; protein id: At3g26270.1 thaliana] >gi|13878381|sp|Q9LTL2|C72P_ARATH Cytochrome P450 71B25
  misc_feature (1)..(499): Homolog of NCBI NO: 15231536 NR Description: cytochrome p450 family; protein id: At3g26280.1, by cDNA: gi_19699097, supported by cDNA: gi_3164135 [Arabidopsis >gi|11994449|dbj|BAB02451.1| cytochrome P450 [Arabidopsis
  misc_feature (1)..(499): Homolog of NCBI NO: 5915827 NR Description: Cytochrome P450 71B4 >gi|25282601|pir||T52171
  misc_feature (1)..(501): Homolog of NCBI NO: 15231527 NR Description: cytochrome p450 family; protein id: At3g26220.1, by cDNA: gi_3164133 [Arabidopsis thaliana] Cytochrome P450 71B3 >gi|11994441|dbj|BAB02443.1| cytochrome P450
  misc_feature (1)..(501): Homolog of NCBI NO: 25282600 NR Description: cytochrome P450 monooxygenase [imported] - thaliana >gi|3164134|dbj|BAA28534.1| cytochrome P450
  misc_feature (23)..(501): Homolog of NCBI NO: 17065192 NR Description: cytochrome P450 [Arabidopsis thaliana]
  misc_feature (1)..(501): Homolog of NCBI NO: 15231528 NR Description: cytochrome p450 family; protein id: At3g26230.1 thaliana] >gi|13878382|sp|Q9LTL8|C72O_ARATH Cytochrome P450 71B24
  misc_feature (1)..(497): Homolog of NCBI NO: 15231526 NR Description: cytochrome P450 family; protein id: At3g26210.1 thaliana] >gi|13878383|sp|Q9LTM0|C72N_ARATH Cytochrome P450 71B23
  misc_feature (1)..(498): Homolog of NCBI NO: 15231520 NR Description: cytochrome p450 family; protein id: At3g26170.1, by cDNA: 262802. [Arabidopsis thaliana] Cytochrome P450 71B19 >gi|11994436|dbj|BAB02438.1| cytochrome
  misc_feature (1)..(498): Homolog of NCBI NO: 21554748 NR Description: cytochrome P450, putative [Arabidopsis thaliana]
MAILQSFLLLLSLPFLFTLIYTKKMKESKRNLPPGPAKLPIVGNLHQLQGMVHRCLHELSKKHGPVMHLQLGFVPLVLISSSEAAEEALKTHDIECCTRPNTNAARVFSRNNKNIGLGAYSDEWRELRKVAVREYFSVKKVQSFRYVREEENHLMVKKLRDLALKQSPVDLSKTLFCLAASTVFRPVFGQSFSDNKHFSEEKIEELVFEAQKSLTFKFSDLFPIPGLGWFIGFVSGQHKGLHKVFIEVDNFLNHMIDDHQKQNQPQDRSDIVGSLLDMIHNQEQDKSFKLTIDHLKGITQDIFLAGIDTSAITMIWAMAELVNNPRVMKKVQDEIRSCIGIKKERIEEEDVGKLQYLKLVIKETLRLHPAAPLLLPRETMADIKIQGYDIPRKTLLLVSAWSLGRDPKYWKNPEEFNPERFIDCPVDYKGHSFEFLPFGSGRRFCPGMASAIATIELTLLNLLYFFDWKLPEEMKDMNMEESGDVTIVKKVPLELLPVLYH

SEQ ID NO: 83878 - protein, 477 aa, Arabidopsis thaliana
  peptide (1)..(477): Ceres Seq. ID no. 12672202
  misc_feature (9)..(471): Pfam Name: Cytochrome P450 Pfam Description: Cytochrome P450
  misc_feature (1)..(477): Homolog of NCBI NO: 15231534 NR Description: cytochrome p450 family; protein id: At3g26270.1 thaliana] >gi|13878381|sp|Q9LTL2|C72P_ARATH Cytochrome P450 71B25
  misc_feature (1)..(475): Homolog of NCBI NO: 15231536 NR Description: cytochrome p450 family; protein id: At3g26280.1, by cDNA: gi_19699097, supported by cDNA: gi_3164135 [Arabidopsis >gi|11994449|dbj|BAB02451.1| cytochrome P450 [Arabidopsis
  misc_feature (1)..(475): Homolog of NCBI NO: 5915827 NR Description: Cytochrome P450 71B4 >gi|25282601|pir||T52171
  misc_feature (1)..(477): Homolog of NCBI NO: 15231527 NR Description: cytochrome p450 family; protein id: At3g26220.1, by cDNA: gi_3164133 [Arabidopsis thaliana] Cytochrome P450 71B3 >gi|11994441|dbj|BAB02443.1| cytochrome P450
  misc_feature (1)..(477): Homolog of NCBI NO: 25282600 NR Description: cytochrome P450 monooxygenase [imported] - thaliana >gi|3164134|dbj|BAA28534.1| cytochrome P450
  misc_feature (1)..(477): Homolog of NCBI NO: 17065192 NR Description: cytochrome P450 [Arabidopsis thaliana]
  misc_feature (1)..(477): Homolog of NCBI NO: 15231528 NR Description: cytochrome p450 family; protein id: At3g26230.1 thaliana] >gi|13878382|sp|Q9LTL8|C72O_ARATH Cytochrome P450 71B24
  misc_feature (1)..(473): Homolog of NCBI NO: 15231526 NR Description: cytochrome P450 family; protein id: At3g26210.1 thaliana] >gi|13878383|sp|Q9LTM0|C72N_ARATH Cytochrome P450 71B23
  misc_feature (1)..(474): Homolog of NCBI NO: 15231520 NR Description: cytochrome p450 family; protein id: At3g26170.1, by cDNA: 262802. [Arabidopsis thaliana] Cytochrome P450 71B19 >gi|11994436|dbj|BAB02438.1| cytochrome
  misc_feature (1)..(474): Homolog of NCBI NO: 21554748 NR Description: cytochrome P450, putative [Arabidopsis thaliana]
MKESKRNLPPGPAKLPIVGNLHQLQGMVHRCLHELSKKHGPVMHLQLGFVPLVLISSSEAAEEALKTHDIECCTRPNTNAARVFSRNNKNIGLGAYSDEWRELRKVAVREYFSVKKVQSFRYVREEENHLMVKKLRDLALKQSPVDLSKTLFCLAASTVFRPVFGQSFSDNKHFSEEKIEELVFEAQKSLTFKFSDLFPIPGLGWFIGFVSGQHKGLHKVFIEVDNFLNHMIDDHQKQNQPQDRSDIVGSLLDMIHNQEQDKSFKLTIDHLKGITQDIFLAGIDTSAITMIWAMAELVNNPRVMKKVQDEIRSCIGIKKERIEEEDVGKLQYLKLVIKETLRLHPAAPLLLPRETMADIKIQGYDIPRKTLLLVSAWSLGRDPKYWKNPEEFNPERFIDCPVDYKGHSFEFLPFGSGRRFCPGMASAIATIELTLLNLLYFFDWKLPEEMKDMNMEESGDVTIVKKVPLELLPVLYH

SEQ ID NO: 83879 - protein, 451 aa, Arabidopsis thaliana
  peptide (1)..(451): Ceres Seq. ID no. 12672203
  misc_feature (1)..(445): Pfam Name: Cytochrome P450 Pfam Description: Cytochrome P450
  misc_feature (1)..(451): Homolog of NCBI NO: 15231534 NR Description: cytochrome p450 family; protein id: At3g26270.1 thaliana] >gi|13878381|sp|Q9LTL2|C72P_ARATH Cytochrome P450 71B25
  misc_feature (1)..(449): Homolog of NCBI NO: 15231536 NR Description: cytochrome p450 family; protein id: At3g26280.1, by cDNA: gi_19699097, supported by cDNA: gi_3164135 [Arabidopsis >gi|11994449|dbj|BAB02451.1| cytochrome P450 [Arabidopsis
  misc_feature (1)..(449): Homolog of NCBI NO: 5915827 NR Description: Cytochrome P450 71B4 >gi|25282601|pir||T52171
  misc_feature (1)..(451): Homolog of NCBI NO: 15231527 NR Description: cytochrome p450 family; protein id: At3g26220.1, by cDNA: gi_3164133 [Arabidopsis thaliana] Cytochrome P450 71B3 >gi|11994441|dbj|BAB02443.1| cytochrome P450
  misc_feature (1)..(451): Homolog of NCBI NO: 25282600 NR Description: cytochrome P450 monooxygenase [imported] - thaliana >gi|3164134|dbj|BAA28534.1| cytochrome P450
  misc_feature (1)..(451): Homolog of NCBI NO: 17065192 NR Description: cytochrome P450 [Arabidopsis thaliana]
  misc_feature (1)..(451): Homolog of NCBI NO: 15231528 NR Description: cytochrome p450 family; protein id: At3g26230.1 thaliana] >gi|13878382|sp|Q9LTL8|C72O_ARATH Cytochrome P450 71B24
  misc_feature (1)..(447): Homolog of NCBI NO: 15231526 NR Description: cytochrome P450 family; protein id: At3g26210.1 thaliana] >gi|13878383|sp|Q9LTM0|C72N_ARATH Cytochrome P450 71B23
  misc_feature (1)..(448): Homolog of NCBI NO: 15231520 NR Description: cytochrome p450 family; protein id: At3g26170.1, by cDNA: 262802. [Arabidopsis thaliana] Cytochrome P450 71B19 >gi|11994436|dbj|BAB02438.1| cytochrome
  misc_feature (1)..(448): Homolog of NCBI NO: 21554748 NR Description: cytochrome P450, putative [Arabidopsis thaliana]
MVHRCLHELSKKHGPVMHLQLGFVPLVLISSSEAAEEALKTHDIECCTRPNTNAARVFSRNNKNIGLGAYSDEWRELRKVAVREYFSVKKVQSFRYVREEENHLMVKKLRDLALKQSPVDLSKTLFCLAASTVFRPVFGQSFSDNKHFSEEKIEELVFEAQKSLTFKFSDLFPIPGLGWFIGFVSGQHKGLHKVFIEVDNFLNHMIDDHQKQNQPQDRSDIVGSLLDMIHNQEQDKSFKLTIDHLKGITQDIFLAGIDTSAITMIWAMAELVNNPRVMKKVQDEIRSCIGIKKERIEEEDVGKLQYLKLVIKETLRLHPAAPLLLPRETMADIKIQGYDIPRKTLLLVSAWSLGRDPKYWKNPEEFNPERFIDCPVDYKGHSFEFLPFGSGRRFCPGMASAIATIELTLLNLLYFFDWKLPEEMKDMNMEESGDVTIVKKVPLELLPVLYH

SEQ ID NO: 83880 - DNA, 1503 bp, Arabidopsis thaliana
  misc_feature (1)..(1503): Ceres Seq. ID no. 12672204
  misc_feature: MA Experiment ID: 20000185 Result: Up-regulated in Transcription
  misc_feature: MA Experiment 20000185 PARAMETER Experiment Name: At_Roots__P Parameter: Age (day) Value: 7 vs. 21
  misc_feature: MA Experiment 20000185 PARAMETER Experiment Name: At_Roots__P Parameter: Organism Value: A. thaliana
  misc_feature: MA Experiment 20000185 PARAMETER Experiment Name: At_Roots__P Parameter: Tissue Value: Roots vs. Whole Plant
  misc_feature: MA Experiment ID: 20000234 Result: Down-regulated in Transcription
  misc_feature: MA Experiment 20000234 PARAMETER Experiment Name: At_Siliques_P Parameter: Age (day) Value: 21
  misc_feature: MA Experiment 20000234 PARAMETER Experiment Name: At_Siliques_P Parameter: Organism Value: A. thaliana
  misc_feature: MA Experiment 20000234 PARAMETER Experiment Name: At_Siliques_P Parameter: Plant Line Value: WS
  misc_feature: MA Experiment 20000234 PARAMETER Experiment Name: At_Siliques_P Parameter: Tissue Value: Less Than 5mm Siliques vs. Whole Plant
  misc_feature: MA Experiment ID: 20000264 Result: Down-regulated in Transcription
  misc_feature: MA Experiment 20000264 PARAMETER Experiment Name: At_Open_Flower_P Parameter: Age (day) Value: 21
  misc_feature: MA Experiment 20000264 PARAMETER Experiment Name: At_Open_Flower_P Parameter: Plant Line Value: WS
  misc_feature: MA Experiment 20000264 PARAMETER Experiment Name: At_Open_Flower_P Parameter: Tissue Value: Open Flower vs. Whole Plant
  misc_feature: MA Experiment ID: 20000286 Result: Down-regulated in Transcription
  misc_feature: MA Experiment 20000286 PARAMETER Experiment Name: At_Open_Flower_P Parameter: Age (day) Value: 21
  misc_feature: MA Experiment 20000286 PARAMETER Experiment Name: At_Open_Flower_P Parameter: Plant Line Value: WS
  misc_feature: MA Experiment 20000286 PARAMETER Experiment Name: At_Open_Flower_P Parameter: Tissue Value: Half Open vs. Whole Plant
  misc_feature: MA Experiment ID: 20000438 Result: Up-regulated in Transcription
  misc_feature: MA Experiment 20000438 PARAMETER Experiment Name: At_Shoots__P Parameter: Age (day) Value: 14
  misc_feature: MA Experiment 20000438 PARAMETER Experiment Name: At_Shoots__P Parameter: Tissue Value: Shoots vs. Whole Plant
  misc_feature: MA Experiment ID: 20000439 Result: Up-regulated in Transcription
  misc_feature: MA Experiment 20000439 PARAMETER Experiment Name: At_Roots__P Parameter: Age (day) Value: 14 vs. 21
  misc_feature: MA Experiment 20000439 PARAMETER Experiment Name: At_Roots__P Parameter: Organism Value: A. thaliana
  misc_feature: MA Experiment 20000439 PARAMETER Experiment Name: At_Roots__P Parameter: Tissue Value: Roots vs. Whole Plant
  misc_feature: MA Experiment ID: 20000452 Result: Up-regulated in Transcription
  misc_feature: MA Experiment 20000452 PARAMETER Experiment Name: At_CS6879_Shoots-Roots_P Parameter: Age (day) Value: 14
  misc_feature: MA Experiment 20000452 PARAMETER Experiment Name: At_CS6879_Shoots-Roots_P Parameter: Organism Value: A. thaliana
  misc_feature: MA Experiment 20000452 PARAMETER Experiment Name: At_CS6879_Shoots-Roots_P Parameter: Plant Line Value: CS6879 vs. WS
  misc_feature: MA Experiment 20000452 PARAMETER Experiment Name: At_CS6879_Shoots-Roots_P Parameter: Tissue Value: Shoots
  misc_feature: MA Experiment ID: 20000453 Result: Down-regulated in Transcription
  misc_feature: MA Experiment 20000453 PARAMETER Experiment Name: At_100uM_ABA_P Parameter: Age (day) Value: 15
  misc_feature: MA Experiment 20000453 PARAMETER Experiment Name: At_100uM_ABA_P Parameter: Organism Value: A. thaliana
  misc_feature: MA Experiment 20000453 PARAMETER Experiment Name: At_100uM_ABA_P Parameter: Plant Line Value: WS
  misc_feature: MA Experiment 20000453 PARAMETER Experiment Name: At_100uM_ABA_P Parameter: Timepoint (hr) Value: 24
  misc_feature: MA Experiment 20000453 PARAMETER Experiment Name: At_100uM_ABA_P Parameter: Tissue Value: Aerial
  misc_feature: MA Experiment 20000453 PARAMETER Experiment Name: At_100uM_ABA_P Parameter: Treatment Value: 100uM ABA vs. No Treatment
  misc_feature: MA Experiment ID: 20000495 Result: Down-regulated in Transcription
  misc_feature: MA Experiment 20000495 PARAMETER Experiment Name: At_Guard_Cells_P Parameter: Harvest Date Value: 8/2/2002
  misc_feature: MA Experiment 20000495 PARAMETER Experiment Name: At_Guard_Cells_P Parameter: Organism Value: A. thaliana
  misc_feature: MA Experiment 20000495 PARAMETER Experiment Name: At_Guard_Cells_P Parameter: Tissue Value: Guard Cells vs. Leaves
  misc_feature: MA Experiment ID: 20000575 Result: Down-regulated in Transcription
  misc_feature: MA Experiment 20000575 PARAMETER Experiment Name: At_100uM_ABA_Mutants__P Parameter: Organism Value: A. thaliana
  misc_feature: MA Experiment 20000575 PARAMETER Experiment Name: At_100uM_ABA_Mutants__P Parameter: Plant Line Value: CS22
  misc_feature: MA Experiment 20000575 PARAMETER Experiment Name: At_100uM_ABA_Mutants__P Parameter: Timepoint (hr) Value: 6
  misc_feature: MA Experiment 20000575 PARAMETER Experiment Name: At_100uM_ABA_Mutants__P Parameter: Tissue Value: Whole Plant
  misc_feature: MA Experiment 20000575 PARAMETER Experiment Name: At_100uM_ABA_Mutants__P Parameter: Treatment Value: 1uM ABA vs. No Treatment
  misc_feature: MA Experiment ID: 20000794 Result: Down-regulated in Transcription
  misc_feature: MA Experiment 20000794 PARAMETER Experiment Name: At_Petals_P Parameter: Age (day) Value: 23-25 days
  misc_feature: MA Experiment 20000794 PARAMETER Experiment Name: At_Petals_P Parameter: Plant Line Value: WS
  misc_feature: MA Experiment 20000794 PARAMETER Experiment Name: At_Petals_P Parameter: Tissue Value: Petals vs. Whole plant
  misc_feature: MA Experiment ID: 20001248 Result: Down-regulated in Transcription
  misc_feature: MA Experiment 20001248 PARAMETER Experiment Name: At_Far-red-induction_P Parameter: Age (day) Value: 7
  misc_feature: MA Experiment 20001248 PARAMETER Experiment Name: At_Far-red-induction_P Parameter: Light Value: Far-red vs. White
  misc_feature: MA Experiment 20001248 PARAMETER Experiment Name: At_Far-red-induction_P Parameter: Organism Value: A. thaliana
  misc_feature: MA Experiment 20001248 PARAMETER Experiment Name: At_Far-red-induction_P Parameter: Plant Line Value: Columbia
  misc_feature: MA Experiment 20001248 PARAMETER Experiment Name: At_Far-red-induction_P Parameter: Timepoint (hr) Value: 4
  misc_feature: MA Experiment 20001248 PARAMETER Experiment Name: At_Far-red-induction_P Parameter: Tissue Value: Whole Plant
atggctacgattttgtttctatcacttctctttctctcttgtattcttctagccgccttcacgcacaagaagcggcagcaacatcaacggaaaccaccgtctcctcctggtttcccgataatcggaaacttgcatcagctcggagaattaccacatcaatctctatggagactctccaaaaagtatggtcatgtaatgcttttgaagtttggaagtatcccaacggtcgtagtttcttcctctgaaactgcaaagcaagttctgaaaatccatgacctacattgttgtagccgtccaagcttagcaggaccaagagcgctctcttacaattatctggacattgctttctctccttttgatgattactggaaagaattaaggaggatatgtgtgcaagaactcttcagtgttaaacgagttcaatcttttcaacctatcaaggaagatgaagtcaagaaacttatcgattcagtctcagaatcggcttctcagggaactccggttaacttgagcgagaagtttacttctttaactgtaagagtgacatgcaaggcaacatttggtgtgaacttccaaggaactgtgctcaacagtgacagattcgagaaactaatccatgatacatatttgtttttggggagcttttctgcctcagattattttccaaatggcggctggatcatcgactggctcacagggctacatgggcagagagagagaagcgtgagagctcttgatgcattctatgaacaaatgtttgatctacataaacagggaaacaaagaaggtgttgaagatttcgtggacttgctcttgaggttggagaaagaagaaactgttattggatatggcaagctaacaagaaaccatatcaaagcaatcttgatgaacgtccttattgggggcataggcacttctgcaataacaatgacatgggcaatgacagaacttatgagaaacccgcgagttatgaagaaggtgcaatctgaaatcagaaaccaaattgggaaaaagtcaatgatcaccttggatgatatagatcagctccattacctgaaaatggtgatcaatgaaacatggaggctacatcctccatcaccctttctgattccaagacaagtaatgtctgaatttgagctcaatgactacgtgattccagttaagacacggctttatgtgaatgtctgggctatcgggcgtgatcccgatacatggaaagacccggaggagtttcttccagaaaggtttgttaatagtagcattgatgcgaaaggacaacactttgagctgttaccgtttggaagtggtcgaagaatgtgtcctgccatgtacatggggacaacaatggtggagtttggtcttgccaatatgttgtatcactttgactggaaaataccagtaggcatggtggccgaagatatcgacttggaagaatctcctggacttaatgctagcaagaaaaatgagcttgtacttgttcctctgaagtatttagatcactaa

SEQ ID NO: 83881 - protein, 500 aa, Arabidopsis thaliana
  peptide (1)..(500): Ceres Seq. ID no. 12672205
  misc_feature (32)..(492): Pfam Name: Cytochrome P450 Pfam Description: Cytochrome P450
  misc_feature (1)..(500): Homolog of NCBI NO: 15231541 NR Description: cytochrome p450 family; protein id: At3g26320.1 thaliana] >gi|13878377|sp|Q9LIP4|C72X_ARATH Cytochrome P450 71B36
  misc_feature (1)..(499): Homolog of NCBI NO: 15231542 NR Description: cytochrome p450 family; protein id: At3g26330.1
  misc_feature (1)..(499): Homolog of NCBI NO: 9294291 NR Description: cytochrome p450 [Arabidopsis thaliana]
  misc_feature (1)..(500): Homolog of NCBI NO: 15227003 NR Description: cytochrome p450 family; protein id: At2g02580.1, by cDNA: gi_18175890 [Arabidopsis thaliana] Cytochrome P450 71B9 >gi|20197089|gb|AAC18928.2| putative
  misc_feature (1)..(500): Homolog of NCBI NO: 18175891 NR Description: putative cytochrome P450 protein [Arabidopsis
  misc_feature (1)..(500): Homolog of NCBI NO: 7430672 NR Description: probable cytochrome P450 At2g02580 [imported] -
  misc_feature (1)..(499): Homolog of NCBI NO: 15231538 NR Description: cytochrome p450 family; protein id: At3g26300.1 thaliana] >gi|13878379|sp|Q9LIP6|C72V_ARATH Cytochrome P450 71B34
  misc_feature (1)..(494): Homolog of NCBI NO: 15231539 NR Description: cytochrome p450 family; protein id: At3g26310.1 thaliana] >gi|13878378|sp|Q9LIP5|C72W_ARATH Cytochrome P450 71B35
  misc_feature (1)..(500): Homolog of NCBI NO: 15231537 NR Description: cytochrome p450 family; protein id: At3g26290.1 thaliana] >gi|13878380|sp|Q9LTL0|C72Q_ARATH Cytochrome P450 71B26
  misc_feature (1)..(498): Homolog of NCBI NO: 13878390 NR Description: Cytochrome P450 71B10 >gi|8777359|dbj|BAA96949.1|
MATILFLSLLFLSCILLAAFTHKKRQQHQRKPPSPPGFPIIGNLHQLGELPHQSLWRLSKKYGHVMLLKFGSIPTVVVSSSETAKQVLKIHDLHCCSRPSLAGPRALSYNYLDIAFSPFDDYWKELRRICVQELFSVKRVQSFQPIKEDEVKKLIDSVSESASQGTPVNLSEKFTSLTVRVTCKATFGVNFQGTVLNSDRFEKLIHDTYLFLGSFSASDYFPNGGWIIDWLTGLHGQRERSVRALDAFYEQMFDLHKQGNKEGVEDFVDLLLRLEKEETVIGYGKLTRNHIKAILMNVLIGGIGTSAITMTWAMTELMRNPRVMKKVQSEIRNQIGKKSMITLDDIDQLHYLKMVINETWRLHPPSPFLIPRQVMSEFELNDYVIPVKTRLYVNVWAIGRDPDTWKDPEEFLPERFVNSSIDAKGQHFELLPFGSGRRMCPAMYMGTTMVEFGLANMLYHFDWKIPVGMVAEDIDLEESPGLNASKKNELVLVPLKYLDH

SEQ ID NO: 83882 - protein, 435 aa, Arabidopsis thaliana
  peptide (1)..(435): Ceres Seq. ID no. 12672206
  misc_feature (1)..(427): Pfam Name: Cytochrome P450 Pfam Description: Cytochrome P450
  misc_feature (1)..(435): Homolog of NCBI NO: 15231541 NR Description: cytochrome p450 family; protein id: At3g26320.1 thaliana] >gi|13878377|sp|Q9LIP4|C72X_ARATH Cytochrome P450 71B36
  misc_feature (1)..(434): Homolog of NCBI NO: 15231542 NR Description: cytochrome p450 family; protein id: At3g26330.1
  misc_feature (1)..(434): Homolog of NCBI NO: 9294291 NR Description: cytochrome p450 [Arabidopsis thaliana]
  misc_feature (1)..(435): Homolog of NCBI NO: 15227003 NR Description: cytochrome p450 family; protein id: At2g02580.1, by cDNA: gi_18175890 [Arabidopsis thaliana] Cytochrome P450 71B9 >gi|20197089|gb|AAC18928.2| putative
  misc_feature (1)..(435): Homolog of NCBI NO: 18175891 NR Description: putative cytochrome P450 protein [Arabidopsis
  misc_feature (1)..(435): Homolog of NCBI NO: 7430672 NR Description: probable cytochrome P450 At2g02580 [imported] -
  misc_feature (1)..(434): Homolog of NCBI NO: 15231538 NR Description: cytochrome p450 family; protein id: At3g26300.1 thaliana] >gi|13878379|sp|Q9LIP6|C72V_ARATH Cytochrome P450 71B34
  misc_feature (1)..(429): Homolog of NCBI NO: 15231539 NR Description: cytochrome p450 family; protein id: At3g26310.1 thaliana] >gi|13878378|sp|Q9LIP5|C72W_ARATH Cytochrome P450 71B35
  misc_feature (1)..(435): Homolog of NCBI NO: 15231537 NR Description: cytochrome p450 family; protein id: At3g26290.1 thaliana] >gi|13878380|sp|Q9LTL0|C72Q_ARATH Cytochrome P450 71B26
  misc_feature (1)..(433): Homolog of NCBI NO: 13878390 NR Description: Cytochrome P450 71B10 >gi|8777359|dbj|BAA96949.1|
MLLKFGSIPTVVVSSSETAKQVLKIHDLHCCSRPSLAGPRALSYNYLDIAFSPFDDYWKELRRICVQELFSVKRVQSFQPIKEDEVKKLIDSVSESASQGTPVNLSEKFTSLTVRVTCKATFGVNFQGTVLNSDRFEKLIHDTYLFLGSFSASDYFPNGGWIIDWLTGLHGQRERSVRALDAFYEQMFDLHKQGNKEGVEDFVDLLLRLEKEETVIGYGKLTRNHIKAILMNVLIGGIGTSAITMTWAMTELMRNPRVMKKVQSEIRNQIGKKSMITLDDIDQLHYLKMVINETWRLHPPSPFLIPRQVMSEFELNDYVIPVKTRLYVNVWAIGRDPDTWKDPEEFLPERFVNSSIDAKGQHFELLPFGSGRRMCPAMYMGTTMVEFGLANMLYHFDWKIPVGMVAEDIDLEESPGLNASKKNELVLVPLKYLDH

SEQ ID NO: 83883 - DNA, 2019 bp, Arabidopsis thaliana
  misc_feature (1)..(2019): Ceres Seq. ID no. 12672217
  misc_feature: MA Experiment ID: 20000171 Result: Down-regulated in Transcription
  misc_feature: MA Experiment 20000171 PARAMETER Experiment Name: At_42deg_Heat_P Parameter: Age (day) Value: 14
  misc_feature: MA Experiment 20000171 PARAMETER Experiment Name: At_42deg_Heat_P Parameter: Organism Value: A. thaliana
  misc_feature: MA Experiment 20000171 PARAMETER Experiment Name: At_42deg_Heat_P Parameter: Plant Line Value: WS
  misc_feature: MA Experiment 20000171 PARAMETER Experiment Name: At_42deg_Heat_P Parameter: Temperature (deg C) Value: 42 vs. 22
  misc_feature: MA Experiment 20000171 PARAMETER Experiment Name: At_42deg_Heat_P Parameter: Timepoint (hr) Value: 1
  misc_feature: MA Experiment 20000171 PARAMETER Experiment Name: At_42deg_Heat_P Parameter: Tissue Value: Aerial
  misc_feature: MA Experiment ID: 20000438 Result: Up-regulated in Transcription
  misc_feature: MA Experiment 20000438 PARAMETER Experiment Name: At_Shoots__P Parameter: Age (day) Value: 14
  misc_feature: MA Experiment 20000438 PARAMETER Experiment Name: At_Shoots__P Parameter: Tissue Value: Shoots vs. Whole Plant
  misc_feature: MA Experiment ID: 20000496 Result: Up-regulated in Transcription
  misc_feature: MA Experiment 20000496 PARAMETER Experiment Name: At_Guard_Cells_P Parameter: Harvest Date Value: 7/19/2002
  misc_feature: MA Experiment 20000496 PARAMETER Experiment Name: At_Guard_Cells_P Parameter: Organism Value: Canola
  misc_feature: MA Experiment 20000496 PARAMETER Experiment Name: At_Guard_Cells_P Parameter: Tissue Value: Guard Cells vs. Leaves
atcaaaaaaaaagtttcaatttttgaaagctctgagaaatgaatctatcattctctctctctatctctatcttccttttcagatttcgcttcttcaattcatgaaatcctcgtgattctactttaatgcttctctttttttacttttccaagtctctgaatattcaaagtatatatcttttgttttcaaacttttgcagaattgtcttcaagcttccaaatttcagttaaaggtctcaactttgcagaattttcctctaaaggttcagactttggggtaaaggtgtcaactttggcgatgggtcttgacggaaacaatggtggaggggtttggttaaacggtggtggtggagaaagggaagagaacgaggaaggttcatggggaaggaatcaagaagatggttcttctcagtttaagcctatgcttgaaggtgattggtttagtagtaaccaaccacatccacaagatcttcagatgttacagaatcagccagatttcagatactttggtggttttccttttaaccctaatgataatcttcttcttcaacactctattgattcttcttcttcttgttctccttctcaagcttttagtcttgacccttctcagcaaaatcagttcttgtcaactaacaacaacaagggttgtcttctcaatgttccttcttctgcaaacccttttgataatgcttttgagtttggctctgaatctggttttcttaaccaaatccatgctcctatttcgatggggtttggttctttgacacaattggggaacagggatttgagttctgttcctgatttcttgtctgctcggtcacttcttgcgccggaaagcaacaacaacaacacaatgttgtgtggtggtttcacagctccgttggagttggaaggttttggtagtcctgctaatggtggttttgttgggaacagagcgaaagttctgaagcctttagaggtgttagcatcgtctggtgcacagcctactctgttccagaaacgtgcagctatgcgtcagagctctggaagcaaaatgggaaattcggagagttcgggaatgaggaggtttagtgatgatggagatatggatgagactgggattgaggtttctgggttgaactatgagtctgatgagataaatgagagcggtaaagcggctgagagtgttcagattggaggaggaggaaagggtaagaagaaaggtatgcctgctaagaatctgatggctgagaggagaaggaggaagaagcttaatgataggctttatatgcttagatcagttgtccccaagatcagcaaaatggatagagcatcaatacttggagatgcaattgattatctgaaggaacttctacaaaggatcaatgatcttcacaatgaacttgagtcaactcctcctggatctttgcctccaacttcatcaagcttccatccgttgacacctacaccgcaaactctttcttgtcgtgtcaaggaagagttgtgtccctcttctttaccaagtcctaaaggccagcaagctagagttgaggttagattaagggaaggaagagcagtgaacattcatatgttctgtggtcgtagaccgggtctgttgctcgctaccatgaaagctttggataatcttggattggatgttcagcaagctgtgatcagctgttttaatgggtttgccttggatgttttccgcgctgagcaatgccaagaaggacaagagatactgcctgatcaaatcaaagcagtgcttttcgatacagcagggtatgctggtatgatctgatctgatcctgacttcgagtccattaagcatctgttgaagcagagctagaagaactaagtccctttaaatctgcaattttcttctcaactttttttcttatgtcataacttcaatctaagcatgtaatgcaattgcaaatgagagttgtttttaaattaagcttttgagaacttgaggttgttgttgttggatacataacttcaaccttttattagcaatgttaacttccatttatgt

SEQ ID NO: 83884 - protein, 494 aa, Arabidopsis thaliana
  peptide (1)..(494): Ceres Seq. ID no. 12672218
  misc_feature (306)..(353): Pfam Name: Helix-loop-helix DNA-binding domain Pfam Description: Helix-loop-helix DNA-binding domain
  misc_feature (1)..(494): Homolog of NCBI NO: 22331357 NR Description: bHLH protein; protein id: At3g26744.1, supported cDNA: gi_19310474, supported by cDNA: gi_19310474 [Arabidopsis >gi|19310475|gb|AAL84972.1| AT3g26744/MLJ15_15 [Arabidopsis
  misc_feature (202)..(494): Homolog of NCBI NO: 15222101 NR Description: bHLH protein; protein id: At1g12860.1
  misc_feature (202)..(494): Homolog of NCBI NO: 25513489 NR Description: F13K23.12 protein - Arabidopsis thaliana
  misc_feature (260)..(489): Homolog of NCBI NO: 34907076 NR Description: OSJNBa0093F16.27 [Oryza sativa (japonica
  misc_feature (7)..(282): Homolog of NCBI NO: 25513489 NR Description: F13K23.12 protein - Arabidopsis thaliana
  misc_feature (7)..(282): Homolog of NCBI NO: 15222101 NR Description: bHLH protein; protein id: At1g12860.1
  misc_feature (274)..(492): Homolog of NCBI NO: 18424973 NR Description: bHLH protein; protein id: At5g65640.1, supported
  misc_feature (275)..(492): Homolog of NCBI NO: 21537346 NR Description: unknown [Arabidopsis thaliana]
  misc_feature (283)..(492): Homolog of NCBI NO: 22758263 NR Description: Putative bHLH transcription protein [Oryza sativa
  misc_feature (419)..(492): Homolog of NCBI NO: 15238199 NR Description: bHLH protein; protein id: At5g10570.1, supported cDNA: gi_20127061 [Arabidopsis thaliana] >gi|11357367|pir||T49982
MGLDGNNGGGVWLNGGGGEREENEEGSWGRNQEDGSSQFKPMLEGDWFSSNQPHPQDLQMLQNQPDFRYFGGFPFNPNDNLLLQHSIDSSSSCSPSQAFSLDPSQQNQFLSTNNNKGCLLNVPSSANPFDNAFEFGSESGFLNQIHAPISMGFGSLTQLGNRDLSSVPDFLSARSLLAPESNNNNTMLCGGFTAPLELEGFGSPANGGFVGNRAKVLKPLEVLASSGAQPTLFQKRAAMRQSSGSKMGNSESSGMRRFSDDGDMDETGIEVSGLNYESDEINESGKAAESVQIGGGGKGKKKGMPAKNLMAERRRRKKLNDRLYMLRSVVPKISKMDRASILGDAIDYLKELLQRINDLHNELESTPPGSLPPTSSSFHPLTPTPQTLSCRVKEELCPSSLPSPKGQQARVEVRLREGRAVNIHMFCGRRPGLLLATMKALDNLGLDVQQAVISCFNGFALDVFRAEQCQEGQEILPDQIKAVLFDTAGYAGMI

SEQ ID NO: 83885 - protein, 453 aa, Arabidopsis thaliana
  peptide (1)..(453): Ceres Seq. ID no. 12672219
  misc_feature (265)..(312): Pfam Name: Helix-loop-helix DNA-binding domain Pfam Description: Helix-loop-helix DNA-binding domain
  misc_feature (1)..(453): Homolog of NCBI NO: 22331357 NR Description: bHLH protein; protein id: At3g26744.1, supported cDNA: gi_19310474, supported by cDNA: gi_19310474 [Arabidopsis >gi|19310475|gb|AAL84972.1| AT3g26744/MLJ15_15 [Arabidopsis
  misc_feature (161)..(453): Homolog of NCBI NO: 15222101 NR Description: bHLH protein; protein id: At1g12860.1
  misc_feature (161)..(453): Homolog of NCBI NO: 25513489 NR Description: F13K23.12 protein - Arabidopsis thaliana
  misc_feature (219)..(448): Homolog of NCBI NO: 34907076 NR Description: OSJNBa0093F16.27 [Oryza sativa (japonica
  misc_feature (1)..(241): Homolog of NCBI NO: 25513489 NR Description: F13K23.12 protein - Arabidopsis thaliana
  misc_feature (1)..(241): Homolog of NCBI NO: 15222101 NR Description: bHLH protein; protein id: At1g12860.1
  misc_feature (233)..(451): Homolog of NCBI NO: 18424973 NR Description: bHLH protein; protein id: At5g65640.1, supported
  misc_feature (234)..(451): Homolog of NCBI NO: 21537346 NR Description: unknown [Arabidopsis thaliana]
  misc_feature (242)..(451): Homolog of NCBI NO: 22758263 NR Description: Putative bHLH transcription protein [Oryza sativa
  misc_feature (378)..(451): Homolog of NCBI NO: 15238199 NR Description: bHLH protein; protein id: At5g10570.1, supported cDNA: gi_20127061 [Arabidopsis thaliana] >gi|11357367|pir||T49982
MLEGDWFSSNQPHPQDLQMLQNQPDFRYFGGFPFNPNDNLLLQHSIDSSSSCSPSQAFSLDPSQQNQFLSTNNNKGCLLNVPSSANPFDNAFEFGSESGFLNQIHAPISMGFGSLTQLGNRDLSSVPDFLSARSLLAPESNNNNTMLCGGFTAPLELEGFGSPANGGFVGNRAKVLKPLEVLASSGAQPTLFQKRAAMRQSSGSKMGNSESSGMRRFSDDGDMDETGIEVSGLNYESDEINESGKAAESVQIGGGGKGKKKGMPAKNLMAERRRRKKLNDRLYMLRSVVPKISKMDRASILGDAIDYLKELLQRINDLHNELESTPPGSLPPTSSSFHPLTPTPQTLSCRVKEELCPSSLPSPKGQQARVEVRLREGRAVNIHMFCGRRPGLLLATMKALDNLGLDVQQAVISCFNGFALDVFRAEQCQEGQEILPDQIKAVLFDTAGYAGMI

SEQ ID NO: 83886 - protein, 435 aa, Arabidopsis thaliana
  peptide (1)..(435): Ceres Seq. ID no. 12672220
  misc_feature (247)..(294): Pfam Name: Helix-loop-helix DNA-binding domain Pfam Description: Helix-loop-helix DNA-binding domain
  misc_feature (1)..(435): Homolog of NCBI NO: 22331357 NR Description: bHLH protein; protein id: At3g26744.1, supported cDNA: gi_19310474, supported by cDNA: gi_19310474 [Arabidopsis >gi|19310475|gb|AAL84972.1| AT3g26744/MLJ15_15 [Arabidopsis
  misc_feature (143)..(435): Homolog of NCBI NO: 15222101 NR Description: bHLH protein; protein id: At1g12860.1
  misc_feature (143)..(435): Homolog of NCBI NO: 25513489 NR Description: F13K23.12 protein - Arabidopsis thaliana
  misc_feature (201)..(430): Homolog of NCBI NO: 34907076 NR Description: OSJNBa0093F16.27 [Oryza sativa (japonica
  misc_feature (1)..(223): Homolog of NCBI NO: 25513489 NR Description: F13K23.12 protein - Arabidopsis thaliana
  misc_feature (1)..(223): Homolog of NCBI NO: 15222101 NR Description: bHLH protein; protein id: At1g12860.1
  misc_feature (215)..(433): Homolog of NCBI NO: 18424973 NR Description: bHLH protein; protein id: At5g65640.1, supported
  misc_feature (216)..(433): Homolog of NCBI NO: 21537346 NR Description: unknown [Arabidopsis thaliana]
  misc_feature (224)..(433): Homolog of NCBI NO: 22758263 NR Description: Putative bHLH transcription protein [Oryza sativa
  misc_feature (360)..(433): Homolog of NCBI NO: 15238199 NR Description: bHLH protein; protein id: At5g10570.1, supported cDNA: gi_20127061 [Arabidopsis thaliana] >gi|11357367|pir||T49982
MLQNQPDFRYFGGFPFNPNDNLLLQHSIDSSSSCSPSQAFSLDPSQQNQFLSTNNNKGCLLNVPSSANPFDNAFEFGSESGFLNQIHAPISMGFGSLTQLGNRDLSSVPDFLSARSLLAPESNNNNTMLCGGFTAPLELEGFGSPANGGFVGNRAKVLKPLEVLASSGAQPTLFQKRAAMRQSSGSKMGNSESSGMRRFSDDGDMDETGIEVSGLNYESDEINESGKAAESVQIGGGGKGKKKGMPAKNLMAERRRRKKLNDRLYMLRSVVPKISKMDRASILGDAIDYLKELLQRINDLHNELESTPPGSLPPTSSSFHPLTPTPQTLSCRVKEELCPSSLPSPKGQQARVEVRLREGRAVNIHMFCGRRPGLLLATMKALDNLGLDVQQAVISCFNGFALDVFRAEQCQEGQEILPDQIKAVLFDTAGYAGMI

SEQ ID NO: 83887 - DNA, 1482 bp, Arabidopsis thaliana
  misc_feature (1)..(1482): Ceres Seq. ID no. 12672260
  misc_feature: MA Experiment ID: 20000314 Result: Up-regulated in Transcription
  misc_feature: MA Experiment 20000314 PARAMETER Experiment Name: At_14day_Shoots-Roots_Sub_P Parameter: Age (day) Value: 14
  misc_feature: MA Experiment 20000314 PARAMETER Experiment Name: At_14day_Shoots-Roots_Sub_P Parameter: Organism Value: A. thaliana
  misc_feature: MA Experiment 20000314 PARAMETER Experiment Name: At_14day_Shoots-Roots_Sub_P Parameter: Plant Line Value: WS
  misc_feature: MA Experiment 20000314 PARAMETER Experiment Name: At_14day_Shoots-Roots_Sub_P Parameter: Tissue Value: Roots vs. Whole Plant
atggactccaattgcattcagttcctccatgacaagacgattctcgtcaccggtgttcccggtttcctcgccaaagtgtttgtggagaaaatattgaggattcaaccaaaggtaaagaagcttttccttcttttgagagcagcagacaatgaatcagccatgcaacggtttcacagtgaggttttggagaaagatctttttagagtgttgaaaaacgctttaggtgatgagaatctgaaagctttcataacagaaaaagtcgtacctattcccggtgatatatccgttgataatttgggagtgaagggttctgatctcttacaacatatgtggaatgagattgatatcattgtcaatgtagccgccacaacgaactttgatgaaagatatgatgttggtcttagcgtcaacacatttggaccgctcaatgtcctcaactttgccaagaagtgtgttaaaggacagttgcttcttcatgtttcaaccgcgtatgtgcgcggagagaagtctggacttttacatgagaaaacatttcacatgggggagacattgaacggacatagaaaattagtcattgagaccgaaatggagctaatgaaacaaaaactgaaagagctacagaaacaaaattgttcagaagaagagatttcacagtctatgaaagatcttggaatgtcaagggcaaagcttcatggatggccaaacacatatgtgtttaccaaatcaatgggagagatgcttcttggtaattatagagaaaaccttcccatcgttatcatccgtcccacaatgatcactagcactttttcagaaccatttcccggttggatcgaagggttaagaaccatagacagtgtgattgttgcatatggcaaaggaaggcttaaatgttttcttgcagatccaaactcagtccttgatcttatacctgtggacatggtcgcaaacgcaatggtcacggctgcggcaatacacgcagggaagctaggttcccagaccgtgtaccatgtcggatcatcttgtaaaaacccgatcacattcgaacagattcatgatctcgcggctagctacttcacgaaaaaccctcttgttagacgcgatggttcatctatactagtctccaaaggaactatcttgtccacaatggctcagttcagtttctacatgacccttcgttacaagctacctttgcagatgttgcgattgatatatgtaatttatccttggtggaatggtaataaatataaagacattgaccgcaagattaagctggcgatgcggttggtcgacctctacagaccttatgtcttgtttaagggcatatttgacgatacgaatactgagaaactgcggttgaaaagaaaggagattaataaagaaatgtatggtttgtttgaatttgatccaaagtctattgattgggaggattatatgacgaccattcatattcccggcctcatcacctatgtactcaaaaaataa

SEQ ID NO: 83888 - protein, 493 aa, Arabidopsis thaliana
  peptide (1)..(493): Ceres Seq. ID no. 12672261
  misc_feature (287)..(491): Pfam Name: Male sterility protein Pfam Description: Male sterility protein
  misc_feature (1)..(493): Homolog of NCBI NO: 11357157 NR Description: acyl CoA reductase-protein - Arabidopsis thaliana
  misc_feature (1)..(400): Homolog of NCBI NO: 30692171 NR Description: acyl CoA reductase - protein [Arabidopsis
  misc_feature (1)..(493): Homolog of NCBI NO: 15242260 NR Description: male sterility 2-like protein (emb|CAA68191.1); id: At5g22500.1, supported by cDNA: gi_14334737, supported by
  misc_feature (1)..(400): Homolog of NCBI NO: 15229991 NR Description: acyl CoA reductase -like protein; protein id:
  misc_feature (1)..(335): Homolog of NCBI NO: 15229993 NR Description: acyl CoA reductase -like protein; protein id:
  misc_feature (412)..(493): Homolog of NCBI NO: 15229993 NR Description: acyl CoA reductase -like protein; protein id:
  misc_feature (6)..(491): Homolog of NCBI NO: 5020215 NR Description: acyl CoA reductase [Simmondsia chinensis]
  misc_feature (107)..(477): Homolog of NCBI NO: 15242233 NR Description: acyl CoA reductase-like protein; protein id:
  misc_feature (1)..(57): Homolog of NCBI NO: 15242233 NR Description: acyl CoA reductase-like protein; protein id:
  misc_feature (6)..(490): Homolog of NCBI NO: 16323107 NR Description: AT4g33790/T16L1_280 [Arabidopsis thaliana]
MDSNCIQFLHDKTILVTGVPGFLAKVFVEKILRIQPKVKKLFLLLRAADNESAMQRFHSEVLEKDLFRVLKNALGDENLKAFITEKVVPIPGDISVDNLGVKGSDLLQHMWNEIDIIVNVAATTNFDERYDVGLSVNTFGPLNVLNFAKKCVKGQLLLHVSTAYVRGEKSGLLHEKTFHMGETLNGHRKLVIETEMELMKQKLKELQKQNCSEEEISQSMKDLGMSRAKLHGWPNTYVFTKSMGEMLLGNYRENLPIVIIRPTMITSTFSEPFPGWIEGLRTIDSVIVAYGKGRLKCFLADPNSVLDLIPVDMVANAMVTAAAIHAGKLGSQTVYHVGSSCKNPITFEQIHDLAASYFTKNPLVRRDGSSILVSKGTILSTMAQFSFYMTLRYKLPLQMLRLIYVIYPWWNGNKYKDIDRKIKLAMRLVDLYRPYVLFKGIFDDTNTEKLRLKRKEINKEMYGLFEFDPKSIDWEDYMTTIHIPGLITYVLKK

SEQ ID NO: 83889 - protein, 440 aa, Arabidopsis thaliana
  peptide (1)..(440): Ceres Seq. ID no. 12672262
  misc_feature (234)..(438): Pfam Name: Male sterility protein Pfam Description: Male sterility protein
  misc_feature (1)..(440): Homolog of NCBI NO: 11357157 NR Description: acyl CoA reductase-protein - Arabidopsis thaliana
  misc_feature (1)..(347): Homolog of NCBI NO: 30692171 NR Description: acyl CoA reductase - protein [Arabidopsis
  misc_feature (1)..(440): Homolog of NCBI NO: 15242260 NR Description: male sterility 2-like protein (emb|CAA68191.1); id: At5g22500.1, supported by cDNA: gi_14334737, supported by
  misc_feature (1)..(347): Homolog of NCBI NO: 15229991 NR Description: acyl CoA reductase -like protein; protein id:
  misc_feature (1)..(282): Homolog of NCBI NO: 15229993 NR Description: acyl CoA reductase -like protein; protein id:
  misc_feature (359)..(440): Homolog of NCBI NO: 15229993 NR Description: acyl CoA reductase -like protein; protein id:
  misc_feature (1)..(438): Homolog of NCBI NO: 5020215 NR Description: acyl CoA reductase [Simmondsia chinensis]
  misc_feature (54)..(424): Homolog of NCBI NO: 15242233 NR Description: acyl CoA reductase-like protein; protein id:
  misc_feature (1)..(437): Homolog of NCBI NO: 16323107 NR Description: AT4g33790/T16L1_280 [Arabidopsis thaliana]
  misc_feature (1)..(437): Homolog of NCBI NO: 35215152 NR Description: putative fatty acyl coA reductase [Oryza sativa
MQRFHSEVLEKDLFRVLKNALGDENLKAFITEKVVPIPGDISVDNLGVKGSDLLQHMWNEIDIIVNVAATTNFDERYDVGLSVNTFGPLNVLNFAKKCVKGQLLLHVSTAYVRGEKSGLLHEKTFHMGETLNGHRKLVIETEMELMKQKLKELQKQNCSEEEISQSMKDLGMSRAKLHGWPNTYVFTKSMGEMLLGNYRENLPIVIIRPTMITSTFSEPFPGWIEGLRTIDSVIVAYGKGRLKCFLADPNSVLDLIPVDMVANAMVTAAAIHAGKLGSQTVYHVGSSCKNPITFEQIHDLAASYFTKNPLVRRDGSSILVSKGTILSTMAQFSFYMTLRYKLPLQMLRLIYVIYPWWNGNKYKDIDRKIKLAMRLVDLYRPYVLFKGIFDDTNTEKLRLKRKEINKEMYGLFEFDPKSIDWEDYMTTIHIPGLITYVLKK

SEQ ID NO: 83890 - protein, 384 aa, Arabidopsis thaliana
  peptide (1)..(384): Ceres Seq. ID no. 12672263
  misc_feature (178)..(382): Pfam Name: Male sterility protein Pfam Description: Male sterility protein
  misc_feature (1)..(384): Homolog of NCBI NO: 11357157 NR Description: acyl CoA reductase-protein - Arabidopsis thaliana
  misc_feature (1)..(291): Homolog of NCBI NO: 30692171 NR Description: acyl CoA reductase - protein [Arabidopsis
  misc_feature (1)..(384): Homolog of NCBI NO: 15242260 NR Description: male sterility 2-like protein (emb|CAA68191.1); id: At5g22500.1, supported by cDNA: gi_14334737, supported by
  misc_feature (1)..(291): Homolog of NCBI NO: 15229991 NR Description: acyl CoA reductase -like protein; protein id:
  misc_feature (1)..(226): Homolog of NCBI NO: 15229993 NR Description: acyl CoA reductase -like protein; protein id:
  misc_feature (303)..(384): Homolog of NCBI NO: 15229993 NR Description: acyl CoA reductase -like protein; protein id:
  misc_feature (1)..(382): Homolog of NCBI NO: 5020215 NR Description: acyl CoA reductase [Simmondsia chinensis]
  misc_feature (1)..(368): Homolog of NCBI NO: 15242233 NR Description: acyl CoA reductase-like protein; protein id:
  misc_feature (1)..(381): Homolog of NCBI NO: 16323107 NR Description: AT4g33790/T16L1_280 [Arabidopsis thaliana]
  misc_feature (1)..(381): Homolog of NCBI NO: 35215152 NR Description: putative fatty acyl coA reductase [Oryza sativa
MWNEIDIIVNVAATTNFDERYDVGLSVNTFGPLNVLNFAKKCVKGQLLLHVSTAYVRGEKSGLLHEKTFHMGETLNGHRKLVIETEMELMKQKLKELQKQNCSEEEISQSMKDLGMSRAKLHGWPNTYVFTKSMGEMLLGNYRENLPIVIIRPTMITSTFSEPFPGWIEGLRTIDSVIVAYGKGRLKCFLADPNSVLDLIPVDMVANAMVTAAAIHAGKLGSQTVYHVGSSCKNPITFEQIHDLAASYFTKNPLVRRDGSSILVSKGTILSTMAQFSFYMTLRYKLPLQMLRLIYVIYPWWNGNKYKDIDRKIKLAMRLVDLYRPYVLFKGIFDDTNTEKLRLKRKEINKEMYGLFEFDPKSIDWEDYMTTIHIPGLITYVLKK

SEQ ID NO: 83891 - DNA, 1473 bp, Arabidopsis thaliana
  misc_feature (1)..(1473): Ceres Seq. ID no. 12672303
  misc_feature: MA Experiment ID: 20000185 Result: Down-regulated in Transcription
  misc_feature: MA Experiment 20000185 PARAMETER Experiment Name: At_Roots__P Parameter: Age (day) Value: 7 vs. 21
  misc_feature: MA Experiment 20000185 PARAMETER Experiment Name: At_Roots__P Parameter: Organism Value: A. thaliana
  misc_feature: MA Experiment 20000185 PARAMETER Experiment Name: At_Roots__P Parameter: Tissue Value: Roots vs. Whole Plant
  misc_feature: MA Experiment ID: 20000437 Result: Down-regulated in Transcription
  misc_feature: MA Experiment 20000437 PARAMETER Experiment Name: At_Drought_P Parameter: Age (day) Value: 8
  misc_feature: MA Experiment 20000437 PARAMETER Experiment Name: At_Drought_P Parameter: Organism Value: A. thaliana
  misc_feature: MA Experiment 20000437 PARAMETER Experiment Name: At_Drought_P Parameter: Plant Line Value: WS
  misc_feature: MA Experiment 20000437 PARAMETER Experiment Name: At_Drought_P Parameter: Timepoint (hr) Value: 24
  misc_feature: MA Experiment 20000437 PARAMETER Experiment Name: At_Drought_P Parameter: Tissue Value: Whole Plant
  misc_feature: MA Experiment 20000437 PARAMETER Experiment Name: At_Drought_P Parameter: Treatment Value: Drought vs. No Drought
  misc_feature: MA Experiment ID: 20000527 Result: Up-regulated in Transcription
  misc_feature: MA Experiment 20000527 PARAMETER Experiment Name: At_10percent_PEG_P Parameter: Age (day) Value: 20
  misc_feature: MA Experiment 20000527 PARAMETER Experiment Name: At_10percent_PEG_P Parameter: Organism Value: A. thaliana
  misc_feature: MA Experiment 20000527 PARAMETER Experiment Name: At_10percent_PEG_P Parameter: Plant Line Value: WS
  misc_feature: MA Experiment 20000527 PARAMETER Experiment Name: At_10percent_PEG_P Parameter: Timepoint (day) Value: 20
  misc_feature: MA Experiment 20000527 PARAMETER Experiment Name: At_10percent_PEG_P Parameter: Tissue Value: Whole Plant
  misc_feature: MA Experiment 20000527 PARAMETER Experiment Name: At_10percent_PEG_P Parameter: Treatment Value: 10percent PEG vs. No Treatment
  misc_feature: MA Experiment ID: 20000573 Result: Down-regulated in Transcription
  misc_feature: MA Experiment 20000573 PARAMETER Experiment Name: At_100uM_ABA_Mutants__P Parameter: Organism Value: A. thaliana
  misc_feature: MA Experiment 20000573 PARAMETER Experiment Name: At_100uM_ABA_Mutants__P Parameter: Plant Line Value: CS22 vs. Ler wt
  misc_feature: MA Experiment 20000573 PARAMETER Experiment Name: At_100uM_ABA_Mutants__P Parameter: Timepoint (hr) Value: N/A
  misc_feature: MA Experiment 20000573 PARAMETER Experiment Name: At_100uM_ABA_Mutants__P Parameter: Tissue Value: Whole Plant
  misc_feature: MA Experiment 20000573 PARAMETER Experiment Name: At_100uM_ABA_Mutants__P Parameter: Treatment Value: None
  misc_feature: MA Experiment ID: 20000574 Result: Down-regulated in Transcription
  misc_feature: MA Experiment 20000574 PARAMETER Experiment Name: At_100uM_ABA_Mutants__P Parameter: Organism Value: A. thaliana
  misc_feature: MA Experiment 20000574 PARAMETER Experiment Name: At_100uM_ABA_Mutants__P Parameter: Plant Line Value: CS23 vs. Ler wt
  misc_feature: MA Experiment 20000574 PARAMETER Experiment Name: At_100uM_ABA_Mutants__P Parameter: Timepoint (hr) Value: N/A
  misc_feature: MA Experiment 20000574 PARAMETER Experiment Name: At_100uM_ABA_Mutants__P Parameter: Tissue Value: Whole Plant
  misc_feature: MA Experiment 20000574 PARAMETER Experiment Name: At_100uM_ABA_Mutants__P Parameter: Treatment Value: None
  misc_feature: MA Experiment ID: 20001248 Result: Down-regulated in Transcription
  misc_feature: MA Experiment 20001248 PARAMETER Experiment Name: At_Far-red-induction_P Parameter: Age (day) Value: 7
  misc_feature: MA Experiment 20001248 PARAMETER Experiment Name: At_Far-red-induction_P Parameter: Light Value: Far-red vs. White
  misc_feature: MA Experiment 20001248 PARAMETER Experiment Name: At_Far-red-induction_P Parameter: Organism Value: A. thaliana
  misc_feature: MA Experiment 20001248 PARAMETER Experiment Name: At_Far-red-induction_P Parameter: Plant Line Value: Columbia
  misc_feature: MA Experiment 20001248 PARAMETER Experiment Name: At_Far-red-induction_P Parameter: Timepoint (hr) Value: 4
  misc_feature: MA Experiment 20001248 PARAMETER Experiment Name: At_Far-red-induction_P Parameter: Tissue Value: Whole Plant
  misc_feature: MA Experiment ID: 20001450 Result: Down-regulated in Transcription
  misc_feature: MA Experiment 20001450 PARAMETER Experiment Name: At_Far-red-induction_P Parameter: Age (day) Value: 7
  misc_feature: MA Experiment 20001450 PARAMETER Experiment Name: At_Far-red-induction_P Parameter: Light Value: Far-red vs. White
  misc_feature: MA Experiment 20001450 PARAMETER Experiment Name: At_Far-red-induction_P Parameter: Organism Value: A. thaliana
  misc_feature: MA Experiment 20001450 PARAMETER Experiment Name: At_Far-red-induction_P Parameter: Plant Line Value: Columbia
  misc_feature: MA Experiment 20001450 PARAMETER Experiment Name: At_Far-red-induction_P Parameter: Timepoint (hr) Value: 8
  misc_feature: MA Experiment 20001450 PARAMETER Experiment Name: At_Far-red-induction_P Parameter: Tissue Value: Whole Plant
  misc_feature: MA Experiment ID: 20001906 Result: Up-regulated in Transcription
  misc_feature: MA Experiment 20001906 PARAMETER Experiment Name: At_Drought_Reproduction_P Parameter: Age (day) Value: 35
  misc_feature: MA Experiment 20001906 PARAMETER Experiment Name: At_Drought_Reproduction_P Parameter: Organism Value: A. thaliana
  misc_feature: MA Experiment 20001906 PARAMETER Experiment Name: At_Drought_Reproduction_P Parameter: Plant Line Value: WS
  misc_feature: MA Experiment 20001906 PARAMETER Experiment Name: At_Drought_Reproduction_P Parameter: Timepoint (day) Value: 5
  misc_feature: MA Experiment 20001906 PARAMETER Experiment Name: At_Drought_Reproduction_P Parameter: Tissue Value: Siliques
  misc_feature: MA Experiment 20001906 PARAMETER Experiment Name: At_Drought_Reproduction_P Parameter: Treatment Value: Drought vs. No Drought
atgatgatgatgataattctcttgtggtcaataattttcatgaccattctcttcttaaaaaaacagttgagtgggaagaaaggtaagacacctccgtcaccaccgggacttccgttgatcggaaaccttcatcagctcggccgccacactcaccgatcactatgcgatctcagtcgccgttacggtcctctcatgctccttcacttaggtcgtgtccccgttcttatagtctcttccgcggacatggctcaagaaatcttgaagacgcacgaccaagctttcgcaaaccgcccacggtcaaaactctcccagaagcttctttacaacaatcgtgatgtggcctcagctccttatggagagtattggaggcaaatgaagtccgtgtgcgtcattcatctcttaagcaacaaaatggtacgatcttttcgagatgtaagagaagaagaaatcactttgatgatggcaaaaatccggaaatcgagttctttgccgtttaatgtaagcaaggtcttggagtgtttgaccaacgatgtgatatgtagagtcgctttgggacggaaatatggtggtgaaactgactttaagaagttaacggatagactaagcgagctattgggaacgtttagtatagggagttttgtaccgtggctcgcgtgggttgattggatccgcggttgggatgctcagctagataagatgggaaaggatcttgatgacttctttgagaaagttgtgcaagatcatgaagatggtgaccgccgagatgggactgatttgattgatgcattgctcagggttaaaagagaaaagagtcccgggtttgagatagagcgagtcagcataaaggcaatcacgttggatgtttttgtgggtggttcggacacatcgttcacgcttttggaatgggcaatgacagagcttctacgtcatccgaagtctctgaacagactccaagaagaagtccgtacgatttgtaaggggaagtcaagagtatctgaagatgacattcaaggaatgaaatacttaaaagctgtgatcaaagaggcactcaggctacatcctccatttccaatgatggctcctcatgaatcaacagaagatgttaaattaagagactaccacataccagccggtacacaagtgatgatgaatgcttgggcgatcgggagagaggttgccacatggggaccagacgcggaggagttcaaaccggagaggcatttagatacgtctgttgatttccgaggtcaaaactttgagctgcttccatttggagcagggagaaggatttgtccagcagtatcattcgctgtggtattgaatgaggtggttttggctaacttagtgcatgggtttgattggaaactaccggaggaatctaaagaagacaaaactgatgtcgctgaatccagcggtttttcggttcaccgcgagttccctctttatgccgttgcatcaccttacttgacttag

SEQ ID NO: 83892 - protein, 490 aa, Arabidopsis thaliana
  peptide (1)..(490): Ceres Seq. ID no. 12672304
  misc_feature (31)..(484): Pfam Name: Cytochrome P450 Pfam Description: Cytochrome P450
  misc_feature (1)..(490): Homolog of NCBI NO: 22331674 NR Description: similar to cytochrome p450 family; protein id: [Arabidopsis thaliana] >gi|13878400|sp|Q9STK8|C71P_ARATH
  misc_feature (1)..(486): Homolog of NCBI NO: 22331672 NR Description: similar to cytochrome P450-like protein; protein At3g48270.1 [Arabidopsis thaliana]
  misc_feature (1)..(486): Homolog of NCBI NO: 22331676 NR Description: similar to cytochrome P450-like protein; protein At3g48290.1 [Arabidopsis thaliana]
  misc_feature (2)..(486): Homolog of NCBI NO: 22331680 NR Description: Expressed protein; protein id: At3g48310.1, by cDNA: gi_20465426 [Arabidopsis thaliana] Cytochrome P450 71A22 >gi|7430647|pir||T06711 probable cytochrome
  misc_feature (2)..(486): Homolog of NCBI NO: 22331682 NR Description: similar to cytochrome P450-like protein; protein At3g48320.1 [Arabidopsis thaliana]
  misc_feature (1)..(286): Homolog of NCBI NO: 7430651 NR Description: probable cytochrome P450 T29H11.190 - Arabidopsis
  misc_feature (287)..(486): Homolog of NCBI NO: 7430651 NR Description: probable cytochrome P450 T29H11.190 - Arabidopsis
  misc_feature (3)..(486): Homolog of NCBI NO: 13878402 NR Description: Cytochrome P450 71A23 >gi|7430648|pir||T06712
  misc_feature (65)..(486): Homolog of NCBI NO: 22331678 NR Description: similar to cytochrome P450-like protein; protein
  misc_feature (1)..(486): Homolog of NCBI NO: 13878406 NR Description: Cytochrome P450 71A20 >gi|7430641|pir||T06288
MMMMIILLWSIIFMTILFLKKQLSGKKGKTPPSPPGLPLIGNLHQLGRHTHRSLCDLSRRYGPLMLLHLGRVPVLIVSSADMAQEILKTHDQAFANRPRSKLSQKLLYNNRDVASAPYGEYWRQMKSVCVIHLLSNKMVRSFRDVREEEITLMMAKIRKSSSLPFNVSKVLECLTNDVICRVALGRKYGGETDFKKLTDRLSELLGTFSIGSFVPWLAWVDWIRGWDAQLDKMGKDLDDFFEKVVQDHEDGDRRDGTDLIDALLRVKREKSPGFEIERVSIKAITLDVFVGGSDTSFTLLEWAMTELLRHPKSLNRLQEEVRTICKGKSRVSEDDIQGMKYLKAVIKEALRLHPPFPMMAPHESTEDVKLRDYHIPAGTQVMMNAWAIGREVATWGPDAEEFKPERHLDTSVDFRGQNFELLPFGAGRRICPAVSFAVVLNEVVLANLVHGFDWKLPEESKEDKTDVAESSGFSVHREFPLYAVASPYLT

SEQ ID NO: 83893 - protein, 489 aa, Arabidopsis thaliana
  peptide (1)..(489): Ceres Seq. ID no. 12672305
  misc_feature (30)..(483): Pfam Name: Cytochrome P450 Pfam Description: Cytochrome P450
  misc_feature (1)..(489): Homolog of NCBI NO: 22331674 NR Description: similar to cytochrome p450 family; protein id: [Arabidopsis thaliana] >gi|13878400|sp|Q9STK8|C71P_ARATH
  misc_feature (1)..(485): Homolog of NCBI NO: 22331672 NR Description: similar to cytochrome P450-like protein; protein At3g48270.1 [Arabidopsis thaliana]
  misc_feature (1)..(485): Homolog of NCBI NO: 22331676 NR Description: similar to cytochrome P450-like protein; protein At3g48290.1 [Arabidopsis thaliana]
  misc_feature (1)..(485): Homolog of NCBI NO: 22331680 NR Description: Expressed protein; protein id: At3g48310.1, by cDNA: gi_20465426 [Arabidopsis thaliana] Cytochrome P450 71A22 >gi|7430647|pir||T06711 probable cytochrome
  misc_feature (1)..(485): Homolog of NCBI NO: 22331682 NR Description: similar to cytochrome P450-like protein; protein At3g48320.1 [Arabidopsis thaliana]
  misc_feature (1)..(285): Homolog of NCBI NO: 7430651 NR Description: probable cytochrome P450 T29H11.190 - Arabidopsis
  misc_feature (286)..(485): Homolog of NCBI NO: 7430651 NR Description: probable cytochrome P450 T29H11.190 - Arabidopsis
  misc_feature (2)..(485): Homolog of NCBI NO: 13878402 NR Description: Cytochrome P450 71A23 >gi|7430648|pir||T06712
  misc_feature (64)..(485): Homolog of NCBI NO: 22331678 NR Description: similar to cytochrome P450-like protein; protein
  misc_feature (1)..(485): Homolog of NCBI NO: 13878406 NR Description: Cytochrome P450 71A20 >gi|7430641|pir||T06288
MMMIILLWSIIFMTILFLKKQLSGKKGKTPPSPPGLPLIGNLHQLGRHTHRSLCDLSRRYGPLMLLHLGRVPVLIVSSADMAQEILKTHDQAFANRPRSKLSQKLLYNNRDVASAPYGEYWRQMKSVCVIHLLSNKMVRSFRDVREEEITLMMAKIRKSSSLPFNVSKVLECLTNDVICRVALGRKYGGETDFKKLTDRLSELLGTFSIGSFVPWLAWVDWIRGWDAQLDKMGKDLDDFFEKVVQDHEDGDRRDGTDLIDALLRVKREKSPGFEIERVSIKAITLDVFVGGSDTSFTLLEWAMTELLRHPKSLNRLQEEVRTICKGKSRVSEDDIQGMKYLKAVIKEALRLHPPFPMMAPHESTEDVKLRDYHIPAGTQVMMNAWAIGREVATWGPDAEEFKPERHLDTSVDFRGQNFELLPFGAGRRICPAVSFAVVLNEVVLANLVHGFDWKLPEESKEDKTDVAESSGFSVHREFPLYAVASPYLT

SEQ ID NO: 83894 - protein, 488 aa, Arabidopsis thaliana
  peptide (1)..(488): Ceres Seq. ID no. 12672306
  misc_feature (29)..(482): Pfam Name: Cytochrome P450 Pfam Description: Cytochrome P450
  misc_feature (1)..(488): Homolog of NCBI NO: 22331674 NR Description: similar to cytochrome p450 family; protein id: [Arabidopsis thaliana] >gi|13878400|sp|Q9STK8|C71P_ARATH
  misc_feature (1)..(484): Homolog of NCBI NO: 22331672 NR Description: similar to cytochrome P450-like protein; protein At3g48270.1 [Arabidopsis thaliana]
  misc_feature (1)..(484): Homolog of NCBI NO: 22331676 NR Description: similar to cytochrome P450-like protein; protein At3g48290.1 [Arabidopsis thaliana]
  misc_feature (1)..(484): Homolog of NCBI NO: 22331680 NR Description: Expressed protein; protein id: At3g48310.1, by cDNA: gi_20465426 [Arabidopsis thaliana] Cytochrome P450 71A22 >gi|7430647|pir||T06711 probable cytochrome
  misc_feature (1)..(484): Homolog of NCBI NO: 22331682 NR Description: similar to cytochrome P450-like protein; protein At3g48320.1 [Arabidopsis thaliana]
  misc_feature (1)..(284): Homolog of NCBI NO: 7430651 NR Description: probable cytochrome P450 T29H11.190 - Arabidopsis
  misc_feature (285)..(484): Homolog of NCBI NO: 7430651 NR Description: probable cytochrome P450 T29H11.190 - Arabidopsis
  misc_feature (1)..(484): Homolog of NCBI NO: 13878402 NR Description: Cytochrome P450 71A23 >gi|7430648|pir||T06712
  misc_feature (63)..(484): Homolog of NCBI NO: 22331678 NR Description: similar to cytochrome P450-like protein; protein
  misc_feature (1)..(484): Homolog of NCBI NO: 13878406 NR Description: Cytochrome P450 71A20 >gi|7430641|pir||T06288
MMIILLWSIIFMTILFLKKQLSGKKGKTPPSPPGLPLIGNLHQLGRHTHRSLCDLSRRYGPLMLLHLGRVPVLIVSSADMAQEILKTHDQAFANRPRSKLSQKLLYNNRDVASAPYGEYWRQMKSVCVIHLLSNKMVRSFRDVREEEITLMMAKIRKSSSLPFNVSKVLECLTNDVICRVALGRKYGGETDFKKLTDRLSELLGTFSIGSFVPWLAWVDWIRGWDAQLDKMGKDLDDFFEKVVQDHEDGDRRDGTDLIDALLRVKREKSPGFEIERVSIKAITLDVFVGGSDTSFTLLEWAMTELLRHPKSLNRLQEEVRTICKGKSRVSEDDIQGMKYLKAVIKEALRLHPPFPMMAPHESTEDVKLRDYHIPAGTQVMMNAWAIGREVATWGPDAEEFKPERHLDTSVDFRGQNFELLPFGAGRRICPAVSFAVVLNEVVLANLVHGFDWKLPEESKEDKTDVAESSGFSVHREFPLYAVASPYLT

SEQ ID NO: 83895 - DNA, 1473 bp, Arabidopsis thaliana
  misc_feature (1)..(1473): Ceres Seq. ID no. 12672307
  misc_feature: MA Experiment ID: 20000264 Result: Down-regulated in Transcription
  misc_feature: MA Experiment 20000264 PARAMETER Experiment Name: At_Open_Flower_P Parameter: Age (day) Value: 21
  misc_feature: MA Experiment 20000264 PARAMETER Experiment Name: At_Open_Flower_P Parameter: Plant Line Value: WS
  misc_feature: MA Experiment 20000264 PARAMETER Experiment Name: At_Open_Flower_P Parameter: Tissue Value: Open Flower vs. Whole Plant
  misc_feature: MA Experiment ID: 20000495 Result: Down-regulated in Transcription
  misc_feature: MA Experiment 20000495 PARAMETER Experiment Name: At_Guard_Cells_P Parameter: Harvest Date Value: 8/2/2002
  misc_feature: MA Experiment 20000495 PARAMETER Experiment Name: At_Guard_Cells_P Parameter: Organism Value: A. thaliana
  misc_feature: MA Experiment 20000495 PARAMETER Experiment Name: At_Guard_Cells_P Parameter: Tissue Value: Guard Cells vs. Leaves
  misc_feature: MA Experiment ID: 20001248 Result: Down-regulated in Transcription
  misc_feature: MA Experiment 20001248 PARAMETER Experiment Name: At_Far-red-induction_P Parameter: Age (day) Value: 7
  misc_feature: MA Experiment 20001248 PARAMETER Experiment Name: At_Far-red-induction_P Parameter: Light Value: Far-red vs. White
  misc_feature: MA Experiment 20001248 PARAMETER Experiment Name: At_Far-red-induction_P Parameter: Organism Value: A. thaliana
  misc_feature: MA Experiment 20001248 PARAMETER Experiment Name: At_Far-red-induction_P Parameter: Plant Line Value: Columbia
  misc_feature: MA Experiment 20001248 PARAMETER Experiment Name: At_Far-red-induction_P Parameter: Timepoint (hr) Value: 4
  misc_feature: MA Experiment 20001248 PARAMETER Experiment Name: At_Far-red-induction_P Parameter: Tissue Value: Whole Plant
atggaatccatgacaatgataattctgcaaagcttaataatctttattaccatcctctttttcaaaaaacagaaaagagggaagaaaagcaacacacctcggtcaccaccgagacttccattgatcggaaaccttcatcaactcggccaccaccctcaccgatcactatgctctctcagccacagatacggccctctcatgctcctccatttaggccgtgtcccagttcttgtagtctcttccgccgacgtggctagagatattttgaagacgcatgatcgcgtttttgctagccgtccacggtcaaaactcttcgagaagctattttatgacgggcgtgatgtggccttcgctccttatggagagtattggaggcaaataaagagtgtgtgcgtcctccggctcctcagcaacaaaatggtcacgtcctttcgaaatgtgagacaagaagagatcagtctgatgatggagaagatccagaaatcaagttctttgcaagtgaatgtaagcgagctcttggggagtttaactaacgatgtgatatctagaattgctttgggacggaaatatagcggtgaaacagattctaaagagttaatgaaaaggctcatgatgctaatgggcgagtttagtgtggggacttatgtaccatggcttggatggattgattggatctctggtttggatggacagctaaataagacaggcaatgatcttgatgaattcttggagaaagttgttcaagatcatgtagatggtgacggacaaaggactgattttgtggatgtgttgctcagaattcagagagagaagagcatcggatttgaaatcgaccggttatgcataaaggctatcgtcttggatgttttagttgctggtacggattcatcgtacgcacttatggattgggcaatgacagagcttctacgtcacccagagtgtctgcgcacactccaggaagaagttcgtacgatttgtaagggtaatttgagtgtatcagaagaagacattcaaaacatgagctacttaaaagctgtaatcaaagagacaacgaggctacatcctccacttccattgttggctcctcacgaatcaatacaagatgttatattaggagattaccacataccagccggtacacaggtaatgatcaatgcttgggcaatcgggagagaggctgcgacgtgggggccagacgcagagaagtttagaccggagagacatttagattcgtctgttgatttccgaggtcacaattttgagctggttccatttggagcagggagaaggatttgtccagcaatatcattcgcagtggtcttgattgaggtggctttggctaactttgtgcatcggtatgattggaaattaccggaggattctaaagaaaatcaaaccaatgtcgctgaatcaaccggtatggtgattcaccgtttattccctctttacgccattgcatcatctactacttga

SEQ ID NO: 83896 - protein, 490 aa, Arabidopsis thaliana
  peptide (1)..(490): Ceres Seq. ID no. 12672308
  misc_feature (1)..(490): Homolog of NCBI NO: 22331682 NR Description: similar to cytochrome P450-like protein; protein At3g48320.1 [Arabidopsis thaliana]
  misc_feature (1)..(490): Homolog of NCBI NO: 22331680 NR Description: Expressed protein; protein id: At3g48310.1, by cDNA: gi_20465426 [Arabidopsis thaliana] Cytochrome P450 71A22 >gi|7430647|pir||T06711 probable cytochrome
  misc_feature (4)..(490): Homolog of NCBI NO: 22331672 NR Description: similar to cytochrome P450-like protein; protein At3g48270.1 [Arabidopsis thaliana]
  misc_feature (4)..(487): Homolog of NCBI NO: 22331676 NR Description: similar to cytochrome P450-like protein; protein At3g48290.1 [Arabidopsis thaliana]
  misc_feature (4)..(287): Homolog of NCBI NO: 7430651 NR Description: probable cytochrome P450 T29H11.190 - Arabidopsis
  misc_feature (288)..(487): Homolog of NCBI NO: 7430651 NR Description: probable cytochrome P450 T29H11.190 - Arabidopsis
  misc_feature (4)..(487): Homolog of NCBI NO: 22331674 NR Description: similar to cytochrome p450 family; protein id: [Arabidopsis thaliana] >gi|13878400|sp|Q9STK8|C71P_ARATH
  misc_feature (6)..(490): Homolog of NCBI NO: 13878402 NR Description: Cytochrome P450 71A23 >gi|7430648|pir||T06712
  misc_feature (67)..(490): Homolog of NCBI NO: 22331678 NR Description: similar to cytochrome P450-like protein; protein
  misc_feature (4)..(487): Homolog of NCBI NO: 15238664 NR Description: cytochrome P450-like protein; protein id: [Arabidopsis thaliana] >gi|13878366|sp|P58045|C71E_ARATH
MESMTMIILQSLIIFITILFFKKQKRGKKSNTPRSPPRLPLIGNLHQLGHHPHRSLCSLSHRYGPLMLLHLGRVPVLVVSSADVARDILKTHDRVFASRPRSKLFEKLFYDGRDVAFAPYGEYWRQIKSVCVLRLLSNKMVTSFRNVRQEEISLMMEKIQKSSSLQVNVSELLGSLTNDVISRIALGRKYSGETDSKELMKRLMMLMGEFSVGTYVPWLGWIDWISGLDGQLNKTGNDLDEFLEKVVQDHVDGDGQRTDFVDVLLRIQREKSIGFEIDRLCIKAIVLDVLVAGTDSSYALMDWAMTELLRHPECLRTLQEEVRTICKGNLSVSEEDIQNMSYLKAVIKETTRLHPPLPLLAPHESIQDVILGDYHIPAGTQVMINAWAIGREAATWGPDAEKFRPERHLDSSVDFRGHNFELVPFGAGRRICPAISFAVVLIEVALANFVHRYDWKLPEDSKENQTNVAESTGMVIHRLFPLYAIASSTT

SEQ ID NO: 83897 - protein, 487 aa, Arabidopsis thaliana
  peptide (1)..(487): Ceres Seq. ID no. 12672309
  misc_feature (1)..(487): Homolog of NCBI NO: 22331682 NR Description: similar to cytochrome P450-like protein; protein At3g48320.1 [Arabidopsis thaliana]
  misc_feature (1)..(487): Homolog of NCBI NO: 22331680 NR Description: Expressed protein; protein id: At3g48310.1, by cDNA: gi_20465426 [Arabidopsis thaliana] Cytochrome P450 71A22 >gi|7430647|pir||T06711 probable cytochrome
  misc_feature (1)..(487): Homolog of NCBI NO: 22331672 NR Description: similar to cytochrome P450-like protein; protein At3g48270.1 [Arabidopsis thaliana]
  misc_feature (1)..(484): Homolog of NCBI NO: 22331676 NR Description: similar to cytochrome P450-like protein; protein At3g48290.1 [Arabidopsis thaliana]
  misc_feature (1)..(284): Homolog of NCBI NO: 7430651 NR Description: probable cytochrome P450 T29H11.190 - Arabidopsis
  misc_feature (285)..(484): Homolog of NCBI NO: 7430651 NR Description: probable cytochrome P450 T29H11.190 - Arabidopsis
  misc_feature (1)..(484): Homolog of NCBI NO: 22331674 NR Description: similar to cytochrome p450 family; protein id: [Arabidopsis thaliana] >gi|13878400|sp|Q9STK8|C71P_ARATH
  misc_feature (3)..(487): Homolog of NCBI NO: 13878402 NR Description: Cytochrome P450 71A23 >gi|7430648|pir||T06712
  misc_feature (64)..(487): Homolog of NCBI NO: 22331678 NR Description: similar to cytochrome P450-like protein; protein
  misc_feature (1)..(484): Homolog of NCBI NO: 15238664 NR Description: cytochrome P450-like protein; protein id: [Arabidopsis thaliana] >gi|13878366|sp|P58045|C71E_ARATH
MTMIILQSLIIFITILFFKKQKRGKKSNTPRSPPRLPLIGNLHQLGHHPHRSLCSLSHRYGPLMLLHLGRVPVLVVSSADVARDILKTHDRVFASRPRSKLFEKLFYDGRDVAFAPYGEYWRQIKSVCVLRLLSNKMVTSFRNVRQEEISLMMEKIQKSSSLQVNVSELLGSLTNDVISRIALGRKYSGETDSKELMKRLMMLMGEFSVGTYVPWLGWIDWISGLDGQLNKTGNDLDEFLEKVVQDHVDGDGQRTDFVDVLLRIQREKSIGFEIDRLCIKAIVLDVLVAGTDSSYALMDWAMTELLRHPECLRTLQEEVRTICKGNLSVSEEDIQNMSYLKAVIKETTRLHPPLPLLAPHESIQDVILGDYHIPAGTQVMINAWAIGREAATWGPDAEKFRPERHLDSSVDFRGHNFELVPFGAGRRICPAISFAVVLIEVALANFVHRYDWKLPEDSKENQTNVAESTGMVIHRLFPLYAIASSTT

SEQ ID NO: 83898 - protein, 485 aa, Arabidopsis thaliana
  peptide (1)..(485): Ceres Seq. ID no. 12672310
  misc_feature (1)..(485): Homolog of NCBI NO: 22331682 NR Description: similar to cytochrome P450-like protein; protein At3g48320.1 [Arabidopsis thaliana]
  misc_feature (1)..(485): Homolog of NCBI NO: 22331680 NR Description: Expressed protein; protein id: At3g48310.1, by cDNA: gi_20465426 [Arabidopsis thaliana] Cytochrome P450 71A22 >gi|7430647|pir||T06711 probable cytochrome
  misc_feature (1)..(485): Homolog of NCBI NO: 22331672 NR Description: similar to cytochrome P450-like protein; protein At3g48270.1 [Arabidopsis thaliana]
  misc_feature (1)..(482): Homolog of NCBI NO: 22331676 NR Description: similar to cytochrome P450-like protein; protein At3g48290.1 [Arabidopsis thaliana]
  misc_feature (1)..(282): Homolog of NCBI NO: 7430651 NR Description: probable cytochrome P450 T29H11.190 - Arabidopsis
  misc_feature (283)..(482): Homolog of NCBI NO: 7430651 NR Description: probable cytochrome P450 T29H11.190 - Arabidopsis
  misc_feature (1)..(482): Homolog of NCBI NO: 22331674 NR Description: similar to cytochrome p450 family; protein id: [Arabidopsis thaliana] >gi|13878400|sp|Q9STK8|C71P_ARATH
  misc_feature (1)..(485): Homolog of NCBI NO: 13878402 NR Description: Cytochrome P450 71A23 >gi|7430648|pir||T06712
  misc_feature (62)..(485): Homolog of NCBI NO: 22331678 NR Description: similar to cytochrome P450-like protein; protein
  misc_feature (1)..(482): Homolog of NCBI NO: 15238664 NR Description: cytochrome P450-like protein; protein id: [Arabidopsis thaliana] >gi|13878366|sp|P58045|C71E_ARATH
MIILQSLIIFITILFFKKQKRGKKSNTPRSPPRLPLIGNLHQLGHHPHRSLCSLSHRYGPLMLLHLGRVPVLVVSSADVARDILKTHDRVFASRPRSKLFEKLFYDGRDVAFAPYGEYWRQIKSVCVLRLLSNKMVTSFRNVRQEEISLMMEKIQKSSSLQVNVSELLGSLTNDVISRIALGRKYSGETDSKELMKRLMMLMGEFSVGTYVPWLGWIDWISGLDGQLNKTGNDLDEFLEKVVQDHVDGDGQRTDFVDVLLRIQREKSIGFEIDRLCIKAIVLDVLVAGTDSSYALMDWAMTELLRHPECLRTLQEEVRTICKGNLSVSEEDIQNMSYLKAVIKETTRLHPPLPLLAPHESIQDVILGDYHIPAGTQVMINAWAIGREAATWGPDAEKFRPERHLDSSVDFRGHNFELVPFGAGRRICPAISFAVVLIEVALANFVHRYDWKLPEDSKENQTNVAESTGMVIHRLFPLYAIASSTT

SEQ ID NO: 83899 - DNA, 804 bp, Arabidopsis thaliana
  misc_feature (1)..(804): Ceres Seq. ID no. 12672334
  misc_feature: MA Experiment ID: 108434 Result: Down-regulated in Transcription
  misc_feature: MA Experiment 108434 PARAMETER Experiment Name: At_Root_Tips_cDNA_P Parameter: Tissue Value: Root Tips
  misc_feature: MA Experiment ID: 108435 Result: Up-regulated in Transcription
  misc_feature: MA Experiment 108435 PARAMETER Experiment Name: At_stm_Mutants_cDNA_P Parameter: Plant Line Value: wt Landsburg vs stm
  misc_feature: MA Experiment 108435 PARAMETER Experiment Name: At_stm_Mutants_cDNA_P Parameter: Tissue Value: Shoot Apical Meristem Region
  misc_feature: MA Experiment ID: 108463 Result: Up-regulated in Transcription
  misc_feature: MA Experiment 108463 PARAMETER Experiment Name: At_Germinating_Seeds_cDNA_P Parameter: Age (day) Value: 3 vs. 0
  misc_feature: MA Experiment 108463 PARAMETER Experiment Name: At_Germinating_Seeds_cDNA_P Parameter: Tissue Value: Germinating Seeds
  misc_feature: MA Experiment ID: 108501 Result: Down-regulated in Transcription
  misc_feature: MA Experiment 108501 PARAMETER Experiment Name: At_ap2_floral_buds_cDNA_P Parameter: Plant Line Value: ap2 (Ler.)
  misc_feature: MA Experiment 108501 PARAMETER Experiment Name: At_ap2_floral_buds_cDNA_P Parameter: Tissue Value: Closed Flower
  misc_feature: MA Experiment ID: 108577 Result: Down-regulated in Transcription
  misc_feature: MA Experiment 108577 PARAMETER Experiment Name: At_42deg_Heat_cDNA_P Parameter: Temperature (deg C) Value: 42 vs. 22
  misc_feature: MA Experiment 108577 PARAMETER Experiment Name: At_42deg_Heat_cDNA_P Parameter: Timepoint (hr) Value: 6
  misc_feature: MA Experiment 108577 PARAMETER Experiment Name: At_42deg_Heat_cDNA_P Parameter: Tissue Value: Aerial
  misc_feature: MA Experiment ID: 108579 Result: Down-regulated in Transcription
  misc_feature: MA Experiment 108579 PARAMETER Experiment Name: At_4deg_Cold_cDNA_P Parameter: Temperature (deg C) Value: 4 vs. 22
  misc_feature: MA Experiment 108579 PARAMETER Experiment Name: At_4deg_Cold_cDNA_P Parameter: Timepoint (hr) Value: 6
  misc_feature: MA Experiment 108579 PARAMETER Experiment Name: At_4deg_Cold_cDNA_P Parameter: Tissue Value: Aerial
  misc_feature: MA Experiment ID: 108585 Result: Down-regulated in Transcription
  misc_feature: MA Experiment 108585 PARAMETER Experiment Name: At_5mM_NaNP_cDNA_P Parameter: Timepoint (hr) Value: 6
  misc_feature: MA Experiment 108585 PARAMETER Experiment Name: At_5mM_NaNP_cDNA_P Parameter: Tissue Value: Aerial
  misc_feature: MA Experiment 108585 PARAMETER Experiment Name: At_5mM_NaNP_cDNA_P Parameter: Treatment Value: null
  misc_feature: MA Experiment ID: 108609 Result: Up-regulated in Transcription
  misc_feature: MA Experiment 108609 PARAMETER Experiment Name: At_100uM_ABA_cDNA_P Parameter: Timepoint (hr) Value: 24
  misc_feature: MA Experiment 108609 PARAMETER Experiment Name: At_100uM_ABA_cDNA_P Parameter: Tissue Value: Aerial
  misc_feature: MA Experiment 108609 PARAMETER Experiment Name: At_100uM_ABA_cDNA_P Parameter: Treatment Value: 100uM ABA vs. No Treatment
  misc_feature: MA Experiment ID: 20000068 Result: Up-regulated in Transcription
  misc_feature: MA Experiment ID: 20000069 Result: Up-regulated in Transcription
  misc_feature: MA Experiment 20000069 PARAMETER Experiment Name: At_100uM_ABA_Mutants_cDNA_P Parameter: Plant Line Value: CS23
  misc_feature: MA Experiment 20000069 PARAMETER Experiment Name: At_100uM_ABA_Mutants_cDNA_P Parameter: Timepoint (hr) Value: 6
  misc_feature: MA Experiment 20000069 PARAMETER Experiment Name: At_100uM_ABA_Mutants_cDNA_P Parameter: Tissue Value: Aerial
  misc_feature: MA Experiment 20000069 PARAMETER Experiment Name: At_100uM_ABA_Mutants_cDNA_P Parameter: Treatment Value: 100uM ABA vs. No Treatment
  misc_feature: MA Experiment ID: 20000071 Result: Up-regulated in Transcription
  misc_feature: MA Experiment 20000071 PARAMETER Experiment Name: At_100uM_ABA_Mutants_cDNA_P Parameter: Plant Line Value: CS8104
  misc_feature: MA Experiment 20000071 PARAMETER Experiment Name: At_100uM_ABA_Mutants_cDNA_P Parameter: Timepoint (hr) Value: 6
  misc_feature: MA Experiment 20000071 PARAMETER Experiment Name: At_100uM_ABA_Mutants_cDNA_P Parameter: Tissue Value: Aerial
  misc_feature: MA Experiment 20000071 PARAMETER Experiment Name: At_100uM_ABA_Mutants_cDNA_P Parameter: Treatment Value: 100uM ABA vs. No Treatment
  misc_feature: MA Experiment ID: 20000117 Result: Up-regulated in Transcription
  misc_feature: MA Experiment 20000117 PARAMETER Experiment Name: At_100uM_ABA_Mutants_cDNA_P Parameter: Plant Line Value: Columbia
  misc_feature: MA Experiment 20000117 PARAMETER Experiment Name: At_100uM_ABA_Mutants_cDNA_P Parameter: Timepoint (hr) Value: 6
  misc_feature: MA Experiment 20000117 PARAMETER Experiment Name: At_100uM_ABA_Mutants_cDNA_P Parameter: Tissue Value: Aerial
  misc_feature: MA Experiment 20000117 PARAMETER Experiment Name: At_100uM_ABA_Mutants_cDNA_P Parameter: Treatment Value: 100uM ABA vs. No Treatment
  misc_feature: MA Experiment ID: 20000179 Result: Up-regulated in Transcription
  misc_feature: MA Experiment 20000179 PARAMETER Experiment Name: At_Germinating_Seeds_P Parameter: Age (hr) Value: 6 vs. 0
  misc_feature: MA Experiment 20000179 PARAMETER Experiment Name: At_Germinating_Seeds_P Parameter: Tissue Value: Germinating Seeds
  misc_feature: MA Experiment ID: 20000180 Result: Up-regulated in Transcription
  misc_feature: MA Experiment 20000180 PARAMETER Experiment Name: At_Germinating_Seeds_P Parameter: Age (hr) Value: 24 vs. 0
  misc_feature: MA Experiment 20000180 PARAMETER Experiment Name: At_Germinating_Seeds_P Parameter: Tissue Value: Germinating Seeds
  misc_feature: MA Experiment ID: 20000185 Result: Down-regulated in Transcription
  misc_feature: MA Experiment 20000185 PARAMETER Experiment Name: At_Roots__P Parameter: Age (day) Value: 7 vs. 21
  misc_feature: MA Experiment 20000185 PARAMETER Experiment Name: At_Roots__P Parameter: Organism Value: A. thaliana
  misc_feature: MA Experiment 20000185 PARAMETER Experiment Name: At_Roots__P Parameter: Tissue Value: Roots vs. Whole Plant
  misc_feature: MA Experiment ID: 20000224 Result: Up-regulated in Transcription
  misc_feature: MA Experiment ID: 20000264 Result: Down-regulated in Transcription
  misc_feature: MA Experiment 20000264 PARAMETER Experiment Name: At_Open_Flower_P Parameter: Age (day) Value: 21
  misc_feature: MA Experiment 20000264 PARAMETER Experiment Name: At_Open_Flower_P Parameter: Plant Line Value: WS
  misc_feature: MA Experiment 20000264 PARAMETER Experiment Name: At_Open_Flower_P Parameter: Tissue Value: Open Flower vs. Whole Plant
  misc_feature: MA Experiment ID: 20000438 Result: Up-regulated in Transcription
  misc_feature: MA Experiment 20000438 PARAMETER Experiment Name: At_Shoots__P Parameter: Age (day) Value: 14
  misc_feature: MA Experiment 20000438 PARAMETER Experiment Name: At_Shoots__P Parameter: Tissue Value: Shoots vs. Whole Plant
  misc_feature: MA Experiment ID: 20000439 Result: Down-regulated in Transcription
  misc_feature: MA Experiment 20000439 PARAMETER Experiment Name: At_Roots__P Parameter: Age (day) Value: 14 vs. 21
  misc_feature: MA Experiment 20000439 PARAMETER Experiment Name: At_Roots__P Parameter: Organism Value: A. thaliana
  misc_feature: MA Experiment 20000439 PARAMETER Experiment Name: At_Roots__P Parameter: Tissue Value: Roots vs. Whole Plant
  misc_feature: MA Experiment ID: 20000441 Result: Down-regulated in Transcription
  misc_feature: MA Experiment 20000441 PARAMETER Experiment Name: At_1uM_BR-BRZ__P Parameter: Tissue Value: Shoot Apices
  misc_feature: MA Experiment 20000441 PARAMETER Experiment Name: At_1uM_BR-BRZ__P Parameter: Treatment Value: 1uM BR vs. No Treatment
  misc_feature: MA Experiment ID: 20000445 Result: Down-regulated in Transcription
  misc_feature: MA Experiment 20000445 PARAMETER Experiment Name: At_100uM_NAA__P Parameter: Age (day) Value: 14
  misc_feature: MA Experiment 20000445 PARAMETER Experiment Name: At_100uM_NAA__P Parameter: Organism Value: A. thaliana
  misc_feature: MA Experiment 20000445 PARAMETER Experiment Name: At_100uM_NAA__P Parameter: Plant Line Value: WS
  misc_feature: MA Experiment 20000445 PARAMETER Experiment Name: At_100uM_NAA__P Parameter: Timepoint (hr) Value: 6
  misc_feature: MA Experiment 20000445 PARAMETER Experiment Name: At_100uM_NAA__P Parameter: Tissue Value: Aerial
  misc_feature: MA Experiment 20000445 PARAMETER Experiment Name: At_100uM_NAA__P Parameter: Treatment Value: 100uM NAA vs. No Treatment
  misc_feature: MA Experiment ID: 20000453 Result: Up-regulated in Transcription
  misc_feature: MA Experiment 20000453 PARAMETER Experiment Name: At_100uM_ABA_P Parameter: Age (day) Value: 15
  misc_feature: MA Experiment 20000453 PARAMETER Experiment Name: At_100uM_ABA_P Parameter: Organism Value: A. thaliana
  misc_feature: MA Experiment 20000453 PARAMETER Experiment Name: At_100uM_ABA_P Parameter: Plant Line Value: WS
  misc_feature: MA Experiment 20000453 PARAMETER Experiment Name: At_100uM_ABA_P Parameter: Timepoint (hr) Value: 24
  misc_feature: MA Experiment 20000453 PARAMETER Experiment Name: At_100uM_ABA_P Parameter: Tissue Value: Aerial
  misc_feature: MA Experiment 20000453 PARAMETER Experiment Name: At_100uM_ABA_P Parameter: Treatment Value: 100uM ABA vs. No Treatment
  misc_feature: MA Experiment ID: 20000573 Result: Down-regulated in Transcription
  misc_feature: MA Experiment 20000573 PARAMETER Experiment Name: At_100uM_ABA_Mutants__P Parameter: Organism Value: A. thaliana
  misc_feature: MA Experiment 20000573 PARAMETER Experiment Name: At_100uM_ABA_Mutants__P Parameter: Plant Line Value: CS22 vs. Ler wt
  misc_feature: MA Experiment 20000573 PARAMETER Experiment Name: At_100uM_ABA_Mutants__P Parameter: Timepoint (hr) Value: N/A
  misc_feature: MA Experiment 20000573 PARAMETER Experiment Name: At_100uM_ABA_Mutants__P Parameter: Tissue Value: Whole Plant
  misc_feature: MA Experiment 20000573 PARAMETER Experiment Name: At_100uM_ABA_Mutants__P Parameter: Treatment Value: None
  misc_feature: MA Experiment ID: 20000574 Result: Down-regulated in Transcription
  misc_feature: MA Experiment 20000574 PARAMETER Experiment Name: At_100uM_ABA_Mutants__P Parameter: Organism Value: A. thaliana
  misc_feature: MA Experiment 20000574 PARAMETER Experiment Name: At_100uM_ABA_Mutants__P Parameter: Plant Line Value: CS23 vs. Ler wt
  misc_feature: MA Experiment 20000574 PARAMETER Experiment Name: At_100uM_ABA_Mutants__P Parameter: Timepoint (hr) Value: N/A
  misc_feature: MA Experiment 20000574 PARAMETER Experiment Name: At_100uM_ABA_Mutants__P Parameter: Tissue Value: Whole Plant
  misc_feature: MA Experiment 20000574 PARAMETER Experiment Name: At_100uM_ABA_Mutants__P Parameter: Treatment Value: None
  misc_feature: MA Experiment ID: 20000794 Result: Down-regulated in Transcription
  misc_feature: MA Experiment 20000794 PARAMETER Experiment Name: At_Petals_P Parameter: Age (day) Value: 23-25 days
  misc_feature: MA Experiment 20000794 PARAMETER Experiment Name: At_Petals_P Parameter: Plant Line Value: WS
  misc_feature: MA Experiment 20000794 PARAMETER Experiment Name: At_Petals_P Parameter: Tissue Value: Petals vs. Whole plant
  misc_feature: MA Experiment ID: 20001247 Result: Down-regulated in Transcription
  misc_feature: MA Experiment 20001247 PARAMETER Experiment Name: At_Far-red-induction_P Parameter: Age (day) Value: 7
  misc_feature: MA Experiment 20001247 PARAMETER Experiment Name: At_Far-red-induction_P Parameter: Light Value: Far-red vs. White
  misc_feature: MA Experiment 20001247 PARAMETER Experiment Name: At_Far-red-induction_P Parameter: Organism Value: A. thaliana
  misc_feature: MA Experiment 20001247 PARAMETER Experiment Name: At_Far-red-induction_P Parameter: Plant Line Value: Columbia
  misc_feature: MA Experiment 20001247 PARAMETER Experiment Name: At_Far-red-induction_P Parameter: Timepoint (hr) Value: 1
  misc_feature: MA Experiment 20001247 PARAMETER Experiment Name: At_Far-red-induction_P Parameter: Tissue Value: Whole Plant
  misc_feature: MA Experiment ID: 20001248 Result: Down-regulated in Transcription
  misc_feature: MA Experiment 20001248 PARAMETER Experiment Name: At_Far-red-induction_P Parameter: Age (day) Value: 7
  misc_feature: MA Experiment 20001248 PARAMETER Experiment Name: At_Far-red-induction_P Parameter: Light Value: Far-red vs. White
  misc_feature: MA Experiment 20001248 PARAMETER Experiment Name: At_Far-red-induction_P Parameter: Organism Value: A. thaliana
  misc_feature: MA Experiment 20001248 PARAMETER Experiment Name: At_Far-red-induction_P Parameter: Plant Line Value: Columbia
  misc_feature: MA Experiment 20001248 PARAMETER Experiment Name: At_Far-red-induction_P Parameter: Timepoint (hr) Value: 4
  misc_feature: MA Experiment 20001248 PARAMETER Experiment Name: At_Far-red-induction_P Parameter: Tissue Value: Whole Plant
  misc_feature: MA Experiment ID: 20001450 Result: Down-regulated in Transcription
  misc_feature: MA Experiment 20001450 PARAMETER Experiment Name: At_Far-red-induction_P Parameter: Age (day) Value: 7
  misc_feature: MA Experiment 20001450 PARAMETER Experiment Name: At_Far-red-induction_P Parameter: Light Value: Far-red vs. White
  misc_feature: MA Experiment 20001450 PARAMETER Experiment Name: At_Far-red-induction_P Parameter: Organism Value: A. thaliana
  misc_feature: MA Experiment 20001450 PARAMETER Experiment Name: At_Far-red-induction_P Parameter: Plant Line Value: Columbia
  misc_feature: MA Experiment 20001450 PARAMETER Experiment Name: At_Far-red-induction_P Parameter: Timepoint (hr) Value: 8
  misc_feature: MA Experiment 20001450 PARAMETER Experiment Name: At_Far-red-induction_P Parameter: Tissue Value: Whole Plant
  misc_feature: MA Experiment ID: 20001554 Result: Up-regulated in Transcription
  misc_feature: MA Experiment 20001554 PARAMETER Experiment Name: At_Drought_Soil_Dry_P Parameter: Age (day) Value: 21
  misc_feature: MA Experiment 20001554 PARAMETER Experiment Name: At_Drought_Soil_Dry_P Parameter: Organism Value: A. thaliana
  misc_feature: MA Experiment 20001554 PARAMETER Experiment Name: At_Drought_Soil_Dry_P Parameter: Plant Line Value: WS
  misc_feature: MA Experiment 20001554 PARAMETER Experiment Name: At_Drought_Soil_Dry_P Parameter: Post Timepoint (hr) Value: None
  misc_feature: MA Experiment 20001554 PARAMETER Experiment Name: At_Drought_Soil_Dry_P Parameter: Post-Treatment Value: None
  misc_feature: MA Experiment 20001554 PARAMETER Experiment Name: At_Drought_Soil_Dry_P Parameter: Timepoint (day) Value: 7
  misc_feature: MA Experiment 20001554 PARAMETER Experiment Name: At_Drought_Soil_Dry_P Parameter: Treatment Value: Drought vs. No Drought
  misc_feature: MA Experiment ID: 20001555 Result: Up-regulated in Transcription
  misc_feature: MA Experiment 20001555 PARAMETER Experiment Name: At_Drought_Soil_Dry_P Parameter: Age (day) Value: 24
  misc_feature: MA Experiment 20001555 PARAMETER Experiment Name: At_Drought_Soil_Dry_P Parameter: Organism Value: A. thaliana
  misc_feature: MA Experiment 20001555 PARAMETER Experiment Name: At_Drought_Soil_Dry_P Parameter: Plant Line Value: WS
  misc_feature: MA Experiment 20001555 PARAMETER Experiment Name: At_Drought_Soil_Dry_P Parameter: Post Timepoint (hr) Value: None
  misc_feature: MA Experiment 20001555 PARAMETER Experiment Name: At_Drought_Soil_Dry_P Parameter: Post-Treatment Value: None
  misc_feature: MA Experiment 20001555 PARAMETER Experiment Name: At_Drought_Soil_Dry_P Parameter: Timepoint (day) Value: 10
  misc_feature: MA Experiment 20001555 PARAMETER Experiment Name: At_Drought_Soil_Dry_P Parameter: Treatment Value: Drought vs. No Drought
  misc_feature: MA Experiment ID: 20001556 Result: Up-regulated in Transcription
  misc_feature: MA Experiment 20001556 PARAMETER Experiment Name: At_Drought_Soil_Dry_P Parameter: Age (day) Value: 26
  misc_feature: MA Experiment 20001556 PARAMETER Experiment Name: At_Drought_Soil_Dry_P Parameter: Organism Value: A. thaliana
  misc_feature: MA Experiment 20001556 PARAMETER Experiment Name: At_Drought_Soil_Dry_P Parameter: Plant Line Value: WS
  misc_feature: MA Experiment 20001556 PARAMETER Experiment Name: At_Drought_Soil_Dry_P Parameter: Post Timepoint (hr) Value: None
  misc_feature: MA Experiment 20001556 PARAMETER Experiment Name: At_Drought_Soil_Dry_P Parameter: Post-Treatment Value: None
  misc_feature: MA Experiment 20001556 PARAMETER Experiment Name: At_Drought_Soil_Dry_P Parameter: Timepoint (day) Value: 12
  misc_feature: MA Experiment 20001556 PARAMETER Experiment Name: At_Drought_Soil_Dry_P Parameter: Treatment Value: Drought vs. No Drought
  misc_feature: MA Experiment ID: 20001559 Result: Up-regulated in Transcription
  misc_feature: MA Experiment 20001559 PARAMETER Experiment Name: At_Drought_Soil_Dry_P Parameter: Age (day) Value: 28
  misc_feature: MA Experiment 20001559 PARAMETER Experiment Name: At_Drought_Soil_Dry_P Parameter: Organism Value: A. thaliana
  misc_feature: MA Experiment 20001559 PARAMETER Experiment Name: At_Drought_Soil_Dry_P Parameter: Plant Line Value: WS
  misc_feature: MA Experiment 20001559 PARAMETER Experiment Name: At_Drought_Soil_Dry_P Parameter: Post Timepoint (hr) Value: 29
  misc_feature: MA Experiment 20001559 PARAMETER Experiment Name: At_Drought_Soil_Dry_P Parameter: Post-Treatment Value: Re-Water vs. No Drought
  misc_feature: MA Experiment 20001559 PARAMETER Experiment Name: At_Drought_Soil_Dry_P Parameter: Timepoint (day) Value: 14
  misc_feature: MA Experiment 20001559 PARAMETER Experiment Name: At_Drought_Soil_Dry_P Parameter: Treatment Value: Drought vs. No Drought
  misc_feature: MA Experiment ID: 20001560 Result: Up-regulated in Transcription
  misc_feature: MA Experiment 20001560 PARAMETER Experiment Name: At_Drought_Soil_Dry_P Parameter: Age (day) Value: 28
  misc_feature: MA Experiment 20001560 PARAMETER Experiment Name: At_Drought_Soil_Dry_P Parameter: Organism Value: A. thaliana
  misc_feature: MA Experiment 20001560 PARAMETER Experiment Name: At_Drought_Soil_Dry_P Parameter: Plant Line Value: WS
  misc_feature: MA Experiment 20001560 PARAMETER Experiment Name: At_Drought_Soil_Dry_P Parameter: Post Timepoint (hr) Value: None
  misc_feature: MA Experiment 20001560 PARAMETER Experiment Name: At_Drought_Soil_Dry_P Parameter: Post-Treatment Value: None
  misc_feature: MA Experiment 20001560 PARAMETER Experiment Name: At_Drought_Soil_Dry_P Parameter: Timepoint (day) Value: 14
  misc_feature: MA Experiment 20001560 PARAMETER Experiment Name: At_Drought_Soil_Dry_P Parameter: Treatment Value: Drought vs. No Drought
  misc_feature: MA Experiment ID: 20001757 Result: Up-regulated in Transcription
  misc_feature: MA Experiment 20001757 PARAMETER Experiment Name: At_50mM_NH4NO3_L-to-H_P Parameter: Timepoint (hr) Value: 6
  misc_feature: MA Experiment 20001757 PARAMETER Experiment Name: At_50mM_NH4NO3_L-to-H_P Parameter: Tissue Value: Leaf
  misc_feature: MA Experiment 20001757 PARAMETER Experiment Name: At_50mM_NH4NO3_L-to-H_P Parameter: Treatment Value: 50mM NH4NO3 vs 100mM Mannitol
  misc_feature: MA Experiment ID: 20001906 Result: Up-regulated in Transcription
  misc_feature: MA Experiment 20001906 PARAMETER Experiment Name: At_Drought_Reproduction_P Parameter: Age (day) Value: 35
  misc_feature: MA Experiment 20001906 PARAMETER Experiment Name: At_Drought_Reproduction_P Parameter: Organism Value: A. thaliana
  misc_feature: MA Experiment 20001906 PARAMETER Experiment Name: At_Drought_Reproduction_P Parameter: Plant Line Value: WS
  misc_feature: MA Experiment 20001906 PARAMETER Experiment Name: At_Drought_Reproduction_P Parameter: Timepoint (day) Value: 5
  misc_feature: MA Experiment 20001906 PARAMETER Experiment Name: At_Drought_Reproduction_P Parameter: Tissue Value: Siliques
  misc_feature: MA Experiment 20001906 PARAMETER Experiment Name: At_Drought_Reproduction_P Parameter: Treatment Value: Drought vs. No Drought
  misc_feature: MA Experiment ID: 20001908 Result: Up-regulated in Transcription
  misc_feature: MA Experiment 20001908 PARAMETER Experiment Name: At_Drought_Reproduction_P Parameter: Age (day) Value: 40
  misc_feature: MA Experiment 20001908 PARAMETER Experiment Name: At_Drought_Reproduction_P Parameter: Organism Value: A. thaliana
  misc_feature: MA Experiment 20001908 PARAMETER Experiment Name: At_Drought_Reproduction_P Parameter: Plant Line Value: WS
  misc_feature: MA Experiment 20001908 PARAMETER Experiment Name: At_Drought_Reproduction_P Parameter: Timepoint (day) Value: 10
  misc_feature: MA Experiment 20001908 PARAMETER Experiment Name: At_Drought_Reproduction_P Parameter: Tissue Value: Siliques
  misc_feature: MA Experiment 20001908 PARAMETER Experiment Name: At_Drought_Reproduction_P Parameter: Treatment Value: Drought vs. No Drought
atgcaaacacaccacatgcagcaacaacaactccatcacttcgtctttgtccacggctcatgtcatggagcatggtgctggttcaaactagctgcaaagctcaagctcgatggtcaccgtgtgacagctatcgaccttggtggctccggtgtcgacacgaggcagctccatgaggttcgtttggtgtcggcgtatctagagcctttgatgagtttcatggagtctctccctgaaaacgagaaagtggttcttgttggtcatagctatggtggcattggaacttctcttgctatggaaaggtttccgaccaaagtctctgtcggaatcttcctctctgcttacatgccgcaccatgactctcctccggcggttttgattcaagagtattttacgagactaccagagggtttcgctatggactgtgagtttacattcgaggaaggattagaacacccaccaagttcagttttgttcggtactagtttcttgaaggagaaggcatatagtaattgccagttagaggatctagaattagccatggcgttgatgaaaccaagctggttatacactaaggaaatgggaggtgaagatctgataacaaaggagaggtatggatctgggaagagagtgtttattgtctgtgaaggcgacaatgtggttccagaggagattcagaagtggatgattagtaactacgagcctcacgaagttaagcggattgaagaagctggtcacatggctatgctcactaagcctcatgaactttctcaactgctacaagaaatagcagcgaaatataactaa

SEQ ID NO: 83900 - protein, 267 aa, Arabidopsis thaliana
  peptide (1)..(267): Ceres Seq. ID no. 12672335
  misc_feature (39)..(261): Pfam Name: alpha/beta hydrolase fold Pfam Description: alpha/beta hydrolase fold
  misc_feature (1)..(267): Homolog of NCBI NO: 30693313 NR Description: hydrolase, alpha/beta fold family [Arabidopsis >gi|18650620|gb|AAL75909.1| AT3g50440/T20E23_40 [Arabidopsis >gi|22655406|gb|AAM98295.1| At3g50440/T20E23_40 [Arabidopsis
  misc_feature (6)..(267): Homolog of NCBI NO: 11358112 NR Description: hypothetical protein T20E23.40 - Arabidopsis >gi|6561984|emb|CAB62473.1| putative protein [Arabidopsis
  misc_feature (7)..(266): Homolog of NCBI NO: 15227867 NR Description: putative acetone-cyanohydrin lyase; protein id:
  misc_feature (7)..(266): Homolog of NCBI NO: 27754457 NR Description: putative acetone-cyanohydrin lyase [Arabidopsis
  misc_feature (13)..(267): Homolog of NCBI NO: 40549303 NR Description: salicylic acid-binding protein 2 [Nicotiana
  misc_feature (7)..(267): Homolog of NCBI NO: 21554666 NR Description: putative acetone-cyanohydrin lyase [Arabidopsis
  misc_feature (7)..(266): Homolog of NCBI NO: 15227863 NR Description: putative acetone-cyanohydrin lyase; protein id: supported by cDNA: 26006., supported by cDNA: gi_13605602,
  misc_feature (13)..(266): Homolog of NCBI NO: 14279437 NR Description: ethylene-induced esterase [Citrus sinensis]
  misc_feature (7)..(266): Homolog of NCBI NO: 15227865 NR Description: putative acetone-cyanohydrin lyase; protein id:
  misc_feature (9)..(263): Homolog of NCBI NO: 6651393 NR Description: polyneuridine aldehyde esterase [Rauvolfia
MQTHHMQQQQLHHFVFVHGSCHGAWCWFKLAAKLKLDGHRVTAIDLGGSGVDTRQLHEVRLVSAYLEPLMSFMESLPENEKVVLVGHSYGGIGTSLAMERFPTKVSVGIFLSAYMPHHDSPPAVLIQEYFTRLPEGFAMDCEFTFEEGLEHPPSSVLFGTSFLKEKAYSNCQLEDLELAMALMKPSWLYTKEMGGEDLITKERYGSGKRVFIVCEGDNVVPEEIQKWMISNYEPHEVKRIEEAGHMAMLTKPHELSQLLQEIAAKYN

SEQ ID NO: 83901 - protein, 262 aa, Arabidopsis thaliana
  peptide (1)..(262): Ceres Seq. ID no. 12672336
  misc_feature (34)..(256): Pfam Name: alpha/beta hydrolase fold Pfam Description: alpha/beta hydrolase fold
  misc_feature (1)..(262): Homolog of NCBI NO: 30693313 NR Description: hydrolase, alpha/beta fold family [Arabidopsis >gi|18650620|gb|AAL75909.1| AT3g50440/T20E23_40 [Arabidopsis >gi|22655406|gb|AAM98295.1| At3g50440/T20E23_40 [Arabidopsis
  misc_feature (1)..(262): Homolog of NCBI NO: 11358112 NR Description: hypothetical protein T20E23.40 - Arabidopsis >gi|6561984|emb|CAB62473.1| putative protein [Arabidopsis
  misc_feature (2)..(261): Homolog of NCBI NO: 15227867 NR Description: putative acetone-cyanohydrin lyase; protein id:
  misc_feature (2)..(261): Homolog of NCBI NO: 27754457 NR Description: putative acetone-cyanohydrin lyase [Arabidopsis
  misc_feature (8)..(262): Homolog of NCBI NO: 40549303 NR Description: salicylic acid-binding protein 2 [Nicotiana
  misc_feature (2)..(262): Homolog of NCBI NO: 21554666 NR Description: putative acetone-cyanohydrin lyase [Arabidopsis
  misc_feature (2)..(261): Homolog of NCBI NO: 15227863 NR Description: putative acetone-cyanohydrin lyase; protein id: supported by cDNA: 26006., supported by cDNA: gi_13605602,
  misc_feature (8)..(261): Homolog of NCBI NO: 14279437 NR Description: ethylene-induced esterase [Citrus sinensis]
  misc_feature (2)..(261): Homolog of NCBI NO: 15227865 NR Description: putative acetone-cyanohydrin lyase; protein id:
  misc_feature (4)..(258): Homolog of NCBI NO: 6651393 NR Description: polyneuridine aldehyde esterase [Rauvolfia
MQQQQLHHFVFVHGSCHGAWCWFKLAAKLKLDGHRVTAIDLGGSGVDTRQLHEVRLVSAYLEPLMSFMESLPENEKVVLVGHSYGGIGTSLAMERFPTKVSVGIFLSAYMPHHDSPPAVLIQEYFTRLPEGFAMDCEFTFEEGLEHPPSSVLFGTSFLKEKAYSNCQLEDLELAMALMKPSWLYTKEMGGEDLITKERYGSGKRVFIVCEGDNVVPEEIQKWMISNYEPHEVKRIEEAGHMAMLTKPHELSQLLQEIAAKYN

SEQ ID NO: 83902 - protein, 198 aa, Arabidopsis thaliana
  peptide (1)..(198): Ceres Seq. ID no. 12672337
  misc_feature (1)..(192): Pfam Name: alpha/beta hydrolase fold Pfam Description: alpha/beta hydrolase fold
  misc_feature (1)..(198): Homolog of NCBI NO: 30693313 NR Description: hydrolase, alpha/beta fold family [Arabidopsis >gi|18650620|gb|AAL75909.1| AT3g50440/T20E23_40 [Arabidopsis >gi|22655406|gb|AAM98295.1| At3g50440/T20E23_40 [Arabidopsis
  misc_feature (1)..(198): Homolog of NCBI NO: 11358112 NR Description: hypothetical protein T20E23.40 - Arabidopsis >gi|6561984|emb|CAB62473.1| putative protein [Arabidopsis
  misc_feature (1)..(197): Homolog of NCBI NO: 15227867 NR Description: putative acetone-cyanohydrin lyase; protein id:
  misc_feature (1)..(197): Homolog of NCBI NO: 27754457 NR Description: putative acetone-cyanohydrin lyase [Arabidopsis
  misc_feature (1)..(198): Homolog of NCBI NO: 40549303 NR Description: salicylic acid-binding protein 2 [Nicotiana
  misc_feature (1)..(198): Homolog of NCBI NO: 21554666 NR Description: putative acetone-cyanohydrin lyase [Arabidopsis
  misc_feature (1)..(197): Homolog of NCBI NO: 15227863 NR Description: putative acetone-cyanohydrin lyase; protein id: supported by cDNA: 26006., supported by cDNA: gi_13605602,
  misc_feature (1)..(197): Homolog of NCBI NO: 14279437 NR Description: ethylene-induced esterase [Citrus sinensis]
  misc_feature (1)..(197): Homolog of NCBI NO: 15227865 NR Description: putative acetone-cyanohydrin lyase; protein id:
  misc_feature (1)..(194): Homolog of NCBI NO: 6651393 NR Description: polyneuridine aldehyde esterase [Rauvolfia
MSFMESLPENEKVVLVGHSYGGIGTSLAMERFPTKVSVGIFLSAYMPHHDSPPAVLIQEYFTRLPEGFAMDCEFTFEEGLEHPPSSVLFGTSFLKEKAYSNCQLEDLELAMALMKPSWLYTKEMGGEDLITKERYGSGKRVFIVCEGDNVVPEEIQKWMISNYEPHEVKRIEEAGHMAMLTKPHELSQLLQEIAAKYN

SEQ ID NO: 83903 - DNA, 2287 bp, Arabidopsis thaliana
  misc_feature (1)..(2287): Ceres Seq. ID no. 12672338
  misc_feature: MA Experiment ID: 20000179 Result: Up-regulated in Transcription
  misc_feature: MA Experiment 20000179 PARAMETER Experiment Name: At_Germinating_Seeds_P Parameter: Age (hr) Value: 6 vs. 0
  misc_feature: MA Experiment 20000179 PARAMETER Experiment Name: At_Germinating_Seeds_P Parameter: Tissue Value: Germinating Seeds
  misc_feature: MA Experiment ID: 20000180 Result: Up-regulated in Transcription
  misc_feature: MA Experiment 20000180 PARAMETER Experiment Name: At_Germinating_Seeds_P Parameter: Age (hr) Value: 24 vs. 0
  misc_feature: MA Experiment 20000180 PARAMETER Experiment Name: At_Germinating_Seeds_P Parameter: Tissue Value: Germinating Seeds
  misc_feature: MA Experiment ID: 20000264 Result: Up-regulated in Transcription
  misc_feature: MA Experiment 20000264 PARAMETER Experiment Name: At_Open_Flower_P Parameter: Age (day) Value: 21
  misc_feature: MA Experiment 20000264 PARAMETER Experiment Name: At_Open_Flower_P Parameter: Plant Line Value: WS
  misc_feature: MA Experiment 20000264 PARAMETER Experiment Name: At_Open_Flower_P Parameter: Tissue Value: Open Flower vs. Whole Plant
  misc_feature: MA Experiment ID: 20000265 Result: Up-regulated in Transcription
  misc_feature: MA Experiment 20000265 PARAMETER Experiment Name: At_Open_Flower_P Parameter: Age (day) Value: 21
  misc_feature: MA Experiment 20000265 PARAMETER Experiment Name: At_Open_Flower_P Parameter: Plant Line Value: WS
  misc_feature: MA Experiment 20000265 PARAMETER Experiment Name: At_Open_Flower_P Parameter: Tissue Value: Closed Flower vs. Whole Plant
  misc_feature: MA Experiment ID: 20000286 Result: Up-regulated in Transcription
  misc_feature: MA Experiment 20000286 PARAMETER Experiment Name: At_Open_Flower_P Parameter: Age (day) Value: 21
  misc_feature: MA Experiment 20000286 PARAMETER Experiment Name: At_Open_Flower_P Parameter: Plant Line Value: WS
  misc_feature: MA Experiment 20000286 PARAMETER Experiment Name: At_Open_Flower_P Parameter: Tissue Value: Half Open vs. Whole Plant
  misc_feature: MA Experiment ID: 20000437 Result: Down-regulated in Transcription
  misc_feature: MA Experiment 20000437 PARAMETER Experiment Name: At_Drought_P Parameter: Age (day) Value: 8
  misc_feature: MA Experiment 20000437 PARAMETER Experiment Name: At_Drought_P Parameter: Organism Value: A. thaliana
  misc_feature: MA Experiment 20000437 PARAMETER Experiment Name: At_Drought_P Parameter: Plant Line Value: WS
  misc_feature: MA Experiment 20000437 PARAMETER Experiment Name: At_Drought_P Parameter: Timepoint (hr) Value: 24
  misc_feature: MA Experiment 20000437 PARAMETER Experiment Name: At_Drought_P Parameter: Tissue Value: Whole Plant
  misc_feature: MA Experiment 20000437 PARAMETER Experiment Name: At_Drought_P Parameter: Treatment Value: Drought vs. No Drought
  misc_feature: MA Experiment ID: 20000794 Result: Up-regulated in Transcription
  misc_feature: MA Experiment 20000794 PARAMETER Experiment Name: At_Petals_P Parameter: Age (day) Value: 23-25 days
  misc_feature: MA Experiment 20000794 PARAMETER Experiment Name: At_Petals_P Parameter: Plant Line Value: WS
  misc_feature: MA Experiment 20000794 PARAMETER Experiment Name: At_Petals_P Parameter: Tissue Value: Petals vs. Whole plant
  misc_feature: MA Experiment ID: 20001911 Result: Down-regulated in Transcription
  misc_feature: MA Experiment 20001911 PARAMETER Experiment Name: At_Drought_Reproduction_P Parameter: Age (day) Value: 40
  misc_feature: MA Experiment 20001911 PARAMETER Experiment Name: At_Drought_Reproduction_P Parameter: Organism Value: A. thaliana
  misc_feature: MA Experiment 20001911 PARAMETER Experiment Name: At_Drought_Reproduction_P Parameter: Plant Line Value: WS
  misc_feature: MA Experiment 20001911 PARAMETER Experiment Name: At_Drought_Reproduction_P Parameter: Timepoint (day) Value: 10
  misc_feature: MA Experiment 20001911 PARAMETER Experiment Name: At_Drought_Reproduction_P Parameter: Tissue Value: Flowers
  misc_feature: MA Experiment 20001911 PARAMETER Experiment Name: At_Drought_Reproduction_P Parameter: Treatment Value: Drought vs. No Drought
ctttggaattcgccattgacaaagtactcaattccaaaacaaagaataagcaaacaacaacaattttcacttccttcaaaaattataaaaatccagtttttatctttgcaagattcaaaagtttgaatttttacttgttttgatttctgggttttgtttgttttttgatttcggtaatgatacaattgagattttgatttcgtgtgatgttgagagattcttaaatgggtctatgtacttcgaaaccgaattcatctaattccgatcaaactccggcgaggaatagtccacttccggcgtctgaatccgtcaagccttcgagctcttccgttaatggtgaagatcagtgtgtaacaacaacgaacaatgaaggcaaaaagtctccgtttttccctttttatagtccaagtccagctcactatttcttctccaagaagactccggcgagatctccggcgactaattcgactaattcgactccgaagcgattctttaaacggccgtttcctcctccgtctccggctaaacatatcagagctgttttagcgagaaggcatggttctgtgaagcctaattcgtcggcgatccctgaaggtagtgaagctgaaggaggtggtgttggattggataaaagctttggtttttccaagagttttgcgagtaagtatgagcttggtgatgaagttggtcgtggtcattttggttatacttgtgctgctaagtttaagaagggtgataataaaggtcaacaagtcgcggttaaagtcattcccaaagcaaagatgacgacggctattgcaattgaagatgtgagaagggaagtgaagatattgagggctttgtctggtcataacaatcttcctcatttctatgatgcttatgaggatcatgataatgtctatatagtgatggaactatgtgaaggaggagagcttttggatagaatactttcaagaggtgggaagtacacagaggaggatgcaaagaccgttatgatacaaatattgaatgtggttgctttttgtcatctgcaaggcgttgtacacagagatcttaaaccagagaattttctttttacctcaaaagaagacacctctcaattgaaggcaatagatttcggtttgtcagattacgtgagaccagatgagaggctcaatgacattgttggtagtgcatactatgtagcacctgaagttctgcatagatcttacagtacagaagctgatatttggagtgttggtgtgattgtatatattctattgtgtggaagccgaccgttttgggctaggacagaatcaggaatctttcgtgctgttctaaaagctgatccaagttttgatgaccctccttggcctttgttatcttcagaggcaagagattttgtaaagcggttgctaaacaaagatccgcgtaaaagattaacagctgctcaagccttaagtcatccatggataaaggactcaaacgacgcaaaggttccaatggatattctggttttcaaacttatgagagcttatttacgatcatcatctctccgtaaagctgcattaagagctttatcgaaaacacttacggttgatgaactgttttatctgagagagcagtttgctttgttagaacctagtaagaacggaaccataagtctagaaaacatcaaatcagctctgatgaaaatggcaacagatgcgatgaaggactcacgtattccagagttcttaggacaactgagtgctcttcaatatagaagaatggactttgaggaattctgtgcagcggcattgagtgttcaccagctagaagctcttgatcgatgggaacaacacgctcgttgtgcttatgagcttttcgaaaaggaagggaaccgaccaatcatgatcgatgaactcgcttcggaacttggtcttggcccttctgtaccggttcacgcagtgcttcacgattggcttagacataccgatgggaagcttagctttctcggatttgtgaaattgctacatggtgtgtctagccgcacgatcaaagctcattagaagggttttgaaactttgaatgatatgtatgaaatttgtctgagctctaaggtctcattctcctaggagttataatatgtggcttttgacttttgttatgaaagctgagaagcaaagattataaaaaaaaatgagtgtagcaaaaaaagagagaagtgtgttagttttgtagagaatgatatgatattttccccaaatttggtaacttatgacgattgatgatatttctgacatttttagattttgctttttttgac

SEQ ID NO: 83904 - protein, 601 aa, Arabidopsis thaliana
  peptide (1)..(601): Ceres Seq. ID no. 12672339
  misc_feature (148)..(410): Pfam Name: Protein kinase domain Pfam Description: Protein kinase domain
  misc_feature (1)..(598): Homolog of NCBI NO: 16904226 NR Description: calcium/calmodulin-dependent protein kinase CaMK3
  misc_feature (1)..(598): Homolog of NCBI NO: 1706130 NR Description: CDPK-related protein kinase (PK421)
  misc_feature (1)..(598): Homolog of NCBI NO: 33146627 NR Description: putative CDPK-related protein kinase [Oryza
  misc_feature (1)..(598): Homolog of NCBI NO: 23237898 NR Description: putative calcium/calmodulin-dependent protein
  misc_feature (24)..(599): Homolog of NCBI NO: 15226841 NR Description: CPDK-related protein kinase; protein id: supported by cDNA: gi_16904217, supported by cDNA: gi_5020365
  misc_feature (44)..(599): Homolog of NCBI NO: 15229002 NR Description: calcium-dependent protein kinase-like; protein id:
  misc_feature (1)..(598): Homolog of NCBI NO: 14133874 NR Description: CaMK1 [Oryza sativa]
  misc_feature (1)..(596): Homolog of NCBI NO: 15222781 NR Description: CDPK-related protein kinase, putative; protein id:
  misc_feature (1)..(596): Homolog of NCBI NO: 15230288 NR Description: CDPK-related kinase; protein id: At3g19100.1, by cDNA: gi_16604465, supported by cDNA: gi_16904215, supported
  misc_feature (11)..(601): Homolog of NCBI NO: 25053813 NR Description: calcium/calmodulin protein kinase 1 [Nicotiana
MGLCTSKPNSSNSDQTPARNSPLPASESVKPSSSSVNGEDQCVTTTNNEGKKSPFFPFYSPSPAHYFFSKKTPARSPATNSTNSTPKRFFKRPFPPPSPAKHIRAVLARRHGSVKPNSSAIPEGSEAEGGGVGLDKSFGFSKSFASKYELGDEVGRGHFGYTCAAKFKKGDNKGQQVAVKVIPKAKMTTAIAIEDVRREVKILRALSGHNNLPHFYDAYEDHDNVYIVMELCEGGELLDRILSRGGKYTEEDAKTVMIQILNVVAFCHLQGVVHRDLKPENFLFTSKEDTSQLKAIDFGLSDYVRPDERLNDIVGSAYYVAPEVLHRSYSTEADIWSVGVIVYILLCGSRPFWARTESGIFRAVLKADPSFDDPPWPLLSSEARDFVKRLLNKDPRKRLTAAQALSHPWIKDSNDAKVPMDILVFKLMRAYLRSSSLRKAALRALSKTLTVDELFYLREQFALLEPSKNGTISLENIKSALMKMATDAMKDSRIPEFLGQLSALQYRRMDFEEFCAAALSVHQLEALDRWEQHARCAYELFEKEGNRPIMIDELASELGLGPSVPVHAVLHDWLRHTDGKLSFLGFVKLLHGVSSRTIKAH

SEQ ID NO: 83905 - protein, 415 aa, Arabidopsis thaliana
  peptide (1)..(415): Ceres Seq. ID no. 12672340
  misc_feature (1)..(224): Pfam Name: Protein kinase domain Pfam Description: Protein kinase domain
  misc_feature (1)..(412): Homolog of NCBI NO: 16904226 NR Description: calcium/calmodulin-dependent protein kinase CaMK3
  misc_feature (1)..(412): Homolog of NCBI NO: 1706130 NR Description: CDPK-related protein kinase (PK421)
  misc_feature (1)..(412): Homolog of NCBI NO: 33146627 NR Description: putative CDPK-related protein kinase [Oryza
  misc_feature (1)..(412): Homolog of NCBI NO: 23237898 NR Description: putative calcium/calmodulin-dependent protein
  misc_feature (1)..(413): Homolog of NCBI NO: 15226841 NR Description: CPDK-related protein kinase; protein id: supported by cDNA: gi_16904217, supported by cDNA: gi_5020365
  misc_feature (1)..(413): Homolog of NCBI NO: 15229002 NR Description: calcium-dependent protein kinase-like; protein id:
  misc_feature (1)..(412): Homolog of NCBI NO: 14133874 NR Description: CaMK1 [Oryza sativa]
  misc_feature (1)..(410): Homolog of NCBI NO: 15222781 NR Description: CDPK-related protein kinase, putative; protein id:
  misc_feature (1)..(410): Homolog of NCBI NO: 15230288 NR Description: CDPK-related kinase; protein id: At3g19100.1, by cDNA: gi_16604465, supported by cDNA: gi_16904215, supported
  misc_feature (1)..(415): Homolog of NCBI NO: 25053813 NR Description: calcium/calmodulin protein kinase 1 [Nicotiana
MTTAIAIEDVRREVKILRALSGHNNLPHFYDAYEDHDNVYIVMELCEGGELLDRILSRGGKYTEEDAKTVMIQILNVVAFCHLQGVVHRDLKPENFLFTSKEDTSQLKAIDFGLSDYVRPDERLNDIVGSAYYVAPEVLHRSYSTEADIWSVGVIVYILLCGSRPFWARTESGIFRAVLKADPSFDDPPWPLLSSEARDFVKRLLNKDPRKRLTAAQALSHPWIKDSNDAKVPMDILVFKLMRAYLRSSSLRKAALRALSKTLTVDELFYLREQFALLEPSKNGTISLENIKSALMKMATDAMKDSRIPEFLGQLSALQYRRMDFEEFCAAALSVHQLEALDRWEQHARCAYELFEKEGNRPIMIDELASELGLGPSVPVHAVLHDWLRHTDGKLSFLGFVKLLHGVSSRTIKAH

SEQ ID NO: 83906 - protein, 373 aa, Arabidopsis thaliana
  peptide (1)..(373): Ceres Seq. ID no. 12672341
  misc_feature (1)..(182): Pfam Name: Protein kinase domain Pfam Description: Protein kinase domain
  misc_feature (1)..(370): Homolog of NCBI NO: 16904226 NR Description: calcium/calmodulin-dependent protein kinase CaMK3
  misc_feature (1)..(370): Homolog of NCBI NO: 1706130 NR Description: CDPK-related protein kinase (PK421)
  misc_feature (1)..(370): Homolog of NCBI NO: 33146627 NR Description: putative CDPK-related protein kinase [Oryza
  misc_feature (1)..(370): Homolog of NCBI NO: 23237898 NR Description: putative calcium/calmodulin-dependent protein
  misc_feature (1)..(371): Homolog of NCBI NO: 15226841 NR Description: CPDK-related protein kinase; protein id: supported by cDNA: gi_16904217, supported by cDNA: gi_5020365
  misc_feature (1)..(371): Homolog of NCBI NO: 15229002 NR Description: calcium-dependent protein kinase-like; protein id:
  misc_feature (1)..(370): Homolog of NCBI NO: 14133874 NR Description: CaMK1 [Oryza sativa]
  misc_feature (1)..(368): Homolog of NCBI NO: 15222781 NR Description: CDPK-related protein kinase, putative; protein id:
  misc_feature (1)..(368): Homolog of NCBI NO: 15230288 NR Description: CDPK-related kinase; protein id: At3g19100.1, by cDNA: gi_16604465, supported by cDNA: gi_16904215, supported
  misc_feature (1)..(373): Homolog of NCBI NO: 25053813 NR Description: calcium/calmodulin protein kinase 1 [Nicotiana
MELCEGGELLDRILSRGGKYTEEDAKTVMIQILNVVAFCHLQGVVHRDLKPENFLFTSKEDTSQLKAIDFGLSDYVRPDERLNDIVGSAYYVAPEVLHRSYSTEADIWSVGVIVYILLCGSRPFWARTESGIFRAVLKADPSFDDPPWPLLSSEARDFVKRLLNKDPRKRLTAAQALSHPWIKDSNDAKVPMDILVFKLMRAYLRSSSLRKAALRALSKTLTVDELFYLREQFALLEPSKNGTISLENIKSALMKMATDAMKDSRIPEFLGQLSALQYRRMDFEEFCAAALSVHQLEALDRWEQHARCAYELFEKEGNRPIMIDELASELGLGPSVPVHAVLHDWLRHTDGKLSFLGFVKLLHGVSSRTIKAH

SEQ ID NO: 83907 - DNA, 1443 bp, Arabidopsis thaliana
  misc_feature (1)..(1443): Ceres Seq. ID no. 12672357
  misc_feature: MA Experiment ID: 20000307 Result: Down-regulated in Transcription
  misc_feature: MA Experiment 20000307 PARAMETER Experiment Name: At_Germinating_Seeds_Sub_P Parameter: Age (hr) Value: 24 vs. 0
  misc_feature: MA Experiment 20000307 PARAMETER Experiment Name: At_Germinating_Seeds_Sub_P Parameter: Organism Value: A. thaliana
  misc_feature: MA Experiment 20000307 PARAMETER Experiment Name: At_Germinating_Seeds_Sub_P Parameter: Plant Line Value: WS
  misc_feature: MA Experiment 20000307 PARAMETER Experiment Name: At_Germinating_Seeds_Sub_P Parameter: Tissue Value: Germinating Seeds
  misc_feature: MA Experiment ID: 20000328 Result: Up-regulated in Transcription
  misc_feature: MA Experiment 20000328 PARAMETER Experiment Name: At_42deg_Heat_Sub_P Parameter: Age (day) Value: 14
  misc_feature: MA Experiment 20000328 PARAMETER Experiment Name: At_42deg_Heat_Sub_P Parameter: Organism Value: A. thaliana
  misc_feature: MA Experiment 20000328 PARAMETER Experiment Name: At_42deg_Heat_Sub_P Parameter: Plant Line Value: WS
  misc_feature: MA Experiment 20000328 PARAMETER Experiment Name: At_42deg_Heat_Sub_P Parameter: Temperature (deg C) Value: 42 vs. 22
  misc_feature: MA Experiment 20000328 PARAMETER Experiment Name: At_42deg_Heat_Sub_P Parameter: Timepoint (hr) Value: 6
  misc_feature: MA Experiment 20000328 PARAMETER Experiment Name: At_42deg_Heat_Sub_P Parameter: Tissue Value: Aerial
atgagttcctctagtgaatctcatctagccaccgccaaaacagctctcacagcggttgcatcagttgctgcagccgcaatactagctcgatcagtggttcaagattacatgccaaacgaggttcatgaatatatctctcacggctttcgcagattcttcagctacttctcttatcagatgacagctgtaatagaagaatttggaggttttgaacacaaccaagtgtttgaagctgcagaggcttatctctccaccaagatatctaattccactagaagaatcaaagttaacaaacttgagaaacagagcaattatagtgttactgttgaacgtgatgaggaagttgttgatatttttgatggcgtcaagcttagttggatccttgtatgtcgccatgtcgataaaaaggattttcgtaacccgagagatctcaactccactttgaaatcagaagtgcgtagttacgagcttagtttccgaaagaagttcaagaacatggttcttgaatcttatttaccgtttgttgtggaacaagctgcttctattaaacaaaagtttaaaacattgaagatcttcaccgttgattcttactccgtggagtggacctctgtgactctagatcatccttccacgtttcgcactctcgctctggatcccgaggtgaagaaaaacttggtggaggatcttgatcgattcgtgcagcggaaaggcttttacgggagagttggaaaagcttggaagagaggttatttgttgtatggtcctcccggtactggaaaatcaagcttgatcgcagctatagctaatcatcttaacttcgatatctatgacttagacttgacatcacttaacaacaatgctgagctacggaggttacttatgtctactgcaaatcgttccattctagttgtggaagatatagattgttcaatcgagttaaaagatcggtctactgatcaagaaaacaacgatccgttacataaaacggtgatgcattttgattcactatcagttatgttgttatgtgatcttttgcttattagcattactaatgttttggttagtcattttcaggtcacactctctggtctattgaattttgtagacggactatggtcaagttgtggtaacgagcggattatagtgtttacgactaactacagagaaaaattggatccagcattgttgaggccaggacgtatggacatgcacattcacatgtcgtattgcacaccagctgcttttaaggttttggcttcgaattatctcgagattcaagatcatatacttttcgagcagattgaagaatttatccgagaaattgaagttacaccagcagaagtagctgaacaactgatgaggagtgactctgtggataaagtactccaaggacttgttgagttcttaaaagccaagaagcaaatagataattcaaaagcttag

SEQ ID NO: 83908 - protein, 480 aa, Arabidopsis thaliana
  peptide (1)..(480): Ceres Seq. ID no. 12672358
  misc_feature (249)..(462): Pfam Name: ATPase family associated with various cellular Pfam Description: ATPase family associated with various cellular
  misc_feature (1)..(480): Homolog of NCBI NO: 7485704 NR Description: hypothetical protein F18B3.220 - Arabidopsis >gi|4835245|emb|CAB42923.1| putative mitochondrial protein
  misc_feature (1)..(330): Homolog of NCBI NO: 30693380 NR Description: AAA-type ATPase family [Arabidopsis thaliana]
  misc_feature (356)..(480): Homolog of NCBI NO: 30693380 NR Description: AAA-type ATPase family [Arabidopsis thaliana]
  misc_feature (1)..(330): Homolog of NCBI NO: 39104562 NR Description: putative BCS1 protein [Arabidopsis thaliana]
  misc_feature (356)..(480): Homolog of NCBI NO: 39104562 NR Description: putative BCS1 protein [Arabidopsis thaliana]
  misc_feature (2)..(330): Homolog of NCBI NO: 21592769 NR Description: BCS1 protein-like protein [Arabidopsis thaliana]
  misc_feature (358)..(479): Homolog of NCBI NO: 21592769 NR Description: BCS1 protein-like protein [Arabidopsis thaliana]
  misc_feature (2)..(330): Homolog of NCBI NO: 7485703 NR Description: hypothetical protein F18B3.210 - Arabidopsis >gi|4835244|emb|CAB42922.1| putative mitochondrial protein thaliana] >gi|13877697|gb|AAK43926.1|AF370607_1 putative
  misc_feature (2)..(330): Homolog of NCBI NO: 30693378 NR Description: AAA-type ATPase family [Arabidopsis thaliana] AT3g50930/F18B3_210 [Arabidopsis thaliana]
  misc_feature (358)..(479): Homolog of NCBI NO: 7485703 NR Description: hypothetical protein F18B3.210 - Arabidopsis >gi|4835244|emb|CAB42922.1| putative mitochondrial protein thaliana] >gi|13877697|gb|AAK43926.1|AF370607_1 putative
MSSSSESHLATAKTALTAVASVAAAAILARSVVQDYMPNEVHEYISHGFRRFFSYFSYQMTAVIEEFGGFEHNQVFEAAEAYLSTKISNSTRRIKVNKLEKQSNYSVTVERDEEVVDIFDGVKLSWILVCRHVDKKDFRNPRDLNSTLKSEVRSYELSFRKKFKNMVLESYLPFVVEQAASIKQKFKTLKIFTVDSYSVEWTSVTLDHPSTFRTLALDPEVKKNLVEDLDRFVQRKGFYGRVGKAWKRGYLLYGPPGTGKSSLIAAIANHLNFDIYDLDLTSLNNNAELRRLLMSTANRSILVVEDIDCSIELKDRSTDQENNDPLHKTVMHFDSLSVMLLCDLLLISITNVLVSHFQVTLSGLLNFVDGLWSSCGNERIIVFTTNYREKLDPALLRPGRMDMHIHMSYCTPAAFKVLASNYLEIQDHILFEQIEEFIREIEVTPAEVAEQLMRSDSVDKVLQGLVEFLKAKKQIDNSKA

SEQ ID NO: 83909 - protein, 444 aa, Arabidopsis thaliana
  peptide (1)..(444): Ceres Seq. ID no. 12672359
  misc_feature (213)..(426): Pfam Name: ATPase family associated with various cellular Pfam Description: ATPase family associated with various cellular
  misc_feature (1)..(444): Homolog of NCBI NO: 7485704 NR Description: hypothetical protein F18B3.220 - Arabidopsis >gi|4835245|emb|CAB42923.1| putative mitochondrial protein
  misc_feature (1)..(294): Homolog of NCBI NO: 30693380 NR Description: AAA-type ATPase family [Arabidopsis thaliana]
  misc_feature (320)..(444): Homolog of NCBI NO: 30693380 NR Description: AAA-type ATPase family [Arabidopsis thaliana]
  misc_feature (1)..(294): Homolog of NCBI NO: 39104562 NR Description: putative BCS1 protein [Arabidopsis thaliana]
  misc_feature (320)..(444): Homolog of NCBI NO: 39104562 NR Description: putative BCS1 protein [Arabidopsis thaliana]
  misc_feature (1)..(294): Homolog of NCBI NO: 21592769 NR Description: BCS1 protein-like protein [Arabidopsis thaliana]
  misc_feature (322)..(443): Homolog of NCBI NO: 21592769 NR Description: BCS1 protein-like protein [Arabidopsis thaliana]
  misc_feature (1)..(294): Homolog of NCBI NO: 7485703 NR Description: hypothetical protein F18B3.210 - Arabidopsis >gi|4835244|emb|CAB42922.1| putative mitochondrial protein thaliana] >gi|13877697|gb|AAK43926.1|AF370607_1 putative
  misc_feature (1)..(294): Homolog of NCBI NO: 30693378 NR Description: AAA-type ATPase family [Arabidopsis thaliana] AT3g50930/F18B3_210 [Arabidopsis thaliana]
  misc_feature (322)..(443): Homolog of NCBI NO: 7485703 NR Description: hypothetical protein F18B3.210 - Arabidopsis >gi|4835244|emb|CAB42922.1| putative mitochondrial protein thaliana] >gi|13877697|gb|AAK43926.1|AF370607_1 putative
MPNEVHEYISHGFRRFFSYFSYQMTAVIEEFGGFEHNQVFEAAEAYLSTKISNSTRRIKVNKLEKQSNYSVTVERDEEVVDIFDGVKLSWILVCRHVDKKDFRNPRDLNSTLKSEVRSYELSFRKKFKNMVLESYLPFVVEQAASIKQKFKTLKIFTVDSYSVEWTSVTLDHPSTFRTLALDPEVKKNLVEDLDRFVQRKGFYGRVGKAWKRGYLLYGPPGTGKSSLIAAIANHLNFDIYDLDLTSLNNNAELRRLLMSTANRSILVVEDIDCSIELKDRSTDQENNDPLHKTVMHFDSLSVMLLCDLLLISITNVLVSHFQVTLSGLLNFVDGLWSSCGNERIIVFTTNYREKLDPALLRPGRMDMHIHMSYCTPAAFKVLASNYLEIQDHILFEQIEEFIREIEVTPAEVAEQLMRSDSVDKVLQGLVEFLKAKKQIDNSKA

SEQ ID NO: 83910 - protein, 421 aa, Arabidopsis thaliana
  peptide (1)..(421): Ceres Seq. ID no. 12672360
  misc_feature (190)..(403): Pfam Name: ATPase family associated with various cellular Pfam Description: ATPase family associated with various cellular
  misc_feature (1)..(421): Homolog of NCBI NO: 7485704 NR Description: hypothetical protein F18B3.220 - Arabidopsis >gi|4835245|emb|CAB42923.1| putative mitochondrial protein
  misc_feature (1)..(271): Homolog of NCBI NO: 30693380 NR Description: AAA-type ATPase family [Arabidopsis thaliana]
  misc_feature (297)..(421): Homolog of NCBI NO: 30693380 NR Description: AAA-type ATPase family [Arabidopsis thaliana]
  misc_feature (1)..(271): Homolog of NCBI NO: 39104562 NR Description: putative BCS1 protein [Arabidopsis thaliana]
  misc_feature (297)..(421): Homolog of NCBI NO: 39104562 NR Description: putative BCS1 protein [Arabidopsis thaliana]
  misc_feature (1)..(271): Homolog of NCBI NO: 21592769 NR Description: BCS1 protein-like protein [Arabidopsis thaliana]
  misc_feature (299)..(420): Homolog of NCBI NO: 21592769 NR Description: BCS1 protein-like protein [Arabidopsis thaliana]
  misc_feature (1)..(271): Homolog of NCBI NO: 7485703 NR Description: hypothetical protein F18B3.210 - Arabidopsis >gi|4835244|emb|CAB42922.1| putative mitochondrial protein thaliana] >gi|13877697|gb|AAK43926.1|AF370607_1 putative
  misc_feature (1)..(271): Homolog of NCBI NO: 30693378 NR Description: AAA-type ATPase family [Arabidopsis thaliana] AT3g50930/F18B3_210 [Arabidopsis thaliana]
  misc_feature (299)..(420): Homolog of NCBI NO: 7485703 NR Description: hypothetical protein F18B3.210 - Arabidopsis >gi|4835244|emb|CAB42922.1| putative mitochondrial protein thaliana] >gi|13877697|gb|AAK43926.1|AF370607_1 putative
MTAVIEEFGGFEHNQVFEAAEAYLSTKISNSTRRIKVNKLEKQSNYSVTVERDEEVVDIFDGVKLSWILVCRHVDKKDFRNPRDLNSTLKSEVRSYELSFRKKFKNMVLESYLPFVVEQAASIKQKFKTLKIFTVDSYSVEWTSVTLDHPSTFRTLALDPEVKKNLVEDLDRFVQRKGFYGRVGKAWKRGYLLYGPPGTGKSSLIAAIANHLNFDIYDLDLTSLNNNAELRRLLMSTANRSILVVEDIDCSIELKDRSTDQENNDPLHKTVMHFDSLSVMLLCDLLLISITNVLVSHFQVTLSGLLNFVDGLWSSCGNERIIVFTTNYREKLDPALLRPGRMDMHIHMSYCTPAAFKVLASNYLEIQDHILFEQIEEFIREIEVTPAEVAEQLMRSDSVDKVLQGLVEFLKAKKQIDNSKA

SEQ ID NO: 83911 - DNA, 1494 bp, Arabidopsis thaliana
  misc_feature (1)..(1494): Ceres Seq. ID no. 12672406
  misc_feature: MA Experiment ID: 20000179 Result: Up-regulated in Transcription
  misc_feature: MA Experiment 20000179 PARAMETER Experiment Name: At_Germinating_Seeds_P Parameter: Age (hr) Value: 6 vs. 0
  misc_feature: MA Experiment 20000179 PARAMETER Experiment Name: At_Germinating_Seeds_P Parameter: Tissue Value: Germinating Seeds
  misc_feature: MA Experiment ID: 20000180 Result: Up-regulated in Transcription
  misc_feature: MA Experiment 20000180 PARAMETER Experiment Name: At_Germinating_Seeds_P Parameter: Age (hr) Value: 24 vs. 0
  misc_feature: MA Experiment 20000180 PARAMETER Experiment Name: At_Germinating_Seeds_P Parameter: Tissue Value: Germinating Seeds
  misc_feature: MA Experiment ID: 20000234 Result: Up-regulated in Transcription
  misc_feature: MA Experiment 20000234 PARAMETER Experiment Name: At_Siliques_P Parameter: Age (day) Value: 21
  misc_feature: MA Experiment 20000234 PARAMETER Experiment Name: At_Siliques_P Parameter: Organism Value: A. thaliana
  misc_feature: MA Experiment 20000234 PARAMETER Experiment Name: At_Siliques_P Parameter: Plant Line Value: WS
  misc_feature: MA Experiment 20000234 PARAMETER Experiment Name: At_Siliques_P Parameter: Tissue Value: Less Than 5mm Siliques vs. Whole Plant
  misc_feature: MA Experiment ID: 20000264 Result: Up-regulated in Transcription
  misc_feature: MA Experiment 20000264 PARAMETER Experiment Name: At_Open_Flower_P Parameter: Age (day) Value: 21
  misc_feature: MA Experiment 20000264 PARAMETER Experiment Name: At_Open_Flower_P Parameter: Plant Line Value: WS
  misc_feature: MA Experiment 20000264 PARAMETER Experiment Name: At_Open_Flower_P Parameter: Tissue Value: Open Flower vs. Whole Plant
  misc_feature: MA Experiment ID: 20000265 Result: Up-regulated in Transcription
  misc_feature: MA Experiment 20000265 PARAMETER Experiment Name: At_Open_Flower_P Parameter: Age (day) Value: 21
  misc_feature: MA Experiment 20000265 PARAMETER Experiment Name: At_Open_Flower_P Parameter: Plant Line Value: WS
  misc_feature: MA Experiment 20000265 PARAMETER Experiment Name: At_Open_Flower_P Parameter: Tissue Value: Closed Flower vs. Whole Plant
  misc_feature: MA Experiment ID: 20000286 Result: Up-regulated in Transcription
  misc_feature: MA Experiment 20000286 PARAMETER Experiment Name: At_Open_Flower_P Parameter: Age (day) Value: 21
  misc_feature: MA Experiment 20000286 PARAMETER Experiment Name: At_Open_Flower_P Parameter: Plant Line Value: WS
  misc_feature: MA Experiment 20000286 PARAMETER Experiment Name: At_Open_Flower_P Parameter: Tissue Value: Half Open vs. Whole Plant
atgttcaacaaaatcataaaactgggtcagaagaaattcaacaaatcagatcaacatcaccaagataacaacaacaacaacaacaatacctccaccaacaccgtcgttcgcggcagccgtaccaccacacccgctccatcctctgtttcaaatggagaatctcagacaacagctcaatctccttcacagacaccaaaccacccaatgttcacaacaacaccgatcctcgaagtacttccattgttaaaagacgtgtcttcctcagatcgacctcttctcttcatgaagaaagctcacatgtgttcttgccactgcgatttctctgatactttgataatgccacgcgagaaagagatcaaaagacagacactccttgaattggttgatttccttcactcttcttctggtaaagtcaatgagacgatgcagagtgagcttatacgtatggtttctgctaacattttccggtgtctcccaccggcttaccatgagaacactggtgctcctcctgaagggaatgatcctgaagaagaagagccttatcttgagccatggtggcctcatttgcagctcgtttacgagcttcttttgcggtatgtagtctcttccgaaatcgaacctaaaactgcgaaaaagttcatcaatcacacctttgtctcgaggttacttgatttgtttgactctgaggatcctagggagagggagtatttgaaaactgttcttcatagaatctatggcaagtttatatttcaccgaccgtttatcagatgttcgatttataacattttctacaagttcttgtatgagactgaaaggtgtattggcattggagagttattggagatcttaggaagtgtgatcaatggttttacagtacctatgagagaggagcataggctgtatcttgtgaaagctattttgccactacacaagtctaaaggtatctcgatttaccaccagcagttggcgtattgcgtgacacagtttgttgagaaagattataagttggctgatactgtgatccgcgggttgttgaagttttggccgcttaccaattgtcaaaaggaggttctcttcttgggagagttggaagaagtcttggatgctacagagccctctgagtttcagcaatgtgttgttcctctgtttacacagattgggaaatgtcttaatagtgcacacttccaggtggcagagagagcgctcttcttgtggaacaatgaacatatcgtagggctgatagctcagaacaaagacgtgatctttccgataatctttgaagcgttggagaggaacatgaaaggacattggaaccaagcggtgcatggtctctctgagaacgttagaagaatgtttctggagatggacactgagctctttgaggagtgcgagaaacaatatctcgagaacgaagctaaggcatgcgagttgttggaacaaagagaattgacatggaagagacttgaagaagctgcttctctagctgctaactaa

SEQ ID NO: 83912 - protein, 497 aa, Arabidopsis thaliana
  peptide (1)..(497): Ceres Seq. ID no. 12672407
  misc_feature (78)..(493): Pfam Name: Protein phosphatase 2A regulatory B subunit (B56 Pfam Description: Protein phosphatase 2A regulatory B subunit
  misc_feature (1)..(497): Homolog of NCBI NO: 15233133 NR Description: protein phosphatase 2A regulatory subunit B-like protein id: At3g54930.1 [Arabidopsis thaliana]
  misc_feature (1)..(493): Homolog of NCBI NO: 15232782 NR Description: B' regulatory subunit of PP2A (AtB'beta); protein At3g09880.1, supported by cDNA: gi_18176454, supported by cDNA: supported by cDNA: gi_2160691 [Arabidopsis thaliana]
  misc_feature (1)..(491): Homolog of NCBI NO: 15242766 NR Description: putative protein; protein id: At5g03470.1, by cDNA: gi_2160689 [Arabidopsis thaliana]
  misc_feature (70)..(493): Homolog of NCBI NO: 21530786 NR Description: putative protein phosphatase 2A B'teta subunit
  misc_feature (39)..(496): Homolog of NCBI NO: 21530784 NR Description: putative protein phosphatase 2A B'zeta subunit
  misc_feature (1)..(490): Homolog of NCBI NO: 15222851 NR Description: B regulatory subunit of protein phosphatase 2A, protein id: At1g13460.1, supported by cDNA: 126195. [Arabidopsis
  misc_feature (1)..(493): Homolog of NCBI NO: 18414444 NR Description: Expressed protein; protein id: At4g15415.1, by cDNA: gi_20147342, supported by cDNA: gi_2160693 [Arabidopsis >gi|2160694|gb|AAB58902.1| B' regulatory subunit of PP2A
  misc_feature (1)..(490): Homolog of NCBI NO: 21537284 NR Description: B regulatory subunit of protein phosphatase 2A,
  misc_feature (1)..(492): Homolog of NCBI NO: 38345343 NR Description: OSJNBa0081L15.16 [Oryza sativa (japonica
  misc_feature (1)..(493): Homolog of NCBI NO: 20147343 NR Description: AT4g15410/dl3750w [Arabidopsis thaliana]
MFNKIIKLGQKKFNKSDQHHQDNNNNNNNTSTNTVVRGSRTTTPAPSSVSNGESQTTAQSPSQTPNHPMFTTTPILEVLPLLKDVSSSDRPLLFMKKAHMCSCHCDFSDTLIMPREKEIKRQTLLELVDFLHSSSGKVNETMQSELIRMVSANIFRCLPPAYHENTGAPPEGNDPEEEEPYLEPWWPHLQLVYELLLRYVVSSEIEPKTAKKFINHTFVSRLLDLFDSEDPREREYLKTVLHRIYGKFIFHRPFIRCSIYNIFYKFLYETERCIGIGELLEILGSVINGFTVPMREEHRLYLVKAILPLHKSKGISIYHQQLAYCVTQFVEKDYKLADTVIRGLLKFWPLTNCQKEVLFLGELEEVLDATEPSEFQQCVVPLFTQIGKCLNSAHFQVAERALFLWNNEHIVGLIAQNKDVIFPIIFEALERNMKGHWNQAVHGLSENVRRMFLEMDTELFEECEKQYLENEAKACELLEQRELTWKRLEEAASLAAN

SEQ ID NO: 83913 - protein, 429 aa, Arabidopsis thaliana
  peptide (1)..(429): Ceres Seq. ID no. 12672408
  misc_feature (10)..(425): Pfam Name: Protein phosphatase 2A regulatory B subunit (B56 Pfam Description: Protein phosphatase 2A regulatory B subunit
  misc_feature (1)..(429): Homolog of NCBI NO: 15233133 NR Description: protein phosphatase 2A regulatory subunit B-like protein id: At3g54930.1 [Arabidopsis thaliana]
  misc_feature (1)..(425): Homolog of NCBI NO: 15232782 NR Description: B' regulatory subunit of PP2A (AtB'beta); protein At3g09880.1, supported by cDNA: gi_18176454, supported by cDNA: supported by cDNA: gi_2160691 [Arabidopsis thaliana]
  misc_feature (1)..(423): Homolog of NCBI NO: 15242766 NR Description: putative protein; protein id: At5g03470.1, by cDNA: gi_2160689 [Arabidopsis thaliana]
  misc_feature (2)..(425): Homolog of NCBI NO: 21530786 NR Description: putative protein phosphatase 2A B'teta subunit
  misc_feature (1)..(428): Homolog of NCBI NO: 21530784 NR Description: putative protein phosphatase 2A B'zeta subunit
  misc_feature (1)..(422): Homolog of NCBI NO: 15222851 NR Description: B regulatory subunit of protein phosphatase 2A, protein id: At1g13460.1, supported by cDNA: 126195. [Arabidopsis
  misc_feature (1)..(425): Homolog of NCBI NO: 18414444 NR Description: Expressed protein; protein id: At4g15415.1, by cDNA: gi_20147342, supported by cDNA: gi_2160693 [Arabidopsis >gi|2160694|gb|AAB58902.1| B' regulatory subunit of PP2A
  misc_feature (1)..(422): Homolog of NCBI NO: 21537284 NR Description: B regulatory subunit of protein phosphatase 2A,
  misc_feature (1)..(424): Homolog of NCBI NO: 38345343 NR Description: OSJNBa0081L15.16 [Oryza sativa (japonica
  misc_feature (1)..(425): Homolog of NCBI NO: 20147343 NR Description: AT4g15410/dl3750w [Arabidopsis thaliana]
MFTTTPILEVLPLLKDVSSSDRPLLFMKKAHMCSCHCDFSDTLIMPREKEIKRQTLLELVDFLHSSSGKVNETMQSELIRMVSANIFRCLPPAYHENTGAPPEGNDPEEEEPYLEPWWPHLQLVYELLLRYVVSSEIEPKTAKKFINHTFVSRLLDLFDSEDPREREYLKTVLHRIYGKFIFHRPFIRCSIYNIFYKFLYETERCIGIGELLEILGSVINGFTVPMREEHRLYLVKAILPLHKSKGISIYHQQLAYCVTQFVEKDYKLADTVIRGLLKFWPLTNCQKEVLFLGELEEVLDATEPSEFQQCVVPLFTQIGKCLNSAHFQVAERALFLWNNEHIVGLIAQNKDVIFPIIFEALERNMKGHWNQAVHGLSENVRRMFLEMDTELFEECEKQYLENEAKACELLEQRELTWKRLEEAASLAAN

SEQ ID NO: 83914 - protein, 403 aa, Arabidopsis thaliana
  peptide (1)..(403): Ceres Seq. ID no. 12672409
  misc_feature (1)..(399): Pfam Name: Protein phosphatase 2A regulatory B subunit (B56 Pfam Description: Protein phosphatase 2A regulatory B subunit
  misc_feature (1)..(403): Homolog of NCBI NO: 15233133 NR Description: protein phosphatase 2A regulatory subunit B-like protein id: At3g54930.1 [Arabidopsis thaliana]
  misc_feature (1)..(399): Homolog of NCBI NO: 15232782 NR Description: B' regulatory subunit of PP2A (AtB'beta); protein At3g09880.1, supported by cDNA: gi_18176454, supported by cDNA: supported by cDNA: gi_2160691 [Arabidopsis thaliana]
  misc_feature (1)..(397): Homolog of NCBI NO: 15242766 NR Description: putative protein; protein id: At5g03470.1, by cDNA: gi_2160689 [Arabidopsis thaliana]
  misc_feature (1)..(399): Homolog of NCBI NO: 21530786 NR Description: putative protein phosphatase 2A B'teta subunit
  misc_feature (1)..(402): Homolog of NCBI NO: 21530784 NR Description: putative protein phosphatase 2A B'zeta subunit
  misc_feature (1)..(396): Homolog of NCBI NO: 15222851 NR Description: B regulatory subunit of protein phosphatase 2A, protein id: At1g13460.1, supported by cDNA: 126195. [Arabidopsis
  misc_feature (1)..(399): Homolog of NCBI NO: 18414444 NR Description: Expressed protein; protein id: At4g15415.1, by cDNA: gi_20147342, supported by cDNA: gi_2160693 [Arabidopsis >gi|2160694|gb|AAB58902.1| B' regulatory subunit of PP2A
  misc_feature (1)..(396): Homolog of NCBI NO: 21537284 NR Description: B regulatory subunit of protein phosphatase 2A,
  misc_feature (1)..(398): Homolog of NCBI NO: 38345343 NR Description: OSJNBa0081L15.16 [Oryza sativa (japonica
  misc_feature (1)..(399): Homolog of NCBI NO: 20147343 NR Description: AT4g15410/dl3750w [Arabidopsis thaliana]
MKKAHMCSCHCDFSDTLIMPREKEIKRQTLLELVDFLHSSSGKVNETMQSELIRMVSANIFRCLPPAYHENTGAPPEGNDPEEEEPYLEPWWPHLQLVYELLLRYVVSSEIEPKTAKKFINHTFVSRLLDLFDSEDPREREYLKTVLHRIYGKFIFHRPFIRCSIYNIFYKFLYETERCIGIGELLEILGSVINGFTVPMREEHRLYLVKAILPLHKSKGISIYHQQLAYCVTQFVEKDYKLADTVIRGLLKFWPLTNCQKEVLFLGELEEVLDATEPSEFQQCVVPLFTQIGKCLNSAHFQVAERALFLWNNEHIVGLIAQNKDVIFPIIFEALERNMKGHWNQAVHGLSENVRRMFLEMDTELFEECEKQYLENEAKACELLEQRELTWKRLEEAASLAAN

SEQ ID NO: 83915 - DNA, 783 bp, Arabidopsis thaliana
  misc_feature (1)..(783): Ceres Seq. ID no. 12672427
  misc_feature: MA Experiment ID: 20000314 Result: Down-regulated in Transcription
  misc_feature: MA Experiment 20000314 PARAMETER Experiment Name: At_14day_Shoots-Roots_Sub_P Parameter: Age (day) Value: 14
  misc_feature: MA Experiment 20000314 PARAMETER Experiment Name: At_14day_Shoots-Roots_Sub_P Parameter: Organism Value: A. thaliana
  misc_feature: MA Experiment 20000314 PARAMETER Experiment Name: At_14day_Shoots-Roots_Sub_P Parameter: Plant Line Value: WS
  misc_feature: MA Experiment 20000314 PARAMETER Experiment Name: At_14day_Shoots-Roots_Sub_P Parameter: Tissue Value: Roots vs. Whole Plant
  misc_feature: MA Experiment ID: 20000328 Result: Down-regulated in Transcription
  misc_feature: MA Experiment 20000328 PARAMETER Experiment Name: At_42deg_Heat_Sub_P Parameter: Age (day) Value: 14
  misc_feature: MA Experiment 20000328 PARAMETER Experiment Name: At_42deg_Heat_Sub_P Parameter: Organism Value: A. thaliana
  misc_feature: MA Experiment 20000328 PARAMETER Experiment Name: At_42deg_Heat_Sub_P Parameter: Plant Line Value: WS
  misc_feature: MA Experiment 20000328 PARAMETER Experiment Name: At_42deg_Heat_Sub_P Parameter: Temperature (deg C) Value: 42 vs. 22
  misc_feature: MA Experiment 20000328 PARAMETER Experiment Name: At_42deg_Heat_Sub_P Parameter: Timepoint (hr) Value: 6
  misc_feature: MA Experiment 20000328 PARAMETER Experiment Name: At_42deg_Heat_Sub_P Parameter: Tissue Value: Aerial
  misc_feature: MA Experiment ID: 20000329 Result: Down-regulated in Transcription
  misc_feature: MA Experiment 20000329 PARAMETER Experiment Name: At_4deg_Cold_Sub_P Parameter: Age (day) Value: 14
  misc_feature: MA Experiment 20000329 PARAMETER Experiment Name: At_4deg_Cold_Sub_P Parameter: Organism Value: A. thaliana
  misc_feature: MA Experiment 20000329 PARAMETER Experiment Name: At_4deg_Cold_Sub_P Parameter: Plant Line Value: WS
  misc_feature: MA Experiment 20000329 PARAMETER Experiment Name: At_4deg_Cold_Sub_P Parameter: Temperature (deg C) Value: 4 vs. 22
  misc_feature: MA Experiment 20000329 PARAMETER Experiment Name: At_4deg_Cold_Sub_P Parameter: Timepoint (hr) Value: 6
  misc_feature: MA Experiment 20000329 PARAMETER Experiment Name: At_4deg_Cold_Sub_P Parameter: Tissue Value: Aerial
  misc_feature: MA Experiment ID: 20000347 Result: Up-regulated in Transcription
  misc_feature: MA Experiment 20000347 PARAMETER Experiment Name: At_2mM_SA_Sub_P Parameter: Age (day) Value: 14
  misc_feature: MA Experiment 20000347 PARAMETER Experiment Name: At_2mM_SA_Sub_P Parameter: Organism Value: A. thaliana
  misc_feature: MA Experiment 20000347 PARAMETER Experiment Name: At_2mM_SA_Sub_P Parameter: Plant Line Value: WS
  misc_feature: MA Experiment 20000347 PARAMETER Experiment Name: At_2mM_SA_Sub_P Parameter: Timepoint (hr) Value: 6
  misc_feature: MA Experiment 20000347 PARAMETER Experiment Name: At_2mM_SA_Sub_P Parameter: Tissue Value: Aerial
  misc_feature: MA Experiment 20000347 PARAMETER Experiment Name: At_2mM_SA_Sub_P Parameter: Treatment Value: 2mM SA vs. No Treatment
  misc_feature: MA Experiment ID: 20000348 Result: Up-regulated in Transcription
  misc_feature: MA Experiment 20000348 PARAMETER Experiment Name: At_100uM_ABA_Sub_P Parameter: Age (day) Value: 14
  misc_feature: MA Experiment 20000348 PARAMETER Experiment Name: At_100uM_ABA_Sub_P Parameter: Organism Value: A. thaliana
  misc_feature: MA Experiment 20000348 PARAMETER Experiment Name: At_100uM_ABA_Sub_P Parameter: Plant Line Value: WS
  misc_feature: MA Experiment 20000348 PARAMETER Experiment Name: At_100uM_ABA_Sub_P Parameter: Timepoint (hr) Value: 1
  misc_feature: MA Experiment 20000348 PARAMETER Experiment Name: At_100uM_ABA_Sub_P Parameter: Tissue Value: Aerial
  misc_feature: MA Experiment 20000348 PARAMETER Experiment Name: At_100uM_ABA_Sub_P Parameter: Treatment Value: 100uM ABA vs. No Treatment
  misc_feature: MA Experiment ID: 20000349 Result: Up-regulated in Transcription
  misc_feature: MA Experiment 20000349 PARAMETER Experiment Name: At_100uM_ABA_Sub_P Parameter: Age (day) Value: 14
  misc_feature: MA Experiment 20000349 PARAMETER Experiment Name: At_100uM_ABA_Sub_P Parameter: Organism Value: A. thaliana
  misc_feature: MA Experiment 20000349 PARAMETER Experiment Name: At_100uM_ABA_Sub_P Parameter: Plant Line Value: WS
  misc_feature: MA Experiment 20000349 PARAMETER Experiment Name: At_100uM_ABA_Sub_P Parameter: Timepoint (hr) Value: 6
  misc_feature: MA Experiment 20000349 PARAMETER Experiment Name: At_100uM_ABA_Sub_P Parameter: Tissue Value: Aerial
  misc_feature: MA Experiment 20000349 PARAMETER Experiment Name: At_100uM_ABA_Sub_P Parameter: Treatment Value: 100uM ABA vs. No Treatment
  misc_feature: MA Experiment ID: 20000352 Result: Up-regulated in Transcription
  misc_feature: MA Experiment 20000352 PARAMETER Experiment Name: At_Drought_Sub_P Parameter: Age (day) Value: 7
  misc_feature: MA Experiment 20000352 PARAMETER Experiment Name: At_Drought_Sub_P Parameter: Organism Value: A. thaliana
  misc_feature: MA Experiment 20000352 PARAMETER Experiment Name: At_Drought_Sub_P Parameter: Plant Line Value: WS
  misc_feature: MA Experiment 20000352 PARAMETER Experiment Name: At_Drought_Sub_P Parameter: Timepoint (hr) Value: 6
  misc_feature: MA Experiment 20000352 PARAMETER Experiment Name: At_Drought_Sub_P Parameter: Tissue Value: Whole Plant
  misc_feature: MA Experiment 20000352 PARAMETER Experiment Name: At_Drought_Sub_P Parameter: Treatment Value: Drought vs. No Drought
  misc_feature: MA Experiment ID: 20001807 Result: Down-regulated in Transcription
  misc_feature: MA Experiment 20001807 PARAMETER Experiment Name: At_50mM_NH4NO3_L-to-H_Sub_P Parameter: Timepoint (hr) Value: 6
  misc_feature: MA Experiment 20001807 PARAMETER Experiment Name: At_50mM_NH4NO3_L-to-H_Sub_P Parameter: Tissue Value: Leaf
  misc_feature: MA Experiment 20001807 PARAMETER Experiment Name: At_50mM_NH4NO3_L-to-H_Sub_P Parameter: Treatment Value: 50mM NH4NO3 vs 100mM Mannitol
atggcaatcaatccattgattctcttaaccatattcccactcttccttctcttgagcttcaccgacgccggaatccctagagtcttctcaggtggttcttggcaaaccgctcacgccactttctacggtggaaacgatgcttcgggaacaatgggtggcgcgtgtggatacgggaatctgtatagccaaggatacggaacaaacacggcggcgctgagcacatcgttgtttaacagtggtcaaagctgcggcgcatgcttcgaaatcaaatgtgtcaatgatcccaaatggtgtcacccgggtaatccttctgtcttcgtaaccgcaaccaacttttgccctccaaacttagcccagcctagcgacaatggtggctggtgcaacccgccacgctctcatttcgacctcgccatgcccgttttcctcaagatcgctgagtatcgtgccggcattgtccccatctcttaccgcagggtggcatgtaggaagagtggagggataaggttcacgatcaacggtcaccgttacttcaacttggtgctgattacgaacgtggccggagcaggagacatcgcgaggacgagtgtgaaaggttcaaagactggttggatgagtttaactaggaactggggacagaactggcagtctaatgctgttctcgttggtcagtcactttccttccgtgttacatccagcgatcgtagaacctctacttcatggaacatcgctccttcgaactggcagtttggacaaacctttgtcggaaagaatttcagggtctaa

SEQ ID NO: 83916 - protein, 260 aa, Arabidopsis thaliana
  peptide (1)..(260): Ceres Seq. ID no. 12672428
  misc_feature (167)..(244): Pfam Name: Pollen allergen Pfam Description: Pollen allergen
  misc_feature (1)..(260): Homolog of NCBI NO: 15233283 NR Description: expansin, putative; protein id: At3g55500.1
  misc_feature (1)..(260): Homolog of NCBI NO: 15225530 NR Description: expansin, putative; protein id: At2g39700.1, by cDNA: 17353., supported by cDNA: gi_15294171, supported by gi_17065213, supported by cDNA: gi_20259979 [Arabidopsis
  misc_feature (1)..(260): Homolog of NCBI NO: 21553844 NR Description: Alpha-expansin 4 precursor (At-EXP4) (AtEx4)
  misc_feature (14)..(260): Homolog of NCBI NO: 29466643 NR Description: expansin [Prunus persica]
  misc_feature (7)..(260): Homolog of NCBI NO: 20138197 NR Description: Alpha-expansin 6 precursor (At-EXP6) (AtEx6)
  misc_feature (14)..(260): Homolog of NCBI NO: 13898655 NR Description: expansin [Prunus cerasus]
  misc_feature (9)..(260): Homolog of NCBI NO: 15227005 NR Description: expansin, putative; protein id: At2g28950.1, by cDNA: 17914., supported by cDNA: gi_16648831, supported by gi_17865811, supported by cDNA: gi_18252948 [Arabidopsis
  misc_feature (17)..(260): Homolog of NCBI NO: 31506015 NR Description: expansin [Sambucus nigra]
  misc_feature (6)..(260): Homolog of NCBI NO: 1076531 NR Description: pollen allergen homolog, hypothetical (clone - garden pea >gi|732905|emb|CAA59470.1| homology with pollen
  misc_feature (17)..(260): Homolog of NCBI NO: 20502782 NR Description: expansin 10 precursor [Rumex palustris]
MAINPLILLTIFPLFLLLSFTDAGIPRVFSGGSWQTAHATFYGGNDASGTMGGACGYGNLYSQGYGTNTAALSTSLFNSGQSCGACFEIKCVNDPKWCHPGNPSVFVTATNFCPPNLAQPSDNGGWCNPPRSHFDLAMPVFLKIAEYRAGIVPISYRRVACRKSGGIRFTINGHRYFNLVLITNVAGAGDIARTSVKGSKTGWMSLTRNWGQNWQSNAVLVGQSLSFRVTSSDRRTSTSWNIAPSNWQFGQTFVGKNFRV

SEQ ID NO: 83917 - protein, 210 aa, Arabidopsis thaliana
  peptide (1)..(210): Ceres Seq. ID no. 12672429
  misc_feature (117)..(194): Pfam Name: Pollen allergen Pfam Description: Pollen allergen
  misc_feature (1)..(210): Homolog of NCBI NO: 15233283 NR Description: expansin, putative; protein id: At3g55500.1
  misc_feature (1)..(210): Homolog of NCBI NO: 15225530 NR Description: expansin, putative; protein id: At2g39700.1, by cDNA: 17353., supported by cDNA: gi_15294171, supported by gi_17065213, supported by cDNA: gi_20259979 [Arabidopsis
  misc_feature (1)..(210): Homolog of NCBI NO: 21553844 NR Description: Alpha-expansin 4 precursor (At-EXP4) (AtEx4)
  misc_feature (1)..(210): Homolog of NCBI NO: 29466643 NR Description: expansin [Prunus persica]
  misc_feature (1)..(210): Homolog of NCBI NO: 20138197 NR Description: Alpha-expansin 6 precursor (At-EXP6) (AtEx6)
  misc_feature (1)..(210): Homolog of NCBI NO: 13898655 NR Description: expansin [Prunus cerasus]
  misc_feature (1)..(210): Homolog of NCBI NO: 15227005 NR Description: expansin, putative; protein id: At2g28950.1, by cDNA: 17914., supported by cDNA: gi_16648831, supported by gi_17865811, supported by cDNA: gi_18252948 [Arabidopsis
  misc_feature (1)..(210): Homolog of NCBI NO: 31506015 NR Description: expansin [Sambucus nigra]
  misc_feature (1)..(210): Homolog of NCBI NO: 1076531 NR Description: pollen allergen homolog, hypothetical (clone - garden pea >gi|732905|emb|CAA59470.1| homology with pollen
  misc_feature (1)..(210): Homolog of NCBI NO: 20502782 NR Description: expansin 10 precursor [Rumex palustris]
MGGACGYGNLYSQGYGTNTAALSTSLFNSGQSCGACFEIKCVNDPKWCHPGNPSVFVTATNFCPPNLAQPSDNGGWCNPPRSHFDLAMPVFLKIAEYRAGIVPISYRRVACRKSGGIRFTINGHRYFNLVLITNVAGAGDIARTSVKGSKTGWMSLTRNWGQNWQSNAVLVGQSLSFRVTSSDRRTSTSWNIAPSNWQFGQTFVGKNFRV

SEQ ID NO: 83918 - DNA, 1328 bp, Arabidopsis thaliana
  misc_feature (1)..(1328): Ceres Seq. ID no. 12672442
  misc_feature: MA Experiment ID: 20000171 Result: Down-regulated in Transcription
  misc_feature: MA Experiment 20000171 PARAMETER Experiment Name: At_42deg_Heat_P Parameter: Age (day) Value: 14
  misc_feature: MA Experiment 20000171 PARAMETER Experiment Name: At_42deg_Heat_P Parameter: Organism Value: A. thaliana
  misc_feature: MA Experiment 20000171 PARAMETER Experiment Name: At_42deg_Heat_P Parameter: Plant Line Value: WS
  misc_feature: MA Experiment 20000171 PARAMETER Experiment Name: At_42deg_Heat_P Parameter: Temperature (deg C) Value: 42 vs. 22
  misc_feature: MA Experiment 20000171 PARAMETER Experiment Name: At_42deg_Heat_P Parameter: Timepoint (hr) Value: 1
  misc_feature: MA Experiment 20000171 PARAMETER Experiment Name: At_42deg_Heat_P Parameter: Tissue Value: Aerial
  misc_feature: MA Experiment ID: 20000173 Result: Down-regulated in Transcription
  misc_feature: MA Experiment 20000173 PARAMETER Experiment Name: At_42deg_Heat_P Parameter: Age (day) Value: 14
  misc_feature: MA Experiment 20000173 PARAMETER Experiment Name: At_42deg_Heat_P Parameter: Organism Value: A. thaliana
  misc_feature: MA Experiment 20000173 PARAMETER Experiment Name: At_42deg_Heat_P Parameter: Plant Line Value: WS
  misc_feature: MA Experiment 20000173 PARAMETER Experiment Name: At_42deg_Heat_P Parameter: Temperature (deg C) Value: 42 vs. 22
  misc_feature: MA Experiment 20000173 PARAMETER Experiment Name: At_42deg_Heat_P Parameter: Timepoint (hr) Value: 6
  misc_feature: MA Experiment 20000173 PARAMETER Experiment Name: At_42deg_Heat_P Parameter: Tissue Value: Aerial
  misc_feature: MA Experiment ID: 20000184 Result: Up-regulated in Transcription
  misc_feature: MA Experiment 20000184 PARAMETER Experiment Name: At_Shoots__P Parameter: Age (day) Value: 7
  misc_feature: MA Experiment 20000184 PARAMETER Experiment Name: At_Shoots__P Parameter: Tissue Value: Shoots vs. Whole Plant
  misc_feature: MA Experiment ID: 20000234 Result: Down-regulated in Transcription
  misc_feature: MA Experiment 20000234 PARAMETER Experiment Name: At_Siliques_P Parameter: Age (day) Value: 21
  misc_feature: MA Experiment 20000234 PARAMETER Experiment Name: At_Siliques_P Parameter: Organism Value: A. thaliana
  misc_feature: MA Experiment 20000234 PARAMETER Experiment Name: At_Siliques_P Parameter: Plant Line Value: WS
  misc_feature: MA Experiment 20000234 PARAMETER Experiment Name: At_Siliques_P Parameter: Tissue Value: Less Than 5mm Siliques vs. Whole Plant
  misc_feature: MA Experiment ID: 20000235 Result: Down-regulated in Transcription
  misc_feature: MA Experiment 20000235 PARAMETER Experiment Name: At_Siliques_P Parameter: Age (day) Value: 21
  misc_feature: MA Experiment 20000235 PARAMETER Experiment Name: At_Siliques_P Parameter: Organism Value: A. thaliana
  misc_feature: MA Experiment 20000235 PARAMETER Experiment Name: At_Siliques_P Parameter: Plant Line Value: WS
  misc_feature: MA Experiment 20000235 PARAMETER Experiment Name: At_Siliques_P Parameter: Tissue Value: 5-10mm Siliques vs. Whole Plant
  misc_feature: MA Experiment ID: 20000264 Result: Down-regulated in Transcription
  misc_feature: MA Experiment 20000264 PARAMETER Experiment Name: At_Open_Flower_P Parameter: Age (day) Value: 21
  misc_feature: MA Experiment 20000264 PARAMETER Experiment Name: At_Open_Flower_P Parameter: Plant Line Value: WS
  misc_feature: MA Experiment 20000264 PARAMETER Experiment Name: At_Open_Flower_P Parameter: Tissue Value: Open Flower vs. Whole Plant
  misc_feature: MA Experiment ID: 20000265 Result: Down-regulated in Transcription
  misc_feature: MA Experiment 20000265 PARAMETER Experiment Name: At_Open_Flower_P Parameter: Age (day) Value: 21
  misc_feature: MA Experiment 20000265 PARAMETER Experiment Name: At_Open_Flower_P Parameter: Plant Line Value: WS
  misc_feature: MA Experiment 20000265 PARAMETER Experiment Name: At_Open_Flower_P Parameter: Tissue Value: Closed Flower vs. Whole Plant
  misc_feature: MA Experiment ID: 20000286 Result: Down-regulated in Transcription
  misc_feature: MA Experiment 20000286 PARAMETER Experiment Name: At_Open_Flower_P Parameter: Age (day) Value: 21
  misc_feature: MA Experiment 20000286 PARAMETER Experiment Name: At_Open_Flower_P Parameter: Plant Line Value: WS
  misc_feature: MA Experiment 20000286 PARAMETER Experiment Name: At_Open_Flower_P Parameter: Tissue Value: Half Open vs. Whole Plant
  misc_feature: MA Experiment ID: 20000573 Result: Down-regulated in Transcription
  misc_feature: MA Experiment 20000573 PARAMETER Experiment Name: At_100uM_ABA_Mutants__P Parameter: Organism Value: A. thaliana
  misc_feature: MA Experiment 20000573 PARAMETER Experiment Name: At_100uM_ABA_Mutants__P Parameter: Plant Line Value: CS22 vs. Ler wt
  misc_feature: MA Experiment 20000573 PARAMETER Experiment Name: At_100uM_ABA_Mutants__P Parameter: Timepoint (hr) Value: N/A
  misc_feature: MA Experiment 20000573 PARAMETER Experiment Name: At_100uM_ABA_Mutants__P Parameter: Tissue Value: Whole Plant
  misc_feature: MA Experiment 20000573 PARAMETER Experiment Name: At_100uM_ABA_Mutants__P Parameter: Treatment Value: None
  misc_feature: MA Experiment ID: 20000574 Result: Down-regulated in Transcription
  misc_feature: MA Experiment 20000574 PARAMETER Experiment Name: At_100uM_ABA_Mutants__P Parameter: Organism Value: A. thaliana
  misc_feature: MA Experiment 20000574 PARAMETER Experiment Name: At_100uM_ABA_Mutants__P Parameter: Plant Line Value: CS23 vs. Ler wt
  misc_feature: MA Experiment 20000574 PARAMETER Experiment Name: At_100uM_ABA_Mutants__P Parameter: Timepoint (hr) Value: N/A
  misc_feature: MA Experiment 20000574 PARAMETER Experiment Name: At_100uM_ABA_Mutants__P Parameter: Tissue Value: Whole Plant
  misc_feature: MA Experiment 20000574 PARAMETER Experiment Name: At_100uM_ABA_Mutants__P Parameter: Treatment Value: None
  misc_feature: MA Experiment ID: 20000709 Result: Up-regulated in Transcription
  misc_feature: MA Experiment 20000709 PARAMETER Experiment Name: At_15mM_NH4NO3_L-to-H_P Parameter: Age (hr) Value: 14
  misc_feature: MA Experiment 20000709 PARAMETER Experiment Name: At_15mM_NH4NO3_L-to-H_P Parameter: Organism Value: A. thaliana
  misc_feature: MA Experiment 20000709 PARAMETER Experiment Name: At_15mM_NH4NO3_L-to-H_P Parameter: Plant Line Value: WS
  misc_feature: MA Experiment 20000709 PARAMETER Experiment Name: At_15mM_NH4NO3_L-to-H_P Parameter: Timepoint (hr) Value: 4
  misc_feature: MA Experiment 20000709 PARAMETER Experiment Name: At_15mM_NH4NO3_L-to-H_P Parameter: Tissue Value: Aerial
  misc_feature: MA Experiment 20000709 PARAMETER Experiment Name: At_15mM_NH4NO3_L-to-H_P Parameter: Treatment Value: 15mM NH4NO3 vs. 30mM Mannitol
  misc_feature: MA Experiment ID: 20000794 Result: Down-regulated in Transcription
  misc_feature: MA Experiment 20000794 PARAMETER Experiment Name: At_Petals_P Parameter: Age (day) Value: 23-25 days
  misc_feature: MA Experiment 20000794 PARAMETER Experiment Name: At_Petals_P Parameter: Plant Line Value: WS
  misc_feature: MA Experiment 20000794 PARAMETER Experiment Name: At_Petals_P Parameter: Tissue Value: Petals vs. Whole plant
  misc_feature: MA Experiment ID: 20001248 Result: Down-regulated in Transcription
  misc_feature: MA Experiment 20001248 PARAMETER Experiment Name: At_Far-red-induction_P Parameter: Age (day) Value: 7
  misc_feature: MA Experiment 20001248 PARAMETER Experiment Name: At_Far-red-induction_P Parameter: Light Value: Far-red vs. White
  misc_feature: MA Experiment 20001248 PARAMETER Experiment Name: At_Far-red-induction_P Parameter: Organism Value: A. thaliana
  misc_feature: MA Experiment 20001248 PARAMETER Experiment Name: At_Far-red-induction_P Parameter: Plant Line Value: Columbia
  misc_feature: MA Experiment 20001248 PARAMETER Experiment Name: At_Far-red-induction_P Parameter: Timepoint (hr) Value: 4
  misc_feature: MA Experiment 20001248 PARAMETER Experiment Name: At_Far-red-induction_P Parameter: Tissue Value: Whole Plant
  misc_feature: MA Experiment ID: 20001557 Result: Down-regulated in Transcription
  misc_feature: MA Experiment 20001557 PARAMETER Experiment Name: At_Drought_Soil_Dry_P Parameter: Age (day) Value: 27
  misc_feature: MA Experiment 20001557 PARAMETER Experiment Name: At_Drought_Soil_Dry_P Parameter: Organism Value: A. thaliana
  misc_feature: MA Experiment 20001557 PARAMETER Experiment Name: At_Drought_Soil_Dry_P Parameter: Plant Line Value: WS
  misc_feature: MA Experiment 20001557 PARAMETER Experiment Name: At_Drought_Soil_Dry_P Parameter: Post Timepoint (hr) Value: 3
  misc_feature: MA Experiment 20001557 PARAMETER Experiment Name: At_Drought_Soil_Dry_P Parameter: Post-Treatment Value: Re-Water vs. No Drought
  misc_feature: MA Experiment 20001557 PARAMETER Experiment Name: At_Drought_Soil_Dry_P Parameter: Timepoint (day) Value: 13
  misc_feature: MA Experiment 20001557 PARAMETER Experiment Name: At_Drought_Soil_Dry_P Parameter: Treatment Value: Drought vs. No Drought
  misc_feature: MA Experiment ID: 20001755 Result: Up-regulated in Transcription
  misc_feature: MA Experiment 20001755 PARAMETER Experiment Name: At_50mM_NH4NO3_L-to-H_P Parameter: Timepoint (hr) Value: 2
  misc_feature: MA Experiment 20001755 PARAMETER Experiment Name: At_50mM_NH4NO3_L-to-H_P Parameter: Tissue Value: Leaf
  misc_feature: MA Experiment 20001755 PARAMETER Experiment Name: At_50mM_NH4NO3_L-to-H_P Parameter: Treatment Value: 50mM NH4NO3 vs 100mM Mannitol
  misc_feature: MA Experiment ID: 20001757 Result: Up-regulated in Transcription
  misc_feature: MA Experiment 20001757 PARAMETER Experiment Name: At_50mM_NH4NO3_L-to-H_P Parameter: Timepoint (hr) Value: 6
  misc_feature: MA Experiment 20001757 PARAMETER Experiment Name: At_50mM_NH4NO3_L-to-H_P Parameter: Tissue Value: Leaf
  misc_feature: MA Experiment 20001757 PARAMETER Experiment Name: At_50mM_NH4NO3_L-to-H_P Parameter: Treatment Value: 50mM NH4NO3 vs 100mM Mannitol
aaaaatcctgcaaaagatttgttttcattattttattttatttaggaaactttgtcttttttccttcctctgcgctgtcttcttcaaaaaacaaaatattttgttttttgttctattagtaactttgctttctccacaattcaaagctaatttagttctattcatttttccctctctcttttgcaaagatttggtagaagaagaaaaataaaaagagttataatcaatcagatcttgttttaagtgcagactctttatttctcttcctcacctaagcttcagcatcgtaaatttaaaactaaaatcgcatcaaatcccggagataggaaagaaaataattgattgtttctagtgaagaacaaaaaaaaaaaagtcgaagactttacatctgggttcatcgatttgagataagatcttctttatttgttatcttcaagtttctgcaatgggtatggcagcagaatcgcagtttcatgttttagctgttgatgatagtttatttgatcggaaacttattgagagattgcttcaaaagtcttcgtgtcaagtaacaactgttgattctggctcaaaggctttggagtttctgggtttaagacaaagtactgatagtaacgacccaaatgcgttttctaaggctcctgttaatcaccaggtagttgaagtgaatcttataattacagattattgtatgcctggcatgactggttatgatttgctcaagaaagtcaaggaatcatcagcttttagagatataccagtagttatcatgtcctcagagaacgttcctgcaagaatcagcagatgtttagaagaaggagctgaagagtttttcttgaaaccagtaagattggctgatcttaacaagttgaaacctcatatgatgaaaacaaagttgaagaaccagaagctggaggagattgagacaacttcaaaagtcgaaaatggagtccccactgcagtagctgatccagagattaaagattcaacaaacattgaaattgaaatcttgcctctgcaacaagatctgctattagttcaacaagaggagcaaacattgagtatcaacaacaagaggaagtcagtggaagaagggatttcaactgatagagcacgtcctagattcgacggtatcgcaaccgctgtctgatctaccagctatgatacttcttttttcggtttctgatttagatttttgtagattttcttaggaatgcttctactggtacagtacatggtttcagtagggaatgcagagaggggaatatgatgatgatgttgtatgtggggataatgtttataagtacatcagtaaatcttacatggtt

SEQ ID NO: 83919 - protein, 234 aa, Arabidopsis thaliana
  peptide (1)..(234): Ceres Seq. ID no. 12672443
  misc_feature (9)..(139): Pfam Name: Response regulator receiver domain Pfam Description: Response regulator receiver domain
  misc_feature (1)..(234): Homolog of NCBI NO: 15230202 NR Description: responce reactor 4; protein id: At3g57040.1, by cDNA: gi_19699060, supported by cDNA: gi_3273201 [Arabidopsis
  misc_feature (1)..(234): Homolog of NCBI NO: 15227325 NR Description: putative two-component response regulator 3 protein id: At2g41310.1, supported by cDNA: gi_18491268
  misc_feature (5)..(150): Homolog of NCBI NO: 34906626 NR Description: putative response regulator [Oryza sativa
  misc_feature (3)..(180): Homolog of NCBI NO: 12060388 NR Description: response regulator 6 [Zea mays]
  misc_feature (5)..(185): Homolog of NCBI NO: 12060386 NR Description: response regulator 5 [Zea mays]
  misc_feature (5)..(187): Homolog of NCBI NO: 12060384 NR Description: response regulator 4 [Zea mays]
  misc_feature (9)..(163): Homolog of NCBI NO: 33330868 NR Description: type-A response regulator [Catharanthus roseus]
  misc_feature (8)..(170): Homolog of NCBI NO: 15218550 NR Description: putative response regulator 3; protein id: supported by cDNA: gi_3273195, supported by cDNA: gi_3323582, by cDNA: gi_3953596 [Arabidopsis thaliana]
  misc_feature (8)..(213): Homolog of NCBI NO: 15218957 NR Description: response regulator 3; protein id: At1g59940.1, by cDNA: gi_3953594 [Arabidopsis thaliana]
  misc_feature (8)..(182): Homolog of NCBI NO: 15221927 NR Description: response regulator 5, putative; protein id: supported by cDNA: gi_3953602 [Arabidopsis thaliana]
MGMAAESQFHVLAVDDSLFDRKLIERLLQKSSCQVTTVDSGSKALEFLGLRQSTDSNDPNAFSKAPVNHQVVEVNLIITDYCMPGMTGYDLLKKVKESSAFRDIPVVIMSSENVPARISRCLEEGAEEFFLKPVRLADLNKLKPHMMKTKLKNQKLEEIETTSKVENGVPTAVADPEIKDSTNIEIEILPLQQDLLLVQQEEQTLSINNKRKSVEEGISTDRARPRFDGIATAV

SEQ ID NO: 83920 - protein, 232 aa, Arabidopsis thaliana
  peptide (1)..(232): Ceres Seq. ID no. 12672444
  misc_feature (7)..(137): Pfam Name: Response regulator receiver domain Pfam Description: Response regulator receiver domain
  misc_feature (1)..(232): Homolog of NCBI NO: 15230202 NR Description: responce reactor 4; protein id: At3g57040.1, by cDNA: gi_19699060, supported by cDNA: gi_3273201 [Arabidopsis
  misc_feature (1)..(232): Homolog of NCBI NO: 15227325 NR Description: putative two-component response regulator 3 protein id: At2g41310.1, supported by cDNA: gi_18491268
  misc_feature (3)..(148): Homolog of NCBI NO: 34906626 NR Description: putative response regulator [Oryza sativa
  misc_feature (1)..(178): Homolog of NCBI NO: 12060388 NR Description: response regulator 6 [Zea mays]
  misc_feature (3)..(183): Homolog of NCBI NO: 12060386 NR Description: response regulator 5 [Zea mays]
  misc_feature (3)..(185): Homolog of NCBI NO: 12060384 NR Description: response regulator 4 [Zea mays]
  misc_feature (7)..(161): Homolog of NCBI NO: 33330868 NR Description: type-A response regulator [Catharanthus roseus]
  misc_feature (6)..(168): Homolog of NCBI NO: 15218550 NR Description: putative response regulator 3; protein id: supported by cDNA: gi_3273195, supported by cDNA: gi_3323582, by cDNA: gi_3953596 [Arabidopsis thaliana]
  misc_feature (6)..(211): Homolog of NCBI NO: 15218957 NR Description: response regulator 3; protein id: At1g59940.1, by cDNA: gi_3953594 [Arabidopsis thaliana]
  misc_feature (6)..(180): Homolog of NCBI NO: 15221927 NR Description: response regulator 5, putative; protein id: supported by cDNA: gi_3953602 [Arabidopsis thaliana]
MAAESQFHVLAVDDSLFDRKLIERLLQKSSCQVTTVDSGSKALEFLGLRQSTDSNDPNAFSKAPVNHQVVEVNLIITDYCMPGMTGYDLLKKVKESSAFRDIPVVIMSSENVPARISRCLEEGAEEFFLKPVRLADLNKLKPHMMKTKLKNQKLEEIETTSKVENGVPTAVADPEIKDSTNIEIEILPLQQDLLLVQQEEQTLSINNKRKSVEEGISTDRARPRFDGIATAV

SEQ ID NO: 83921 - protein, 152 aa, Arabidopsis thaliana
  peptide (1)..(152): Ceres Seq. ID no. 12672445
  misc_feature (1)..(57): Pfam Name: Response regulator receiver domain Pfam Description: Response regulator receiver domain
  misc_feature (1)..(152): Homolog of NCBI NO: 15230202 NR Description: responce reactor 4; protein id: At3g57040.1, by cDNA: gi_19699060, supported by cDNA: gi_3273201 [Arabidopsis
  misc_feature (1)..(152): Homolog of NCBI NO: 15227325 NR Description: putative two-component response regulator 3 protein id: At2g41310.1, supported by cDNA: gi_18491268
  misc_feature (1)..(68): Homolog of NCBI NO: 34906626 NR Description: putative response regulator [Oryza sativa
  misc_feature (1)..(98): Homolog of NCBI NO: 12060388 NR Description: response regulator 6 [Zea mays]
  misc_feature (1)..(103): Homolog of NCBI NO: 12060386 NR Description: response regulator 5 [Zea mays]
  misc_feature (1)..(105): Homolog of NCBI NO: 12060384 NR Description: response regulator 4 [Zea mays]
  misc_feature (1)..(81): Homolog of NCBI NO: 33330868 NR Description: type-A response regulator [Catharanthus roseus]
  misc_feature (1)..(88): Homolog of NCBI NO: 15218550 NR Description: putative response regulator 3; protein id: supported by cDNA: gi_3273195, supported by cDNA: gi_3323582, by cDNA: gi_3953596 [Arabidopsis thaliana]
  misc_feature (1)..(131): Homolog of NCBI NO: 15218957 NR Description: response regulator 3; protein id: At1g59940.1, by cDNA: gi_3953594 [Arabidopsis thaliana]
  misc_feature (1)..(100): Homolog of NCBI NO: 15221927 NR Description: response regulator 5, putative; protein id: supported by cDNA: gi_3953602 [Arabidopsis thaliana]
MPGMTGYDLLKKVKESSAFRDIPVVIMSSENVPARISRCLEEGAEEFFLKPVRLADLNKLKPHMMKTKLKNQKLEEIETTSKVENGVPTAVADPEIKDSTNIEIEILPLQQDLLLVQQEEQTLSINNKRKSVEEGISTDRARPRFDGIATAV

SEQ ID NO: 83922 - DNA, 2143 bp, Arabidopsis thaliana
  misc_feature (1)..(2143): Ceres Seq. ID no. 12672458
  misc_feature: MA Experiment ID: 20000182 Result: Up-regulated in Transcription
  misc_feature: MA Experiment 20000182 PARAMETER Experiment Name: At_2mM_SA_P Parameter: Age (day) Value: 14
  misc_feature: MA Experiment 20000182 PARAMETER Experiment Name: At_2mM_SA_P Parameter: Organism Value: A. thaliana
  misc_feature: MA Experiment 20000182 PARAMETER Experiment Name: At_2mM_SA_P Parameter: Plant Line Value: WS
  misc_feature: MA Experiment 20000182 PARAMETER Experiment Name: At_2mM_SA_P Parameter: Timepoint (hr) Value: 6
  misc_feature: MA Experiment 20000182 PARAMETER Experiment Name: At_2mM_SA_P Parameter: Tissue Value: Aerial
  misc_feature: MA Experiment 20000182 PARAMETER Experiment Name: At_2mM_SA_P Parameter: Treatment Value: 2mM SA vs. No Treatment
  misc_feature: MA Experiment ID: 20000265 Result: Down-regulated in Transcription
  misc_feature: MA Experiment 20000265 PARAMETER Experiment Name: At_Open_Flower_P Parameter: Age (day) Value: 21
  misc_feature: MA Experiment 20000265 PARAMETER Experiment Name: At_Open_Flower_P Parameter: Plant Line Value: WS
  misc_feature: MA Experiment 20000265 PARAMETER Experiment Name: At_Open_Flower_P Parameter: Tissue Value: Closed Flower vs. Whole Plant
  misc_feature: MA Experiment ID: 20000438 Result: Down-regulated in Transcription
  misc_feature: MA Experiment 20000438 PARAMETER Experiment Name: At_Shoots__P Parameter: Age (day) Value: 14
  misc_feature: MA Experiment 20000438 PARAMETER Experiment Name: At_Shoots__P Parameter: Tissue Value: Shoots vs. Whole Plant
  misc_feature: MA Experiment ID: 20001905 Result: Up-regulated in Transcription
  misc_feature: MA Experiment 20001905 PARAMETER Experiment Name: At_Drought_Reproduction_P Parameter: Age (day) Value: 40
  misc_feature: MA Experiment 20001905 PARAMETER Experiment Name: At_Drought_Reproduction_P Parameter: Organism Value: A. thaliana
  misc_feature: MA Experiment 20001905 PARAMETER Experiment Name: At_Drought_Reproduction_P Parameter: Plant Line Value: WS
  misc_feature: MA Experiment 20001905 PARAMETER Experiment Name: At_Drought_Reproduction_P Parameter: Timepoint (day) Value: 10
  misc_feature: MA Experiment 20001905 PARAMETER Experiment Name: At_Drought_Reproduction_P Parameter: Tissue Value: Rosettes
  misc_feature: MA Experiment 20001905 PARAMETER Experiment Name: At_Drought_Reproduction_P Parameter: Treatment Value: Drought vs. No Drought
aaaacacccaccaatgtctcgtgaacttattattctctgccaaccaattcttgttctgttccttactctgttttacaattctcatggctacttcgtctcacaaggatctgtaggaatcggcttcaacggttacttcactttaaccaacaccacaaaacacacattcggtcaagctttcgaaaacgagcacgttgaaatcaagaactcatcgacaggtgtcatctcatctttctcagtcaacttcttctttgcgatcgtccctgaacataaccagcaaggctcacacggtatgactttcgtcatctctcccacaagaggccttcccggagcttcctccgatcaatacctcggaatctttaacaaaacaaacaacggtaaagcctcgaataacgttatagctatcgagttagatattcataaagacgaagagtttggagatattgatgataatcatgttgggattaatattaacggtttgagatctgttgcctctgcttctgctggttactatgatgataaagatggaagctttaaaaaactttctttgatcagcagagaggtaatgaggctttccatcgtttatagtcaacctgatcaacagctcaatgttactttattccctgctgagatccctgttccgccactaaaaccgctcttgtctttgaaccgagatctctcgccgtatttgcttgagaaaatgtatcttggattcactgcatcgacggggtcagttggagcaattcattacttgatgggttggttagttaatggtgtaatcgagtatccgagattggagcttagtataccagtccttcctccatatccaaagaaaacatctaatagaacgaaaactgttttagccgtctgcttaacggtatctgtgtttgctgcgtttgtcgcttcgtggatcggtttcgtcttctatttgaggcataagaaggttaaagaggttcttgaagaatgggagattcaatatggacctcataggtttgcttataaggagcttttcaatgccacaaagggtttcaaggagaaacaacttcttggtaaaggaggctttggtcaagtctataaaggaacacttccgggttctgatgcagagatcgctgtgaagcggacttctcatgattcaagacaagggatgagcgagtttctagccgagatatcgaccattggtcgtctcagacatccaaatttagtcaggcttttaggatactgtaggcataaagagaatctctacttggtgtatgactatatgcctaatggaagccttgacaagtatctaaaccgtagcgagaatcaagaacggcttacttgggaacaacgtttcaggatcatcaaagatgttgcaactgctctactacacctgcatcaagaatgggtacaagtcatcattcatcgagatatcaaaccagctaatgttttaatcgacaatgaaatgaatgcgaggctcggggatttcggactggcgaaactgtatgatcagggattcgatcctgaaacatctaaagtagcgggaacattcggatatatcgcaccagagtttctaagaacaggaagagcaaccacaagcactgatgtttacgcctttgggttggtaatgcttgaagtagtgtgtggtagaaggataattgagagacgtgcagcagaaaatgaagaatatcttgtggattggatcttagagctttgggaaaatgggaaaattttcgatgcagcagaggaaagtatacgtcaagaacaaaacaggggacaagttgagcttgttttgaagctaggtgtgttgtgttcgcatcaagctgcatcgataagaccggctatgagtgtggtaatgaggattttgaatggagtttcacagctaccagataatcttcttgatgttgtaagggctgagaaatttagagaatggcctgagacatcaatggaattactactacttgatgtgaatacatcgagttcattggagttaaccgactcttcttttgtctcccacggccgctgaaattttaagtttaccactgattctttgtttgctatgaagatgtatcacaactgagattattacacattgtaatacacagccgaatgttttttttcctggtatgtacaagaataagaccacaccgcctcctccaaacattttttt

SEQ ID NO: 83923 - protein, 665 aa, Arabidopsis thaliana
  peptide (1)..(665): Ceres Seq. ID no. 12672459
  misc_feature (14)..(665): Homolog of NCBI NO: 15231745 NR Description: receptor lectin kinase 3; protein id: At3g59740.1
  misc_feature (14)..(665): Homolog of NCBI NO: 4100060 NR Description: receptor lectin kinase 3 [Arabidopsis thaliana]
  misc_feature (14)..(633): Homolog of NCBI NO: 11346429 NR Description: receptor lectin kinase 3 - Arabidopsis thaliana >gi|7019668|emb|CAB75793.1| receptor lectin kinase 3 [Arabidopsis
  misc_feature (187)..(665): Homolog of NCBI NO: 15231747 NR Description: receptor lectin kinase-like protein; protein id:
  misc_feature (5)..(154): Homolog of NCBI NO: 15231747 NR Description: receptor lectin kinase-like protein; protein id:
  misc_feature (97)..(665): Homolog of NCBI NO: 11346416 NR Description: receptor lectin kinase 3 - Arabidopsis thaliana
  misc_feature (16)..(665): Homolog of NCBI NO: 15224335 NR Description: putative receptor protein kinase; protein id: supported by cDNA: gi_18491244 [Arabidopsis thaliana]
  misc_feature (16)..(653): Homolog of NCBI NO: 15224334 NR Description: putative receptor protein kinase; protein id: [Arabidopsis thaliana] >gi|25387039|pir||C84869 probable receptor
  misc_feature (5)..(521): Homolog of NCBI NO: 15231743 NR Description: receptor lectin kinase-like protein (fragment); id: At3g59730.1 [Arabidopsis thaliana] >gi|11358748|pir||T49314
  misc_feature (25)..(665): Homolog of NCBI NO: 15235547 NR Description: serine threonine-specific kinase like protein;
KHPPMSRELIILCQPILVLFLTLFYNSHGYFVSQGSVGIGFNGYFTLTNTTKHTFGQAFENEHVEIKNSSTGVISSFSVNFFFAIVPEHNQQGSHGMTFVISPTRGLPGASSDQYLGIFNKTNNGKASNNVIAIELDIHKDEEFGDIDDNHVGININGLRSVASASAGYYDDKDGSFKKLSLISREVMRLSIVYSQPDQQLNVTLFPAEIPVPPLKPLLSLNRDLSPYLLEKMYLGFTASTGSVGAIHYLMGWLVNGVIEYPRLELSIPVLPPYPKKTSNRTKTVLAVCLTVSVFAAFVASWIGFVFYLRHKKVKEVLEEWEIQYGPHRFAYKELFNATKGFKEKQLLGKGGFGQVYKGTLPGSDAEIAVKRTSHDSRQGMSEFLAEISTIGRLRHPNLVRLLGYCRHKENLYLVYDYMPNGSLDKYLNRSENQERLTWEQRFRIIKDVATALLHLHQEWVQVIIHRDIKPANVLIDNEMNARLGDFGLAKLYDQGFDPETSKVAGTFGYIAPEFLRTGRATTSTDVYAFGLVMLEVVCGRRIIERRAAENEEYLVDWILELWENGKIFDAAEESIRQEQNRGQVELVLKLGVLCSHQAASIRPAMSVVMRILNGVSQLPDNLLDVVRAEKFREWPETSMELLLLDVNTSSSLELTDSSFVSHGR

SEQ ID NO: 83924 - protein, 661 aa, Arabidopsis thaliana
  peptide (1)..(661): Ceres Seq. ID no. 12672460
  misc_feature (10)..(661): Homolog of NCBI NO: 15231745 NR Description: receptor lectin kinase 3; protein id: At3g59740.1
  misc_feature (10)..(661): Homolog of NCBI NO: 4100060 NR Description: receptor lectin kinase 3 [Arabidopsis thaliana]
  misc_feature (10)..(629): Homolog of NCBI NO: 11346429 NR Description: receptor lectin kinase 3 - Arabidopsis thaliana >gi|7019668|emb|CAB75793.1| receptor lectin kinase 3 [Arabidopsis
  misc_feature (183)..(661): Homolog of NCBI NO: 15231747 NR Description: receptor lectin kinase-like protein; protein id:
  misc_feature (1)..(150): Homolog of NCBI NO: 15231747 NR Description: receptor lectin kinase-like protein; protein id:
  misc_feature (93)..(661): Homolog of NCBI NO: 11346416 NR Description: receptor lectin kinase 3 - Arabidopsis thaliana
  misc_feature (12)..(661): Homolog of NCBI NO: 15224335 NR Description: putative receptor protein kinase; protein id: supported by cDNA: gi_18491244 [Arabidopsis thaliana]
  misc_feature (12)..(649): Homolog of NCBI NO: 15224334 NR Description: putative receptor protein kinase; protein id: [Arabidopsis thaliana] >gi|25387039|pir||C84869 probable receptor
  misc_feature (1)..(517): Homolog of NCBI NO: 15231743 NR Description: receptor lectin kinase-like protein (fragment); id: At3g59730.1 [Arabidopsis thaliana] >gi|11358748|pir||T49314
  misc_feature (21)..(661): Homolog of NCBI NO: 15235547 NR Description: serine threonine-specific kinase like protein;
MSRELIILCQPILVLFLTLFYNSHGYFVSQGSVGIGFNGYFTLTNTTKHTFGQAFENEHVEIKNSSTGVISSFSVNFFFAIVPEHNQQGSHGMTFVISPTRGLPGASSDQYLGIFNKTNNGKASNNVIAIELDIHKDEEFGDIDDNHVGININGLRSVASASAGYYDDKDGSFKKLSLISREVMRLSIVYSQPDQQLNVTLFPAEIPVPPLKPLLSLNRDLSPYLLEKMYLGFTASTGSVGAIHYLMGWLVNGVIEYPRLELSIPVLPPYPKKTSNRTKTVLAVCLTVSVFAAFVASWIGFVFYLRHKKVKEVLEEWEIQYGPHRFAYKELFNATKGFKEKQLLGKGGFGQVYKGTLPGSDAEIAVKRTSHDSRQGMSEFLAEISTIGRLRHPNLVRLLGYCRHKENLYLVYDYMPNGSLDKYLNRSENQERLTWEQRFRIIKDVATALLHLHQEWVQVIIHRDIKPANVLIDNEMNARLGDFGLAKLYDQGFDPETSKVAGTFGYIAPEFLRTGRATTSTDVYAFGLVMLEVVCGRRIIERRAAENEEYLVDWILELWENGKIFDAAEESIRQEQNRGQVELVLKLGVLCSHQAASIRPAMSVVMRILNGVSQLPDNLLDVVRAEKFREWPETSMELLLLDVNTSSSLELTDSSFVSHGR

SEQ ID NO: 83925 - protein, 569 aa, Arabidopsis thaliana
  peptide (1)..(569): Ceres Seq. ID no. 12672461
  misc_feature (1)..(569): Homolog of NCBI NO: 15231745 NR Description: receptor lectin kinase 3; protein id: At3g59740.1
  misc_feature (1)..(569): Homolog of NCBI NO: 4100060 NR Description: receptor lectin kinase 3 [Arabidopsis thaliana]
  misc_feature (1)..(537): Homolog of NCBI NO: 11346429 NR Description: receptor lectin kinase 3 - Arabidopsis thaliana >gi|7019668|emb|CAB75793.1| receptor lectin kinase 3 [Arabidopsis
  misc_feature (91)..(569): Homolog of NCBI NO: 15231747 NR Description: receptor lectin kinase-like protein; protein id:
  misc_feature (1)..(58): Homolog of NCBI NO: 15231747 NR Description: receptor lectin kinase-like protein; protein id:
  misc_feature (1)..(569): Homolog of NCBI NO: 11346416 NR Description: receptor lectin kinase 3 - Arabidopsis thaliana
  misc_feature (1)..(569): Homolog of NCBI NO: 15224335 NR Description: putative receptor protein kinase; protein id: supported by cDNA: gi_18491244 [Arabidopsis thaliana]
  misc_feature (1)..(557): Homolog of NCBI NO: 15224334 NR Description: putative receptor protein kinase; protein id: [Arabidopsis thaliana] >gi|25387039|pir||C84869 probable receptor
  misc_feature (1)..(425): Homolog of NCBI NO: 15231743 NR Description: receptor lectin kinase-like protein (fragment); id: At3g59730.1 [Arabidopsis thaliana] >gi|11358748|pir||T49314
  misc_feature (1)..(569): Homolog of NCBI NO: 15235547 NR Description: serine threonine-specific kinase like protein;
MTFVISPTRGLPGASSDQYLGIFNKTNNGKASNNVIAIELDIHKDEEFGDIDDNHVGININGLRSVASASAGYYDDKDGSFKKLSLISREVMRLSIVYSQPDQQLNVTLFPAEIPVPPLKPLLSLNRDLSPYLLEKMYLGFTASTGSVGAIHYLMGWLVNGVIEYPRLELSIPVLPPYPKKTSNRTKTVLAVCLTVSVFAAFVASWIGFVFYLRHKKVKEVLEEWEIQYGPHRFAYKELFNATKGFKEKQLLGKGGFGQVYKGTLPGSDAEIAVKRTSHDSRQGMSEFLAEISTIGRLRHPNLVRLLGYCRHKENLYLVYDYMPNGSLDKYLNRSENQERLTWEQRFRIIKDVATALLHLHQEWVQVIIHRDIKPANVLIDNEMNARLGDFGLAKLYDQGFDPETSKVAGTFGYIAPEFLRTGRATTSTDVYAFGLVMLEVVCGRRIIERRAAENEEYLVDWILELWENGKIFDAAEESIRQEQNRGQVELVLKLGVLCSHQAASIRPAMSVVMRILNGVSQLPDNLLDVVRAEKFREWPETSMELLLLDVNTSSSLELTDSSFVSHGR

SEQ ID NO: 83926 - DNA, 1980 bp, Arabidopsis thaliana
  misc_feature (1)..(1980): Ceres Seq. ID no. 12672462
  misc_feature: MA Experiment ID: 20000347 Result: Up-regulated in Transcription
  misc_feature: MA Experiment 20000347 PARAMETER Experiment Name: At_2mM_SA_Sub_P Parameter: Age (day) Value: 14
  misc_feature: MA Experiment 20000347 PARAMETER Experiment Name: At_2mM_SA_Sub_P Parameter: Organism Value: A. thaliana
  misc_feature: MA Experiment 20000347 PARAMETER Experiment Name: At_2mM_SA_Sub_P Parameter: Plant Line Value: WS
  misc_feature: MA Experiment 20000347 PARAMETER Experiment Name: At_2mM_SA_Sub_P Parameter: Timepoint (hr) Value: 6
  misc_feature: MA Experiment 20000347 PARAMETER Experiment Name: At_2mM_SA_Sub_P Parameter: Tissue Value: Aerial
  misc_feature: MA Experiment 20000347 PARAMETER Experiment Name: At_2mM_SA_Sub_P Parameter: Treatment Value: 2mM SA vs. No Treatment
  misc_feature: MA Experiment ID: 20000440 Result: Down-regulated in Transcription
  misc_feature: MA Experiment 20000440 PARAMETER Experiment Name: At_Closed-Flower__Sub_P Parameter: Tissue Value: Closed Flower vs. Whole Plant
atgtctcataaagtcttacaaatagttctcgttctgttgcttactctgttttcatctactcacaactccaatggcaacttcctcatggaagaagctgcagctgcaggtttaaacggttattgccttttaacaaacaccacgaagcattcctacggtcaagctttcaacaacactcccgttcccatcaagaactcatctttctcattcaacatcatcttcgggatcgtccctgaacataagcagcaaggttcacacggtatggctttcgttttctctcctacaagaggccttcccggagcttcccccgatcaatacctgggaatctttaacgagacaaacaacggtaaagcctcgaataacgttatagctatcgagttagatatacgaaaagacgaagagtttggagatattgatgataatcatgttgggattaacattaatggtttgacatctgttgcctctgcttctgctggttactatgatgatgaagatggaaacttcaaaaagctttctttgatcagcacaaaggtaatgaggctttccatcgtttatagtcacaccgataaacagctcaatgttactttattacctgctgaaatctctgttccgccacaaaaatcgctcttgtctttgaaccgagatctctcgccctattttttggaggagacgtacttgggtttcacggcatcgaccgggtcgatcggagcactctattatgtgatgcaattttcctatgaagaaggagttatatatccagcatgggaccttggcgtaatcccaacccttcctccatatccaaagaagtcgtatgatagaacacggaggattttagcggtctgcttaacgttggccgtgttcactgcattagtcgcttccggaataggttttgtcttttatgtgaggcataagaaggttaaggaggttcttgaagaatgggagattcagaatggacctcataggttttcttataaggagcttttcaatgccacaaagggtttcaaagagaaacaacttcttgggaaaggaggctttggtcaagtctacaaaggaatgcttccgggttccgatgcagagatcgctgtaaaacggacttctcatgattcaagacaagggatgagcgaatttctagccgagatatcgaccattggtcgtctcagacatccaaatctagtcaggcttttgggatattgtaagcataaagagaatctctacttagtttatgactttatgcctaatggaagccttgacaggtgtctaacccgtagcaacacgaatgaaaatcaagaacggcttacttgggaacaacgtttcaagatcatcaaagacgttgcaactgctctactacacctgcatcaagaatgggtacaagtcatcgttcatcgagatataaaaccggctaatgttctactcgaccacggcatgaatgcgaggctcggggatttcggattggcgaagctgtatgatcagggatttgatcctcagacatctagagtagcgggaacattaggttatattgcacctgagctcttaagaacaggaagagcaaccacaagcacagatgtttacgcctttgggttggttatgcttgaagtcgtttgtggtagaagattgattgagagacgtgcagcagaaaatgaagcggttcttgttgattggattttagagctttgggaaagtgggaaacttttcgatgcagctgaggaaagtattcgtcaagaacaaaacagaggagaaattgagcttgttttgaagctaggtctgttgtgtgcacatcacactgaattgattagaccgaacatgagtgcggttttgcagatcttgaatggcgtttcgcatcttcccaataatcttcttgatgttgttagggctgagagattgagaggaattcctgagacatcaatggaagtactacttggtcttgatctgaattcttttggtacaatgacgttgacgaattcttttgtgtcccatggacgctga

SEQ ID NO: 83927 - protein, 659 aa, Arabidopsis thaliana
  peptide (1)..(659): Ceres Seq. ID no. 12672463
  misc_feature (87)..(659): Homolog of NCBI NO: 11346416 NR Description: receptor lectin kinase 3 - Arabidopsis thaliana
  misc_feature (7)..(659): Homolog of NCBI NO: 15231734 NR Description: serine/threonine-specific kinase lecRK1
  misc_feature (177)..(659): Homolog of NCBI NO: 15231747 NR Description: receptor lectin kinase-like protein; protein id:
  misc_feature (4)..(144): Homolog of NCBI NO: 15231747 NR Description: receptor lectin kinase-like protein; protein id:
  misc_feature (4)..(515): Homolog of NCBI NO: 15231743 NR Description: receptor lectin kinase-like protein (fragment); id: At3g59730.1 [Arabidopsis thaliana] >gi|11358748|pir||T49314
  misc_feature (1)..(659): Homolog of NCBI NO: 15224335 NR Description: putative receptor protein kinase; protein id: supported by cDNA: gi_18491244 [Arabidopsis thaliana]
  misc_feature (1)..(659): Homolog of NCBI NO: 15224334 NR Description: putative receptor protein kinase; protein id: [Arabidopsis thaliana] >gi|25387039|pir||C84869 probable receptor
  misc_feature (4)..(659): Homolog of NCBI NO: 15235547 NR Description: serine threonine-specific kinase like protein;
  misc_feature (17)..(659): Homolog of NCBI NO: 34899526 NR Description: putative receptor-type protein kinase LRK1 [Oryza
  misc_feature (17)..(607): Homolog of NCBI NO: 15233300 NR Description: probable serine/threonine-specific protein protein id: At3g55550.1 [Arabidopsis thaliana]
MSHKVLQIVLVLLLTLFSSTHNSNGNFLMEEAAAAGLNGYCLLTNTTKHSYGQAFNNTPVPIKNSSFSFNIIFGIVPEHKQQGSHGMAFVFSPTRGLPGASPDQYLGIFNETNNGKASNNVIAIELDIRKDEEFGDIDDNHVGININGLTSVASASAGYYDDEDGNFKKLSLISTKVMRLSIVYSHTDKQLNVTLLPAEISVPPQKSLLSLNRDLSPYFLEETYLGFTASTGSIGALYYVMQFSYEEGVIYPAWDLGVIPTLPPYPKKSYDRTRRILAVCLTLAVFTALVASGIGFVFYVRHKKVKEVLEEWEIQNGPHRFSYKELFNATKGFKEKQLLGKGGFGQVYKGMLPGSDAEIAVKRTSHDSRQGMSEFLAEISTIGRLRHPNLVRLLGYCKHKENLYLVYDFMPNGSLDRCLTRSNTNENQERLTWEQRFKIIKDVATALLHLHQEWVQVIVHRDIKPANVLLDHGMNARLGDFGLAKLYDQGFDPQTSRVAGTLGYIAPELLRTGRATTSTDVYAFGLVMLEVVCGRRLIERRAAENEAVLVDWILELWESGKLFDAAEESIRQEQNRGEIELVLKLGLLCAHHTELIRPNMSAVLQILNGVSHLPNNLLDVVRAERLRGIPETSMEVLLGLDLNSFGTMTLTNSFVSHGR

SEQ ID NO: 83928 - protein, 631 aa, Arabidopsis thaliana
  peptide (1)..(631): Ceres Seq. ID no. 12672464
  misc_feature (59)..(631): Homolog of NCBI NO: 11346416 NR Description: receptor lectin kinase 3 - Arabidopsis thaliana
  misc_feature (1)..(631): Homolog of NCBI NO: 15231734 NR Description: serine/threonine-specific kinase lecRK1
  misc_feature (149)..(631): Homolog of NCBI NO: 15231747 NR Description: receptor lectin kinase-like protein; protein id:
  misc_feature (1)..(116): Homolog of NCBI NO: 15231747 NR Description: receptor lectin kinase-like protein; protein id:
  misc_feature (1)..(487): Homolog of NCBI NO: 15231743 NR Description: receptor lectin kinase-like protein (fragment); id: At3g59730.1 [Arabidopsis thaliana] >gi|11358748|pir||T49314
  misc_feature (1)..(631): Homolog of NCBI NO: 15224335 NR Description: putative receptor protein kinase; protein id: supported by cDNA: gi_18491244 [Arabidopsis thaliana]
  misc_feature (1)..(631): Homolog of NCBI NO: 15224334 NR Description: putative receptor protein kinase; protein id: [Arabidopsis thaliana] >gi|25387039|pir||C84869 probable receptor
  misc_feature (1)..(631): Homolog of NCBI NO: 15235547 NR Description: serine threonine-specific kinase like protein;
  misc_feature (1)..(631): Homolog of NCBI NO: 34899526 NR Description: putative receptor-type protein kinase LRK1 [Oryza
  misc_feature (1)..(579): Homolog of NCBI NO: 15233300 NR Description: probable serine/threonine-specific protein protein id: At3g55550.1 [Arabidopsis thaliana]
MEEAAAAGLNGYCLLTNTTKHSYGQAFNNTPVPIKNSSFSFNIIFGIVPEHKQQGSHGMAFVFSPTRGLPGASPDQYLGIFNETNNGKASNNVIAIELDIRKDEEFGDIDDNHVGININGLTSVASASAGYYDDEDGNFKKLSLISTKVMRLSIVYSHTDKQLNVTLLPAEISVPPQKSLLSLNRDLSPYFLEETYLGFTASTGSIGALYYVMQFSYEEGVIYPAWDLGVIPTLPPYPKKSYDRTRRILAVCLTLAVFTALVASGIGFVFYVRHKKVKEVLEEWEIQNGPHRFSYKELFNATKGFKEKQLLGKGGFGQVYKGMLPGSDAEIAVKRTSHDSRQGMSEFLAEISTIGRLRHPNLVRLLGYCKHKENLYLVYDFMPNGSLDRCLTRSNTNENQERLTWEQRFKIIKDVATALLHLHQEWVQVIVHRDIKPANVLLDHGMNARLGDFGLAKLYDQGFDPQTSRVAGTLGYIAPELLRTGRATTSTDVYAFGLVMLEVVCGRRLIERRAAENEAVLVDWILELWESGKLFDAAEESIRQEQNRGEIELVLKLGLLCAHHTELIRPNMSAVLQILNGVSHLPNNLLDVVRAERLRGIPETSMEVLLGLDLNSFGTMTLTNSFVSHGR

SEQ ID NO: 83929 - protein, 573 aa, Arabidopsis thaliana
  peptide (1)..(573): Ceres Seq. ID no. 12672465
  misc_feature (1)..(573): Homolog of NCBI NO: 11346416 NR Description: receptor lectin kinase 3 - Arabidopsis thaliana
  misc_feature (1)..(573): Homolog of NCBI NO: 15231734 NR Description: serine/threonine-specific kinase lecRK1
  misc_feature (91)..(573): Homolog of NCBI NO: 15231747 NR Description: receptor lectin kinase-like protein; protein id:
  misc_feature (1)..(58): Homolog of NCBI NO: 15231747 NR Description: receptor lectin kinase-like protein; protein id:
  misc_feature (1)..(429): Homolog of NCBI NO: 15231743 NR Description: receptor lectin kinase-like protein (fragment); id: At3g59730.1 [Arabidopsis thaliana] >gi|11358748|pir||T49314
  misc_feature (1)..(573): Homolog of NCBI NO: 15224335 NR Description: putative receptor protein kinase; protein id: supported by cDNA: gi_18491244 [Arabidopsis thaliana]
  misc_feature (1)..(573): Homolog of NCBI NO: 15224334 NR Description: putative receptor protein kinase; protein id: [Arabidopsis thaliana] >gi|25387039|pir||C84869 probable receptor
  misc_feature (1)..(573): Homolog of NCBI NO: 15235547 NR Description: serine threonine-specific kinase like protein;
  misc_feature (1)..(573): Homolog of NCBI NO: 34899526 NR Description: putative receptor-type protein kinase LRK1 [Oryza
  misc_feature (1)..(521): Homolog of NCBI NO: 15233300 NR Description: probable serine/threonine-specific protein protein id: At3g55550.1 [Arabidopsis thaliana]
MAFVFSPTRGLPGASPDQYLGIFNETNNGKASNNVIAIELDIRKDEEFGDIDDNHVGININGLTSVASASAGYYDDEDGNFKKLSLISTKVMRLSIVYSHTDKQLNVTLLPAEISVPPQKSLLSLNRDLSPYFLEETYLGFTASTGSIGALYYVMQFSYEEGVIYPAWDLGVIPTLPPYPKKSYDRTRRILAVCLTLAVFTALVASGIGFVFYVRHKKVKEVLEEWEIQNGPHRFSYKELFNATKGFKEKQLLGKGGFGQVYKGMLPGSDAEIAVKRTSHDSRQGMSEFLAEISTIGRLRHPNLVRLLGYCKHKENLYLVYDFMPNGSLDRCLTRSNTNENQERLTWEQRFKIIKDVATALLHLHQEWVQVIVHRDIKPANVLLDHGMNARLGDFGLAKLYDQGFDPQTSRVAGTLGYIAPELLRTGRATTSTDVYAFGLVMLEVVCGRRLIERRAAENEAVLVDWILELWESGKLFDAAEESIRQEQNRGEIELVLKLGLLCAHHTELIRPNMSAVLQILNGVSHLPNNLLDVVRAERLRGIPETSMEVLLGLDLNSFGTMTLTNSFVSHGR

SEQ ID NO: 83930 - DNA, 843 bp, Arabidopsis thaliana
  misc_feature (1)..(843): Ceres Seq. ID no. 12672482
  misc_feature: MA Experiment ID: 20000171 Result: Down-regulated in Transcription
  misc_feature: MA Experiment 20000171 PARAMETER Experiment Name: At_42deg_Heat_P Parameter: Age (day) Value: 14
  misc_feature: MA Experiment 20000171 PARAMETER Experiment Name: At_42deg_Heat_P Parameter: Organism Value: A. thaliana
  misc_feature: MA Experiment 20000171 PARAMETER Experiment Name: At_42deg_Heat_P Parameter: Plant Line Value: WS
  misc_feature: MA Experiment 20000171 PARAMETER Experiment Name: At_42deg_Heat_P Parameter: Temperature (deg C) Value: 42 vs. 22
  misc_feature: MA Experiment 20000171 PARAMETER Experiment Name: At_42deg_Heat_P Parameter: Timepoint (hr) Value: 1
  misc_feature: MA Experiment 20000171 PARAMETER Experiment Name: At_42deg_Heat_P Parameter: Tissue Value: Aerial
  misc_feature: MA Experiment ID: 20000173 Result: Down-regulated in Transcription
  misc_feature: MA Experiment 20000173 PARAMETER Experiment Name: At_42deg_Heat_P Parameter: Age (day) Value: 14
  misc_feature: MA Experiment 20000173 PARAMETER Experiment Name: At_42deg_Heat_P Parameter: Organism Value: A. thaliana
  misc_feature: MA Experiment 20000173 PARAMETER Experiment Name: At_42deg_Heat_P Parameter: Plant Line Value: WS
  misc_feature: MA Experiment 20000173 PARAMETER Experiment Name: At_42deg_Heat_P Parameter: Temperature (deg C) Value: 42 vs. 22
  misc_feature: MA Experiment 20000173 PARAMETER Experiment Name: At_42deg_Heat_P Parameter: Timepoint (hr) Value: 6
  misc_feature: MA Experiment 20000173 PARAMETER Experiment Name: At_42deg_Heat_P Parameter: Tissue Value: Aerial
  misc_feature: MA Experiment ID: 20000179 Result: Up-regulated in Transcription
  misc_feature: MA Experiment 20000179 PARAMETER Experiment Name: At_Germinating_Seeds_P Parameter: Age (hr) Value: 6 vs. 0
  misc_feature: MA Experiment 20000179 PARAMETER Experiment Name: At_Germinating_Seeds_P Parameter: Tissue Value: Germinating Seeds
  misc_feature: MA Experiment ID: 20000180 Result: Up-regulated in Transcription
  misc_feature: MA Experiment 20000180 PARAMETER Experiment Name: At_Germinating_Seeds_P Parameter: Age (hr) Value: 24 vs. 0
  misc_feature: MA Experiment 20000180 PARAMETER Experiment Name: At_Germinating_Seeds_P Parameter: Tissue Value: Germinating Seeds
  misc_feature: MA Experiment ID: 20000182 Result: Up-regulated in Transcription
  misc_feature: MA Experiment 20000182 PARAMETER Experiment Name: At_2mM_SA_P Parameter: Age (day) Value: 14
  misc_feature: MA Experiment 20000182 PARAMETER Experiment Name: At_2mM_SA_P Parameter: Organism Value: A. thaliana
  misc_feature: MA Experiment 20000182 PARAMETER Experiment Name: At_2mM_SA_P Parameter: Plant Line Value: WS
  misc_feature: MA Experiment 20000182 PARAMETER Experiment Name: At_2mM_SA_P Parameter: Timepoint (hr) Value: 6
  misc_feature: MA Experiment 20000182 PARAMETER Experiment Name: At_2mM_SA_P Parameter: Tissue Value: Aerial
  misc_feature: MA Experiment 20000182 PARAMETER Experiment Name: At_2mM_SA_P Parameter: Treatment Value: 2mM SA vs. No Treatment
  misc_feature: MA Experiment ID: 20000184 Result: Down-regulated in Transcription
  misc_feature: MA Experiment 20000184 PARAMETER Experiment Name: At_Shoots__P Parameter: Age (day) Value: 7
  misc_feature: MA Experiment 20000184 PARAMETER Experiment Name: At_Shoots__P Parameter: Tissue Value: Shoots vs. Whole Plant
  misc_feature: MA Experiment ID: 20000234 Result: Down-regulated in Transcription
  misc_feature: MA Experiment 20000234 PARAMETER Experiment Name: At_Siliques_P Parameter: Age (day) Value: 21
  misc_feature: MA Experiment 20000234 PARAMETER Experiment Name: At_Siliques_P Parameter: Organism Value: A. thaliana
  misc_feature: MA Experiment 20000234 PARAMETER Experiment Name: At_Siliques_P Parameter: Plant Line Value: WS
  misc_feature: MA Experiment 20000234 PARAMETER Experiment Name: At_Siliques_P Parameter: Tissue Value: Less Than 5mm Siliques vs. Whole Plant
  misc_feature: MA Experiment ID: 20000235 Result: Down-regulated in Transcription
  misc_feature: MA Experiment 20000235 PARAMETER Experiment Name: At_Siliques_P Parameter: Age (day) Value: 21
  misc_feature: MA Experiment 20000235 PARAMETER Experiment Name: At_Siliques_P Parameter: Organism Value: A. thaliana
  misc_feature: MA Experiment 20000235 PARAMETER Experiment Name: At_Siliques_P Parameter: Plant Line Value: WS
  misc_feature: MA Experiment 20000235 PARAMETER Experiment Name: At_Siliques_P Parameter: Tissue Value: 5-10mm Siliques vs. Whole Plant
  misc_feature: MA Experiment ID: 20000264 Result: Down-regulated in Transcription
  misc_feature: MA Experiment 20000264 PARAMETER Experiment Name: At_Open_Flower_P Parameter: Age (day) Value: 21
  misc_feature: MA Experiment 20000264 PARAMETER Experiment Name: At_Open_Flower_P Parameter: Plant Line Value: WS
  misc_feature: MA Experiment 20000264 PARAMETER Experiment Name: At_Open_Flower_P Parameter: Tissue Value: Open Flower vs. Whole Plant
  misc_feature: MA Experiment ID: 20000265 Result: Down-regulated in Transcription
  misc_feature: MA Experiment 20000265 PARAMETER Experiment Name: At_Open_Flower_P Parameter: Age (day) Value: 21
  misc_feature: MA Experiment 20000265 PARAMETER Experiment Name: At_Open_Flower_P Parameter: Plant Line Value: WS
  misc_feature: MA Experiment 20000265 PARAMETER Experiment Name: At_Open_Flower_P Parameter: Tissue Value: Closed Flower vs. Whole Plant
  misc_feature: MA Experiment ID: 20000286 Result: Down-regulated in Transcription
  misc_feature: MA Experiment 20000286 PARAMETER Experiment Name: At_Open_Flower_P Parameter: Age (day) Value: 21
  misc_feature: MA Experiment 20000286 PARAMETER Experiment Name: At_Open_Flower_P Parameter: Plant Line Value: WS
  misc_feature: MA Experiment 20000286 PARAMETER Experiment Name: At_Open_Flower_P Parameter: Tissue Value: Half Open vs. Whole Plant
  misc_feature: MA Experiment ID: 20000438 Result: Down-regulated in Transcription
  misc_feature: MA Experiment 20000438 PARAMETER Experiment Name: At_Shoots__P Parameter: Age (day) Value: 14
  misc_feature: MA Experiment 20000438 PARAMETER Experiment Name: At_Shoots__P Parameter: Tissue Value: Shoots vs. Whole Plant
  misc_feature: MA Experiment ID: 20000495 Result: Up-regulated in Transcription
  misc_feature: MA Experiment 20000495 PARAMETER Experiment Name: At_Guard_Cells_P Parameter: Harvest Date Value: 8/2/2002
  misc_feature: MA Experiment 20000495 PARAMETER Experiment Name: At_Guard_Cells_P Parameter: Organism Value: A. thaliana
  misc_feature: MA Experiment 20000495 PARAMETER Experiment Name: At_Guard_Cells_P Parameter: Tissue Value: Guard Cells vs. Leaves
  misc_feature: MA Experiment ID: 20000575 Result: Down-regulated in Transcription
  misc_feature: MA Experiment 20000575 PARAMETER Experiment Name: At_100uM_ABA_Mutants__P Parameter: Organism Value: A. thaliana
  misc_feature: MA Experiment 20000575 PARAMETER Experiment Name: At_100uM_ABA_Mutants__P Parameter: Plant Line Value: CS22
  misc_feature: MA Experiment 20000575 PARAMETER Experiment Name: At_100uM_ABA_Mutants__P Parameter: Timepoint (hr) Value: 6
  misc_feature: MA Experiment 20000575 PARAMETER Experiment Name: At_100uM_ABA_Mutants__P Parameter: Tissue Value: Whole Plant
  misc_feature: MA Experiment 20000575 PARAMETER Experiment Name: At_100uM_ABA_Mutants__P Parameter: Treatment Value: 1uM ABA vs. No Treatment
  misc_feature: MA Experiment ID: 20000576 Result: Down-regulated in Transcription
  misc_feature: MA Experiment 20000576 PARAMETER Experiment Name: At_100uM_ABA_Mutants__P Parameter: Organism Value: A. thaliana
  misc_feature: MA Experiment 20000576 PARAMETER Experiment Name: At_100uM_ABA_Mutants__P Parameter: Plant Line Value: CS23
  misc_feature: MA Experiment 20000576 PARAMETER Experiment Name: At_100uM_ABA_Mutants__P Parameter: Timepoint (hr) Value: 6
  misc_feature: MA Experiment 20000576 PARAMETER Experiment Name: At_100uM_ABA_Mutants__P Parameter: Tissue Value: Whole Plant
  misc_feature: MA Experiment 20000576 PARAMETER Experiment Name: At_100uM_ABA_Mutants__P Parameter: Treatment Value: 1uM ABA vs. No Treatment
  misc_feature: MA Experiment ID: 20000709 Result: Down-regulated in Transcription
  misc_feature: MA Experiment 20000709 PARAMETER Experiment Name: At_15mM_NH4NO3_L-to-H_P Parameter: Age (hr) Value: 14
  misc_feature: MA Experiment 20000709 PARAMETER Experiment Name: At_15mM_NH4NO3_L-to-H_P Parameter: Organism Value: A. thaliana
  misc_feature: MA Experiment 20000709 PARAMETER Experiment Name: At_15mM_NH4NO3_L-to-H_P Parameter: Plant Line Value: WS
  misc_feature: MA Experiment 20000709 PARAMETER Experiment Name: At_15mM_NH4NO3_L-to-H_P Parameter: Timepoint (hr) Value: 4
  misc_feature: MA Experiment 20000709 PARAMETER Experiment Name: At_15mM_NH4NO3_L-to-H_P Parameter: Tissue Value: Aerial
  misc_feature: MA Experiment 20000709 PARAMETER Experiment Name: At_15mM_NH4NO3_L-to-H_P Parameter: Treatment Value: 15mM NH4NO3 vs. 30mM Mannitol
  misc_feature: MA Experiment ID: 20000794 Result: Down-regulated in Transcription
  misc_feature: MA Experiment 20000794 PARAMETER Experiment Name: At_Petals_P Parameter: Age (day) Value: 23-25 days
  misc_feature: MA Experiment 20000794 PARAMETER Experiment Name: At_Petals_P Parameter: Plant Line Value: WS
  misc_feature: MA Experiment 20000794 PARAMETER Experiment Name: At_Petals_P Parameter: Tissue Value: Petals vs. Whole plant
  misc_feature: MA Experiment ID: 20001554 Result: Down-regulated in Transcription
  misc_feature: MA Experiment 20001554 PARAMETER Experiment Name: At_Drought_Soil_Dry_P Parameter: Age (day) Value: 21
  misc_feature: MA Experiment 20001554 PARAMETER Experiment Name: At_Drought_Soil_Dry_P Parameter: Organism Value: A. thaliana
  misc_feature: MA Experiment 20001554 PARAMETER Experiment Name: At_Drought_Soil_Dry_P Parameter: Plant Line Value: WS
  misc_feature: MA Experiment 20001554 PARAMETER Experiment Name: At_Drought_Soil_Dry_P Parameter: Post Timepoint (hr) Value: None
  misc_feature: MA Experiment 20001554 PARAMETER Experiment Name: At_Drought_Soil_Dry_P Parameter: Post-Treatment Value: None
  misc_feature: MA Experiment 20001554 PARAMETER Experiment Name: At_Drought_Soil_Dry_P Parameter: Timepoint (day) Value: 7
  misc_feature: MA Experiment 20001554 PARAMETER Experiment Name: At_Drought_Soil_Dry_P Parameter: Treatment Value: Drought vs. No Drought
  misc_feature: MA Experiment ID: 20001555 Result: Down-regulated in Transcription
  misc_feature: MA Experiment 20001555 PARAMETER Experiment Name: At_Drought_Soil_Dry_P Parameter: Age (day) Value: 24
  misc_feature: MA Experiment 20001555 PARAMETER Experiment Name: At_Drought_Soil_Dry_P Parameter: Organism Value: A. thaliana
  misc_feature: MA Experiment 20001555 PARAMETER Experiment Name: At_Drought_Soil_Dry_P Parameter: Plant Line Value: WS
  misc_feature: MA Experiment 20001555 PARAMETER Experiment Name: At_Drought_Soil_Dry_P Parameter: Post Timepoint (hr) Value: None
  misc_feature: MA Experiment 20001555 PARAMETER Experiment Name: At_Drought_Soil_Dry_P Parameter: Post-Treatment Value: None
  misc_feature: MA Experiment 20001555 PARAMETER Experiment Name: At_Drought_Soil_Dry_P Parameter: Timepoint (day) Value: 10
  misc_feature: MA Experiment 20001555 PARAMETER Experiment Name: At_Drought_Soil_Dry_P Parameter: Treatment Value: Drought vs. No Drought
  misc_feature: MA Experiment ID: 20001556 Result: Down-regulated in Transcription
  misc_feature: MA Experiment 20001556 PARAMETER Experiment Name: At_Drought_Soil_Dry_P Parameter: Age (day) Value: 26
  misc_feature: MA Experiment 20001556 PARAMETER Experiment Name: At_Drought_Soil_Dry_P Parameter: Organism Value: A. thaliana
  misc_feature: MA Experiment 20001556 PARAMETER Experiment Name: At_Drought_Soil_Dry_P Parameter: Plant Line Value: WS
  misc_feature: MA Experiment 20001556 PARAMETER Experiment Name: At_Drought_Soil_Dry_P Parameter: Post Timepoint (hr) Value: None
  misc_feature: MA Experiment 20001556 PARAMETER Experiment Name: At_Drought_Soil_Dry_P Parameter: Post-Treatment Value: None
  misc_feature: MA Experiment 20001556 PARAMETER Experiment Name: At_Drought_Soil_Dry_P Parameter: Timepoint (day) Value: 12
  misc_feature: MA Experiment 20001556 PARAMETER Experiment Name: At_Drought_Soil_Dry_P Parameter: Treatment Value: Drought vs. No Drought
  misc_feature: MA Experiment ID: 20001904 Result: Down-regulated in Transcription
  misc_feature: MA Experiment 20001904 PARAMETER Experiment Name: At_Drought_Reproduction_P Parameter: Age (day) Value: 37
  misc_feature: MA Experiment 20001904 PARAMETER Experiment Name: At_Drought_Reproduction_P Parameter: Organism Value: A. thaliana
  misc_feature: MA Experiment 20001904 PARAMETER Experiment Name: At_Drought_Reproduction_P Parameter: Plant Line Value: WS
  misc_feature: MA Experiment 20001904 PARAMETER Experiment Name: At_Drought_Reproduction_P Parameter: Timepoint (day) Value: 7
  misc_feature: MA Experiment 20001904 PARAMETER Experiment Name: At_Drought_Reproduction_P Parameter: Tissue Value: Rosettes
  misc_feature: MA Experiment 20001904 PARAMETER Experiment Name: At_Drought_Reproduction_P Parameter: Treatment Value: Drought vs. No Drought
  misc_feature: MA Experiment ID: 20001905 Result: Down-regulated in Transcription
  misc_feature: MA Experiment 20001905 PARAMETER Experiment Name: At_Drought_Reproduction_P Parameter: Age (day) Value: 40
  misc_feature: MA Experiment 20001905 PARAMETER Experiment Name: At_Drought_Reproduction_P Parameter: Organism Value: A. thaliana
  misc_feature: MA Experiment 20001905 PARAMETER Experiment Name: At_Drought_Reproduction_P Parameter: Plant Line Value: WS
  misc_feature: MA Experiment 20001905 PARAMETER Experiment Name: At_Drought_Reproduction_P Parameter: Timepoint (day) Value: 10
  misc_feature: MA Experiment 20001905 PARAMETER Experiment Name: At_Drought_Reproduction_P Parameter: Tissue Value: Rosettes
  misc_feature: MA Experiment 20001905 PARAMETER Experiment Name: At_Drought_Reproduction_P Parameter: Treatment Value: Drought vs. No Drought
atggagaaacaaatctctctattgctctgtctactcctcttcatcttctcaatatcatcctctctccatgaaaccgaagctcgaaaacacaataaatataaacccgcaccgatcatgagcctagtcccaagaactctctacgaccaaatcttcatccacaaggacaacaacgcatgccctgcaaaaggtttctacccctatgaagctttcgtggaggctacaagatccttcccgaagttcgggagcgtaggaaacttttggacaaggcgacgcgaagtggctgcgtttttggcgcagatatctcacgagacaacaggtggttgggccacggcaccagacggaccatatgcgtggggattgtgttttaaagaggaagtgagtccacagagtaattattgtgatgcttctaataaggattggccttgtgtttctggcaagtcttacaaaggaagaggtcccattcaactatcttggaattacaattacggacaggcgggtcgagcattgggtttcgacggtttacagaacccagaacttgtagccaacaactccgttttagctttcaagacagctctttggttttggatgaccgaacagactcctaaaccgtcctgccataacgttatggtcaaccgatacagaccgacgaaagcagatagagcagcaaaccggactgtcggttatggtttagtcaccaacatcataaacggcggtttagaatgtgggattccaggagatggacgggtcactgaccgggtcgggtatttccaaagatacgctcagttgtttaaagtcaccacaggacctaatttagactgcgagaaccaaagacccttctcctaa

SEQ ID NO: 83931 - protein, 280 aa, Arabidopsis thaliana
  peptide (1)..(280): Ceres Seq. ID no. 12672483
  misc_feature (1)..(280): Homolog of NCBI NO: 15234281 NR Description: glycosyl hydrolase family 19 (chitinase); protein At4g01700.1 [Arabidopsis thaliana] >gi|7435350|pir||T02004
  misc_feature (10)..(279): Homolog of NCBI NO: 2129820 NR Description: chitinase (EC 3.2.1.14) class II - peanut
  misc_feature (1)..(280): Homolog of NCBI NO: 15217733 NR Description: glycosyl hydrolase family 19 (chitinase); protein At1g02360.1 [Arabidopsis thaliana] >gi|25289339|pir||H86153
  misc_feature (7)..(279): Homolog of NCBI NO: 5880847 NR Description: chitinase precursor [Petroselinum crispum]
  misc_feature (7)..(279): Homolog of NCBI NO: 5880845 NR Description: chitinase precursor [Petroselinum crispum]
  misc_feature (14)..(279): Homolog of NCBI NO: 6002766 NR Description: class II chitinase [Fragaria x ananassa]
  misc_feature (6)..(272): Homolog of NCBI NO: 4008074 NR Description: chitinase [Cynodon dactylon]
  misc_feature (35)..(279): Homolog of NCBI NO: 34894264 NR Description: unnamed protein product [Oryza sativa (japonica group)] >gi|8096375|dbj|BAA95846.1| unnamed protein product
  misc_feature (35)..(280): Homolog of NCBI NO: 584928 NR Description: ENDOCHITINASE CH25 PRECURSOR
  misc_feature (35)..(279): Homolog of NCBI NO: 5689118 NR Description: basic endochitinase [Arabidopsis thaliana]
MEKQISLLLCLLLFIFSISSSLHETEARKHNKYKPAPIMSLVPRTLYDQIFIHKDNNACPAKGFYPYEAFVEATRSFPKFGSVGNFWTRRREVAAFLAQISHETTGGWATAPDGPYAWGLCFKEEVSPQSNYCDASNKDWPCVSGKSYKGRGPIQLSWNYNYGQAGRALGFDGLQNPELVANNSVLAFKTALWFWMTEQTPKPSCHNVMVNRYRPTKADRAANRTVGYGLVTNIINGGLECGIPGDGRVTDRVGYFQRYAQLFKVTTGPNLDCENQRPFS

SEQ ID NO: 83932 - protein, 242 aa, Arabidopsis thaliana
  peptide (1)..(242): Ceres Seq. ID no. 12672484
  misc_feature (1)..(242): Homolog of NCBI NO: 15234281 NR Description: glycosyl hydrolase family 19 (chitinase); protein At4g01700.1 [Arabidopsis thaliana] >gi|7435350|pir||T02004
  misc_feature (1)..(241): Homolog of NCBI NO: 2129820 NR Description: chitinase (EC 3.2.1.14) class II - peanut
  misc_feature (1)..(242): Homolog of NCBI NO: 15217733 NR Description: glycosyl hydrolase family 19 (chitinase); protein At1g02360.1 [Arabidopsis thaliana] >gi|25289339|pir||H86153
  misc_feature (1)..(241): Homolog of NCBI NO: 5880847 NR Description: chitinase precursor [Petroselinum crispum]
  misc_feature (1)..(241): Homolog of NCBI NO: 5880845 NR Description: chitinase precursor [Petroselinum crispum]
  misc_feature (1)..(241): Homolog of NCBI NO: 6002766 NR Description: class II chitinase [Fragaria x ananassa]
  misc_feature (1)..(234): Homolog of NCBI NO: 4008074 NR Description: chitinase [Cynodon dactylon]
  misc_feature (1)..(241): Homolog of NCBI NO: 34894264 NR Description: unnamed protein product [Oryza sativa (japonica group)] >gi|8096375|dbj|BAA95846.1| unnamed protein product
  misc_feature (1)..(242): Homolog of NCBI NO: 584928 NR Description: ENDOCHITINASE CH25 PRECURSOR
  misc_feature (1)..(241): Homolog of NCBI NO: 5689118 NR Description: basic endochitinase [Arabidopsis thaliana]
MSLVPRTLYDQIFIHKDNNACPAKGFYPYEAFVEATRSFPKFGSVGNFWTRRREVAAFLAQISHETTGGWATAPDGPYAWGLCFKEEVSPQSNYCDASNKDWPCVSGKSYKGRGPIQLSWNYNYGQAGRALGFDGLQNPELVANNSVLAFKTALWFWMTEQTPKPSCHNVMVNRYRPTKADRAANRTVGYGLVTNIINGGLECGIPGDGRVTDRVGYFQRYAQLFKVTTGPNLDCENQRPFS

SEQ ID NO: 83933 - DNA, 1826 bp, Arabidopsis thaliana
  misc_feature (1)..(1826): Ceres Seq. ID no. 12672507
  misc_feature: MA Experiment ID: 20000166 Result: Up-regulated in Transcription
  misc_feature: MA Experiment 20000166 PARAMETER Experiment Name: At_100uM_ABA_P Parameter: Age (day) Value: 14
  misc_feature: MA Experiment 20000166 PARAMETER Experiment Name: At_100uM_ABA_P Parameter: Organism Value: A. thaliana
  misc_feature: MA Experiment 20000166 PARAMETER Experiment Name: At_100uM_ABA_P Parameter: Plant Line Value: WS
  misc_feature: MA Experiment 20000166 PARAMETER Experiment Name: At_100uM_ABA_P Parameter: Timepoint (hr) Value: 1
  misc_feature: MA Experiment 20000166 PARAMETER Experiment Name: At_100uM_ABA_P Parameter: Tissue Value: Aerial
  misc_feature: MA Experiment 20000166 PARAMETER Experiment Name: At_100uM_ABA_P Parameter: Treatment Value: 100uM ABA vs. No Treatment
  misc_feature: MA Experiment ID: 20000169 Result: Up-regulated in Transcription
  misc_feature: MA Experiment 20000169 PARAMETER Experiment Name: At_100uM_ABA_P Parameter: Age (day) Value: 14
  misc_feature: MA Experiment 20000169 PARAMETER Experiment Name: At_100uM_ABA_P Parameter: Organism Value: A. thaliana
  misc_feature: MA Experiment 20000169 PARAMETER Experiment Name: At_100uM_ABA_P Parameter: Plant Line Value: WS
  misc_feature: MA Experiment 20000169 PARAMETER Experiment Name: At_100uM_ABA_P Parameter: Timepoint (hr) Value: 6
  misc_feature: MA Experiment 20000169 PARAMETER Experiment Name: At_100uM_ABA_P Parameter: Tissue Value: Aerial
  misc_feature: MA Experiment 20000169 PARAMETER Experiment Name: At_100uM_ABA_P Parameter: Treatment Value: 100uM ABA vs. No Treatment
  misc_feature: MA Experiment ID: 20000182 Result: Up-regulated in Transcription
  misc_feature: MA Experiment 20000182 PARAMETER Experiment Name: At_2mM_SA_P Parameter: Age (day) Value: 14
  misc_feature: MA Experiment 20000182 PARAMETER Experiment Name: At_2mM_SA_P Parameter: Organism Value: A. thaliana
  misc_feature: MA Experiment 20000182 PARAMETER Experiment Name: At_2mM_SA_P Parameter: Plant Line Value: WS
  misc_feature: MA Experiment 20000182 PARAMETER Experiment Name: At_2mM_SA_P Parameter: Timepoint (hr) Value: 6
  misc_feature: MA Experiment 20000182 PARAMETER Experiment Name: At_2mM_SA_P Parameter: Tissue Value: Aerial
  misc_feature: MA Experiment 20000182 PARAMETER Experiment Name: At_2mM_SA_P Parameter: Treatment Value: 2mM SA vs. No Treatment
  misc_feature: MA Experiment ID: 20000185 Result: Down-regulated in Transcription
  misc_feature: MA Experiment 20000185 PARAMETER Experiment Name: At_Roots__P Parameter: Age (day) Value: 7 vs. 21
  misc_feature: MA Experiment 20000185 PARAMETER Experiment Name: At_Roots__P Parameter: Organism Value: A. thaliana
  misc_feature: MA Experiment 20000185 PARAMETER Experiment Name: At_Roots__P Parameter: Tissue Value: Roots vs. Whole Plant
  misc_feature: MA Experiment ID: 20000234 Result: Down-regulated in Transcription
  misc_feature: MA Experiment 20000234 PARAMETER Experiment Name: At_Siliques_P Parameter: Age (day) Value: 21
  misc_feature: MA Experiment 20000234 PARAMETER Experiment Name: At_Siliques_P Parameter: Organism Value: A. thaliana
  misc_feature: MA Experiment 20000234 PARAMETER Experiment Name: At_Siliques_P Parameter: Plant Line Value: WS
  misc_feature: MA Experiment 20000234 PARAMETER Experiment Name: At_Siliques_P Parameter: Tissue Value: Less Than 5mm Siliques vs. Whole Plant
  misc_feature: MA Experiment ID: 20000235 Result: Down-regulated in Transcription
  misc_feature: MA Experiment 20000235 PARAMETER Experiment Name: At_Siliques_P Parameter: Age (day) Value: 21
  misc_feature: MA Experiment 20000235 PARAMETER Experiment Name: At_Siliques_P Parameter: Organism Value: A. thaliana
  misc_feature: MA Experiment 20000235 PARAMETER Experiment Name: At_Siliques_P Parameter: Plant Line Value: WS
  misc_feature: MA Experiment 20000235 PARAMETER Experiment Name: At_Siliques_P Parameter: Tissue Value: 5-10mm Siliques vs. Whole Plant
  misc_feature: MA Experiment ID: 20000265 Result: Down-regulated in Transcription
  misc_feature: MA Experiment 20000265 PARAMETER Experiment Name: At_Open_Flower_P Parameter: Age (day) Value: 21
  misc_feature: MA Experiment 20000265 PARAMETER Experiment Name: At_Open_Flower_P Parameter: Plant Line Value: WS
  misc_feature: MA Experiment 20000265 PARAMETER Experiment Name: At_Open_Flower_P Parameter: Tissue Value: Closed Flower vs. Whole Plant
  misc_feature: MA Experiment ID: 20000267 Result: Up-regulated in Transcription
  misc_feature: MA Experiment 20000267 PARAMETER Experiment Name: At_Drought_P Parameter: Age (day) Value: 7
  misc_feature: MA Experiment 20000267 PARAMETER Experiment Name: At_Drought_P Parameter: Organism Value: A. thaliana
  misc_feature: MA Experiment 20000267 PARAMETER Experiment Name: At_Drought_P Parameter: Plant Line Value: WS
  misc_feature: MA Experiment 20000267 PARAMETER Experiment Name: At_Drought_P Parameter: Timepoint (hr) Value: 6
  misc_feature: MA Experiment 20000267 PARAMETER Experiment Name: At_Drought_P Parameter: Tissue Value: Whole Plant
  misc_feature: MA Experiment 20000267 PARAMETER Experiment Name: At_Drought_P Parameter: Treatment Value: Drought vs. No Drought
  misc_feature: MA Experiment ID: 20000286 Result: Down-regulated in Transcription
  misc_feature: MA Experiment 20000286 PARAMETER Experiment Name: At_Open_Flower_P Parameter: Age (day) Value: 21
  misc_feature: MA Experiment 20000286 PARAMETER Experiment Name: At_Open_Flower_P Parameter: Plant Line Value: WS
  misc_feature: MA Experiment 20000286 PARAMETER Experiment Name: At_Open_Flower_P Parameter: Tissue Value: Half Open vs. Whole Plant
  misc_feature: MA Experiment ID: 20000436 Result: Up-regulated in Transcription
  misc_feature: MA Experiment 20000436 PARAMETER Experiment Name: At_Drought_P Parameter: Age (day) Value: 7
  misc_feature: MA Experiment 20000436 PARAMETER Experiment Name: At_Drought_P Parameter: Organism Value: A. thaliana
  misc_feature: MA Experiment 20000436 PARAMETER Experiment Name: At_Drought_P Parameter: Plant Line Value: WS
  misc_feature: MA Experiment 20000436 PARAMETER Experiment Name: At_Drought_P Parameter: Timepoint (hr) Value: 12
  misc_feature: MA Experiment 20000436 PARAMETER Experiment Name: At_Drought_P Parameter: Tissue Value: Whole Plant
  misc_feature: MA Experiment 20000436 PARAMETER Experiment Name: At_Drought_P Parameter: Treatment Value: Drought vs. No Drought
  misc_feature: MA Experiment ID: 20000437 Result: Up-regulated in Transcription
  misc_feature: MA Experiment 20000437 PARAMETER Experiment Name: At_Drought_P Parameter: Age (day) Value: 8
  misc_feature: MA Experiment 20000437 PARAMETER Experiment Name: At_Drought_P Parameter: Organism Value: A. thaliana
  misc_feature: MA Experiment 20000437 PARAMETER Experiment Name: At_Drought_P Parameter: Plant Line Value: WS
  misc_feature: MA Experiment 20000437 PARAMETER Experiment Name: At_Drought_P Parameter: Timepoint (hr) Value: 24
  misc_feature: MA Experiment 20000437 PARAMETER Experiment Name: At_Drought_P Parameter: Tissue Value: Whole Plant
  misc_feature: MA Experiment 20000437 PARAMETER Experiment Name: At_Drought_P Parameter: Treatment Value: Drought vs. No Drought
  misc_feature: MA Experiment ID: 20000439 Result: Down-regulated in Transcription
  misc_feature: MA Experiment 20000439 PARAMETER Experiment Name: At_Roots__P Parameter: Age (day) Value: 14 vs. 21
  misc_feature: MA Experiment 20000439 PARAMETER Experiment Name: At_Roots__P Parameter: Organism Value: A. thaliana
  misc_feature: MA Experiment 20000439 PARAMETER Experiment Name: At_Roots__P Parameter: Tissue Value: Roots vs. Whole Plant
  misc_feature: MA Experiment ID: 20000451 Result: Up-regulated in Transcription
  misc_feature: MA Experiment 20000451 PARAMETER Experiment Name: At_CS6879_Shoots-Roots_P Parameter: Age (day) Value: 14
  misc_feature: MA Experiment 20000451 PARAMETER Experiment Name: At_CS6879_Shoots-Roots_P Parameter: Organism Value: A. thaliana
  misc_feature: MA Experiment 20000451 PARAMETER Experiment Name: At_CS6879_Shoots-Roots_P Parameter: Plant Line Value: CS6879 vs. WS
  misc_feature: MA Experiment 20000451 PARAMETER Experiment Name: At_CS6879_Shoots-Roots_P Parameter: Tissue Value: Roots
  misc_feature: MA Experiment ID: 20000453 Result: Up-regulated in Transcription
  misc_feature: MA Experiment 20000453 PARAMETER Experiment Name: At_100uM_ABA_P Parameter: Age (day) Value: 15
  misc_feature: MA Experiment 20000453 PARAMETER Experiment Name: At_100uM_ABA_P Parameter: Organism Value: A. thaliana
  misc_feature: MA Experiment 20000453 PARAMETER Experiment Name: At_100uM_ABA_P Parameter: Plant Line Value: WS
  misc_feature: MA Experiment 20000453 PARAMETER Experiment Name: At_100uM_ABA_P Parameter: Timepoint (hr) Value: 24
  misc_feature: MA Experiment 20000453 PARAMETER Experiment Name: At_100uM_ABA_P Parameter: Tissue Value: Aerial
  misc_feature: MA Experiment 20000453 PARAMETER Experiment Name: At_100uM_ABA_P Parameter: Treatment Value: 100uM ABA vs. No Treatment
  misc_feature: MA Experiment ID: 20000455 Result: Up-regulated in Transcription
  misc_feature: MA Experiment 20000455 PARAMETER Experiment Name: At_100uM_ABA_P Parameter: Age (day) Value: 16
  misc_feature: MA Experiment 20000455 PARAMETER Experiment Name: At_100uM_ABA_P Parameter: Organism Value: A. thaliana
  misc_feature: MA Experiment 20000455 PARAMETER Experiment Name: At_100uM_ABA_P Parameter: Plant Line Value: WS
  misc_feature: MA Experiment 20000455 PARAMETER Experiment Name: At_100uM_ABA_P Parameter: Timepoint (hr) Value: 48
  misc_feature: MA Experiment 20000455 PARAMETER Experiment Name: At_100uM_ABA_P Parameter: Tissue Value: Aerial
  misc_feature: MA Experiment 20000455 PARAMETER Experiment Name: At_100uM_ABA_P Parameter: Treatment Value: 100uM ABA vs. No Treatment
  misc_feature: MA Experiment ID: 20000460 Result: Up-regulated in Transcription
  misc_feature: MA Experiment 20000460 PARAMETER Experiment Name: At_10percent_PEG_P Parameter: Age (day) Value: 12
  misc_feature: MA Experiment 20000460 PARAMETER Experiment Name: At_10percent_PEG_P Parameter: Organism Value: A. thaliana
  misc_feature: MA Experiment 20000460 PARAMETER Experiment Name: At_10percent_PEG_P Parameter: Plant Line Value: WS
  misc_feature: MA Experiment 20000460 PARAMETER Experiment Name: At_10percent_PEG_P Parameter: Timepoint (day) Value: 12
  misc_feature: MA Experiment 20000460 PARAMETER Experiment Name: At_10percent_PEG_P Parameter: Tissue Value: Whole Plant
  misc_feature: MA Experiment 20000460 PARAMETER Experiment Name: At_10percent_PEG_P Parameter: Treatment Value: 10percent PEG vs. No Treatment
  misc_feature: MA Experiment ID: 20000495 Result: Down-regulated in Transcription
  misc_feature: MA Experiment 20000495 PARAMETER Experiment Name: At_Guard_Cells_P Parameter: Harvest Date Value: 8/2/2002
  misc_feature: MA Experiment 20000495 PARAMETER Experiment Name: At_Guard_Cells_P Parameter: Organism Value: A. thaliana
  misc_feature: MA Experiment 20000495 PARAMETER Experiment Name: At_Guard_Cells_P Parameter: Tissue Value: Guard Cells vs. Leaves
  misc_feature: MA Experiment ID: 20000496 Result: Down-regulated in Transcription
  misc_feature: MA Experiment 20000496 PARAMETER Experiment Name: At_Guard_Cells_P Parameter: Harvest Date Value: 7/19/2002
  misc_feature: MA Experiment 20000496 PARAMETER Experiment Name: At_Guard_Cells_P Parameter: Organism Value: Canola
  misc_feature: MA Experiment 20000496 PARAMETER Experiment Name: At_Guard_Cells_P Parameter: Tissue Value: Guard Cells vs. Leaves
  misc_feature: MA Experiment ID: 20000573 Result: Down-regulated in Transcription
  misc_feature: MA Experiment 20000573 PARAMETER Experiment Name: At_100uM_ABA_Mutants__P Parameter: Organism Value: A. thaliana
  misc_feature: MA Experiment 20000573 PARAMETER Experiment Name: At_100uM_ABA_Mutants__P Parameter: Plant Line Value: CS22 vs. Ler wt
  misc_feature: MA Experiment 20000573 PARAMETER Experiment Name: At_100uM_ABA_Mutants__P Parameter: Timepoint (hr) Value: N/A
  misc_feature: MA Experiment 20000573 PARAMETER Experiment Name: At_100uM_ABA_Mutants__P Parameter: Tissue Value: Whole Plant
  misc_feature: MA Experiment 20000573 PARAMETER Experiment Name: At_100uM_ABA_Mutants__P Parameter: Treatment Value: None
  misc_feature: MA Experiment ID: 20000574 Result: Down-regulated in Transcription
  misc_feature: MA Experiment 20000574 PARAMETER Experiment Name: At_100uM_ABA_Mutants__P Parameter: Organism Value: A. thaliana
  misc_feature: MA Experiment 20000574 PARAMETER Experiment Name: At_100uM_ABA_Mutants__P Parameter: Plant Line Value: CS23 vs. Ler wt
  misc_feature: MA Experiment 20000574 PARAMETER Experiment Name: At_100uM_ABA_Mutants__P Parameter: Timepoint (hr) Value: N/A
  misc_feature: MA Experiment 20000574 PARAMETER Experiment Name: At_100uM_ABA_Mutants__P Parameter: Tissue Value: Whole Plant
  misc_feature: MA Experiment 20000574 PARAMETER Experiment Name: At_100uM_ABA_Mutants__P Parameter: Treatment Value: None
  misc_feature: MA Experiment ID: 20000794 Result: Up-regulated in Transcription
  misc_feature: MA Experiment 20000794 PARAMETER Experiment Name: At_Petals_P Parameter: Age (day) Value: 23-25 days
  misc_feature: MA Experiment 20000794 PARAMETER Experiment Name: At_Petals_P Parameter: Plant Line Value: WS
  misc_feature: MA Experiment 20000794 PARAMETER Experiment Name: At_Petals_P Parameter: Tissue Value: Petals vs. Whole plant
  misc_feature: MA Experiment ID: 20001248 Result: Down-regulated in Transcription
  misc_feature: MA Experiment 20001248 PARAMETER Experiment Name: At_Far-red-induction_P Parameter: Age (day) Value: 7
  misc_feature: MA Experiment 20001248 PARAMETER Experiment Name: At_Far-red-induction_P Parameter: Light Value: Far-red vs. White
  misc_feature: MA Experiment 20001248 PARAMETER Experiment Name: At_Far-red-induction_P Parameter: Organism Value: A. thaliana
  misc_feature: MA Experiment 20001248 PARAMETER Experiment Name: At_Far-red-induction_P Parameter: Plant Line Value: Columbia
  misc_feature: MA Experiment 20001248 PARAMETER Experiment Name: At_Far-red-induction_P Parameter: Timepoint (hr) Value: 4
  misc_feature: MA Experiment 20001248 PARAMETER Experiment Name: At_Far-red-induction_P Parameter: Tissue Value: Whole Plant
  misc_feature: MA Experiment ID: 20001450 Result: Down-regulated in Transcription
  misc_feature: MA Experiment 20001450 PARAMETER Experiment Name: At_Far-red-induction_P Parameter: Age (day) Value: 7
  misc_feature: MA Experiment 20001450 PARAMETER Experiment Name: At_Far-red-induction_P Parameter: Light Value: Far-red vs. White
  misc_feature: MA Experiment 20001450 PARAMETER Experiment Name: At_Far-red-induction_P Parameter: Organism Value: A. thaliana
  misc_feature: MA Experiment 20001450 PARAMETER Experiment Name: At_Far-red-induction_P Parameter: Plant Line Value: Columbia
  misc_feature: MA Experiment 20001450 PARAMETER Experiment Name: At_Far-red-induction_P Parameter: Timepoint (hr) Value: 8
  misc_feature: MA Experiment 20001450 PARAMETER Experiment Name: At_Far-red-induction_P Parameter: Tissue Value: Whole Plant
  misc_feature: MA Experiment ID: 20001554 Result: Up-regulated in Transcription
  misc_feature: MA Experiment 20001554 PARAMETER Experiment Name: At_Drought_Soil_Dry_P Parameter: Age (day) Value: 21
  misc_feature: MA Experiment 20001554 PARAMETER Experiment Name: At_Drought_Soil_Dry_P Parameter: Organism Value: A. thaliana
  misc_feature: MA Experiment 20001554 PARAMETER Experiment Name: At_Drought_Soil_Dry_P Parameter: Plant Line Value: WS
  misc_feature: MA Experiment 20001554 PARAMETER Experiment Name: At_Drought_Soil_Dry_P Parameter: Post Timepoint (hr) Value: None
  misc_feature: MA Experiment 20001554 PARAMETER Experiment Name: At_Drought_Soil_Dry_P Parameter: Post-Treatment Value: None
  misc_feature: MA Experiment 20001554 PARAMETER Experiment Name: At_Drought_Soil_Dry_P Parameter: Timepoint (day) Value: 7
  misc_feature: MA Experiment 20001554 PARAMETER Experiment Name: At_Drought_Soil_Dry_P Parameter: Treatment Value: Drought vs. No Drought
  misc_feature: MA Experiment ID: 20001555 Result: Up-regulated in Transcription
  misc_feature: MA Experiment 20001555 PARAMETER Experiment Name: At_Drought_Soil_Dry_P Parameter: Age (day) Value: 24
  misc_feature: MA Experiment 20001555 PARAMETER Experiment Name: At_Drought_Soil_Dry_P Parameter: Organism Value: A. thaliana
  misc_feature: MA Experiment 20001555 PARAMETER Experiment Name: At_Drought_Soil_Dry_P Parameter: Plant Line Value: WS
  misc_feature: MA Experiment 20001555 PARAMETER Experiment Name: At_Drought_Soil_Dry_P Parameter: Post Timepoint (hr) Value: None
  misc_feature: MA Experiment 20001555 PARAMETER Experiment Name: At_Drought_Soil_Dry_P Parameter: Post-Treatment Value: None
  misc_feature: MA Experiment 20001555 PARAMETER Experiment Name: At_Drought_Soil_Dry_P Parameter: Timepoint (day) Value: 10
  misc_feature: MA Experiment 20001555 PARAMETER Experiment Name: At_Drought_Soil_Dry_P Parameter: Treatment Value: Drought vs. No Drought
  misc_feature: MA Experiment ID: 20001556 Result: Up-regulated in Transcription
  misc_feature: MA Experiment 20001556 PARAMETER Experiment Name: At_Drought_Soil_Dry_P Parameter: Age (day) Value: 26
  misc_feature: MA Experiment 20001556 PARAMETER Experiment Name: At_Drought_Soil_Dry_P Parameter: Organism Value: A. thaliana
  misc_feature: MA Experiment 20001556 PARAMETER Experiment Name: At_Drought_Soil_Dry_P Parameter: Plant Line Value: WS
  misc_feature: MA Experiment 20001556 PARAMETER Experiment Name: At_Drought_Soil_Dry_P Parameter: Post Timepoint (hr) Value: None
  misc_feature: MA Experiment 20001556 PARAMETER Experiment Name: At_Drought_Soil_Dry_P Parameter: Post-Treatment Value: None
  misc_feature: MA Experiment 20001556 PARAMETER Experiment Name: At_Drought_Soil_Dry_P Parameter: Timepoint (day) Value: 12
  misc_feature: MA Experiment 20001556 PARAMETER Experiment Name: At_Drought_Soil_Dry_P Parameter: Treatment Value: Drought vs. No Drought
  misc_feature: MA Experiment ID: 20001558 Result: Up-regulated in Transcription
  misc_feature: MA Experiment 20001558 PARAMETER Experiment Name: At_Drought_Soil_Dry_P Parameter: Age (day) Value: 27
  misc_feature: MA Experiment 20001558 PARAMETER Experiment Name: At_Drought_Soil_Dry_P Parameter: Organism Value: A. thaliana
  misc_feature: MA Experiment 20001558 PARAMETER Experiment Name: At_Drought_Soil_Dry_P Parameter: Plant Line Value: WS
  misc_feature: MA Experiment 20001558 PARAMETER Experiment Name: At_Drought_Soil_Dry_P Parameter: Post Timepoint (hr) Value: 6
  misc_feature: MA Experiment 20001558 PARAMETER Experiment Name: At_Drought_Soil_Dry_P Parameter: Post-Treatment Value: Re-Water vs. No Drought
  misc_feature: MA Experiment 20001558 PARAMETER Experiment Name: At_Drought_Soil_Dry_P Parameter: Timepoint (day) Value: 13
  misc_feature: MA Experiment 20001558 PARAMETER Experiment Name: At_Drought_Soil_Dry_P Parameter: Treatment Value: Drought vs. No Drought
  misc_feature: MA Experiment ID: 20001904 Result: Up-regulated in Transcription
  misc_feature: MA Experiment 20001904 PARAMETER Experiment Name: At_Drought_Reproduction_P Parameter: Age (day) Value: 37
  misc_feature: MA Experiment 20001904 PARAMETER Experiment Name: At_Drought_Reproduction_P Parameter: Organism Value: A. thaliana
  misc_feature: MA Experiment 20001904 PARAMETER Experiment Name: At_Drought_Reproduction_P Parameter: Plant Line Value: WS
  misc_feature: MA Experiment 20001904 PARAMETER Experiment Name: At_Drought_Reproduction_P Parameter: Timepoint (day) Value: 7
  misc_feature: MA Experiment 20001904 PARAMETER Experiment Name: At_Drought_Reproduction_P Parameter: Tissue Value: Rosettes
  misc_feature: MA Experiment 20001904 PARAMETER Experiment Name: At_Drought_Reproduction_P Parameter: Treatment Value: Drought vs. No Drought
  misc_feature: MA Experiment ID: 20001905 Result: Up-regulated in Transcription
  misc_feature: MA Experiment 20001905 PARAMETER Experiment Name: At_Drought_Reproduction_P Parameter: Age (day) Value: 40
  misc_feature: MA Experiment 20001905 PARAMETER Experiment Name: At_Drought_Reproduction_P Parameter: Organism Value: A. thaliana
  misc_feature: MA Experiment 20001905 PARAMETER Experiment Name: At_Drought_Reproduction_P Parameter: Plant Line Value: WS
  misc_feature: MA Experiment 20001905 PARAMETER Experiment Name: At_Drought_Reproduction_P Parameter: Timepoint (day) Value: 10
  misc_feature: MA Experiment 20001905 PARAMETER Experiment Name: At_Drought_Reproduction_P Parameter: Tissue Value: Rosettes
  misc_feature: MA Experiment 20001905 PARAMETER Experiment Name: At_Drought_Reproduction_P Parameter: Treatment Value: Drought vs. No Drought
gtctgaaaccaaacaaagaaaatacacgaaggaaggaaaagaaaagtaaaaagaaaagctttctgcaaaatccaaacatgtccgccaagatttcaatattccaagctcttgtctttctattctaccggtttatcctccggcgatatcggaactctaaaccaaaataccaaaatggcccttcttctctcctccaatccgacctatcacgccacacattgatcttcaacgtagaaggagctcttctcaaatccgactctctcttcccttacttcatgttagtagcatttgaggcgggaggcgtaataaggtcatttctcctcttcattctctatccattgataagcttgatgagccatgagatgggtgtcaaagtgatggtaatggtgagcttcttcgggatcaaaaaagaaggttttcgagcggggagagcggttttgcctaaatactttctagaagatgtcggactcgagatgttcgaagtgttgaagagaggagggaagaaaatcggagtgagtgatgatcttcctcaagttatgatcgaagggttcttgagagattacttggagattgacgttgtggtcgggagagaaatgaaagtcgttggaggttattatctaggtatcatggaggataaaaccaaacatgatcttgtctttgatgagttagttcgtaaagagagactaaacaccggtcgtgttattggcatcacttccttcaatacatctcttcaccgatatctattctctcagttttgccaggaaatttatttcgtgaagaaatcagacaagcgaagctggcaaaccctaccacgaagccagtaccctaaaccattgattttccatgatggccgtctcgcgatcaaaccaaccctaatgaacactttggtcttgttcatgtggggtcctttcgcagccgcagccgcagcagccagactcttcgtctctctttgcatcccttactctttatcaatcccgatcctcgccttttccggttgcagactaaccgtcactaacgactacgtttcatctcaaaaacaaaaaccaagtcaacgcaaaggttgtctctttgtttgtaaccataggactttattggaccctctctatgttgcattcgctttgagaaagaaaaacatcaaaactgtaacgtatagtttgagtagggtatctgagattttggctccgatcaagacggtgagactgacccgtgatcgggtgagcgacggtcaagccatggagaaattgttaaccgaaggagatctcgttgtttgtcctgaaggaaccacttgtagagaaccttacctgcttaggtttagccctttgttcaccgaggttagtgatgtcatcgttcccgtggctgtgacggtacacgtgaccttcttctacggtacaacggcgagtggtcttaaggcacttgacccgcttttcttcctcttggatccttatcctacctacaccatccaatttctcgaccctgtctccggtgccacgtgccaagatcctgatggaaagttgaagtttgaggtggccaacaatgttcagagtgatattgggaaggcgttggatttcgagtgcacaagtctcactagaaaagacaagtatttgatcttggccggtaataatggagtagttaagaaaaattaaaatttgttttaggatgatgagtgagtgatgagttcggttctttgggtatgtaagtaaccaatcgattatttcatttgtttattaataatgtctacgtaaatgtaactacaatctttttttcttggtaatgtacacatatgttctatatcatatccaaaatctttgtcagacaattttgcctttcat

SEQ ID NO: 83934 - protein, 545 aa, Arabidopsis thaliana
  peptide (1)..(545): Ceres Seq. ID no. 12672508
  misc_feature (332)..(453): Pfam Name: Acyltransferase Pfam Description: Acyltransferase
  misc_feature (26)..(545): Homolog of NCBI NO: 15235185 NR Description: unknown protein; protein id: At4g01950.1, by cDNA: gi_20453057 [Arabidopsis thaliana]
  misc_feature (29)..(544): Homolog of NCBI NO: 18378959 NR Description: expressed protein; protein id: At1g02390.1, by cDNA: gi_16930412, supported by cDNA: gi_20453232 [Arabidopsis
  misc_feature (53)..(545): Homolog of NCBI NO: 34905450 NR Description: P0487H02.19 [Oryza sativa (japonica
  misc_feature (71)..(544): Homolog of NCBI NO: 34894812 NR Description: P0554D10.9 [Oryza sativa (japonica
  misc_feature (63)..(543): Homolog of NCBI NO: 18390661 NR Description: expressed protein; protein id: At1g06520.1, by cDNA: 94974. [Arabidopsis thaliana] >gi|25372666|pir||G86200
  misc_feature (63)..(543): Homolog of NCBI NO: 21618047 NR Description: unknown [Arabidopsis thaliana]
  misc_feature (66)..(545): Homolog of NCBI NO: 38000002 NR Description: unknown protein [Oryza sativa (japonica
  misc_feature (76)..(541): Homolog of NCBI NO: 18481713 NR Description: hypothetical protein [Sorghum bicolor]
  misc_feature (65)..(542): Homolog of NCBI NO: 15239924 NR Description: putative protein; protein id: At5g06090.1 thaliana] >gi|8978345|dbj|BAA98198.1|
  misc_feature (75)..(543): Homolog of NCBI NO: 17064780 NR Description: Unknown protein [Arabidopsis thaliana]
LKPNKENTRRKEKKSKKKSFLQNPNMSAKISIFQALVFLFYRFILRRYRNSKPKYQNGPSSLLQSDLSRHTLIFNVEGALLKSDSLFPYFMLVAFEAGGVIRSFLLFILYPLISLMSHEMGVKVMVMVSFFGIKKEGFRAGRAVLPKYFLEDVGLEMFEVLKRGGKKIGVSDDLPQVMIEGFLRDYLEIDVVVGREMKVVGGYYLGIMEDKTKHDLVFDELVRKERLNTGRVIGITSFNTSLHRYLFSQFCQEIYFVKKSDKRSWQTLPRSQYPKPLIFHDGRLAIKPTLMNTLVLFMWGPFAAAAAAARLFVSLCIPYSLSIPILAFSGCRLTVTNDYVSSQKQKPSQRKGCLFVCNHRTLLDPLYVAFALRKKNIKTVTYSLSRVSEILAPIKTVRLTRDRVSDGQAMEKLLTEGDLVVCPEGTTCREPYLLRFSPLFTEVSDVIVPVAVTVHVTFFYGTTASGLKALDPLFFLLDPYPTYTIQFLDPVSGATCQDPDGKLKFEVANNVQSDIGKALDFECTSLTRKDKYLILAGNNGVVKKN

SEQ ID NO: 83935 - protein, 520 aa, Arabidopsis thaliana
  peptide (1)..(520): Ceres Seq. ID no. 12672509
  misc_feature (307)..(428): Pfam Name: Acyltransferase Pfam Description: Acyltransferase
  misc_feature (1)..(520): Homolog of NCBI NO: 15235185 NR Description: unknown protein; protein id: At4g01950.1, by cDNA: gi_20453057 [Arabidopsis thaliana]
  misc_feature (4)..(519): Homolog of NCBI NO: 18378959 NR Description: expressed protein; protein id: At1g02390.1, by cDNA: gi_16930412, supported by cDNA: gi_20453232 [Arabidopsis
  misc_feature (28)..(520): Homolog of NCBI NO: 34905450 NR Description: P0487H02.19 [Oryza sativa (japonica
  misc_feature (46)..(519): Homolog of NCBI NO: 34894812 NR Description: P0554D10.9 [Oryza sativa (japonica
  misc_feature (38)..(518): Homolog of NCBI NO: 18390661 NR Description: expressed protein; protein id: At1g06520.1, by cDNA: 94974. [Arabidopsis thaliana] >gi|25372666|pir||G86200
  misc_feature (38)..(518): Homolog of NCBI NO: 21618047 NR Description: unknown [Arabidopsis thaliana]
  misc_feature (41)..(520): Homolog of NCBI NO: 38000002 NR Description: unknown protein [Oryza sativa (japonica
  misc_feature (51)..(516): Homolog of NCBI NO: 18481713 NR Description: hypothetical protein [Sorghum bicolor]
  misc_feature (40)..(517): Homolog of NCBI NO: 15239924 NR Description: putative protein; protein id: At5g06090.1 thaliana] >gi|8978345|dbj|BAA98198.1|
  misc_feature (50)..(518): Homolog of NCBI NO: 17064780 NR Description: Unknown protein [Arabidopsis thaliana]
MSAKISIFQALVFLFYRFILRRYRNSKPKYQNGPSSLLQSDLSRHTLIFNVEGALLKSDSLFPYFMLVAFEAGGVIRSFLLFILYPLISLMSHEMGVKVMVMVSFFGIKKEGFRAGRAVLPKYFLEDVGLEMFEVLKRGGKKIGVSDDLPQVMIEGFLRDYLEIDVVVGREMKVVGGYYLGIMEDKTKHDLVFDELVRKERLNTGRVIGITSFNTSLHRYLFSQFCQEIYFVKKSDKRSWQTLPRSQYPKPLIFHDGRLAIKPTLMNTLVLFMWGPFAAAAAAARLFVSLCIPYSLSIPILAFSGCRLTVTNDYVSSQKQKPSQRKGCLFVCNHRTLLDPLYVAFALRKKNIKTVTYSLSRVSEILAPIKTVRLTRDRVSDGQAMEKLLTEGDLVVCPEGTTCREPYLLRFSPLFTEVSDVIVPVAVTVHVTFFYGTTASGLKALDPLFFLLDPYPTYTIQFLDPVSGATCQDPDGKLKFEVANNVQSDIGKALDFECTSLTRKDKYLILAGNNGVVKKN

SEQ ID NO: 83936 - protein, 455 aa, Arabidopsis thaliana
  peptide (1)..(455): Ceres Seq. ID no. 12672510
  misc_feature (242)..(363): Pfam Name: Acyltransferase Pfam Description: Acyltransferase
  misc_feature (1)..(455): Homolog of NCBI NO: 15235185 NR Description: unknown protein; protein id: At4g01950.1, by cDNA: gi_20453057 [Arabidopsis thaliana]
  misc_feature (1)..(454): Homolog of NCBI NO: 18378959 NR Description: expressed protein; protein id: At1g02390.1, by cDNA: gi_16930412, supported by cDNA: gi_20453232 [Arabidopsis
  misc_feature (1)..(455): Homolog of NCBI NO: 34905450 NR Description: P0487H02.19 [Oryza sativa (japonica
  misc_feature (1)..(454): Homolog of NCBI NO: 34894812 NR Description: P0554D10.9 [Oryza sativa (japonica
  misc_feature (1)..(453): Homolog of NCBI NO: 18390661 NR Description: expressed protein; protein id: At1g06520.1, by cDNA: 94974. [Arabidopsis thaliana] >gi|25372666|pir||G86200
  misc_feature (1)..(453): Homolog of NCBI NO: 21618047 NR Description: unknown [Arabidopsis thaliana]
  misc_feature (1)..(455): Homolog of NCBI NO: 38000002 NR Description: unknown protein [Oryza sativa (japonica
  misc_feature (1)..(451): Homolog of NCBI NO: 18481713 NR Description: hypothetical protein [Sorghum bicolor]
  misc_feature (1)..(452): Homolog of NCBI NO: 15239924 NR Description: putative protein; protein id: At5g06090.1 thaliana] >gi|8978345|dbj|BAA98198.1|
  misc_feature (1)..(453): Homolog of NCBI NO: 17064780 NR Description: Unknown protein [Arabidopsis thaliana]
MLVAFEAGGVIRSFLLFILYPLISLMSHEMGVKVMVMVSFFGIKKEGFRAGRAVLPKYFLEDVGLEMFEVLKRGGKKIGVSDDLPQVMIEGFLRDYLEIDVVVGREMKVVGGYYLGIMEDKTKHDLVFDELVRKERLNTGRVIGITSFNTSLHRYLFSQFCQEIYFVKKSDKRSWQTLPRSQYPKPLIFHDGRLAIKPTLMNTLVLFMWGPFAAAAAAARLFVSLCIPYSLSIPILAFSGCRLTVTNDYVSSQKQKPSQRKGCLFVCNHRTLLDPLYVAFALRKKNIKTVTYSLSRVSEILAPIKTVRLTRDRVSDGQAMEKLLTEGDLVVCPEGTTCREPYLLRFSPLFTEVSDVIVPVAVTVHVTFFYGTTASGLKALDPLFFLLDPYPTYTIQFLDPVSGATCQDPDGKLKFEVANNVQSDIGKALDFECTSLTRKDKYLILAGNNGVVKKN

SEQ ID NO: 83937 - DNA, 2124 bp, Arabidopsis thaliana
  misc_feature (1)..(2124): Ceres Seq. ID no. 12672515
  misc_feature: MA Experiment ID: 20000185 Result: Up-regulated in Transcription
  misc_feature: MA Experiment 20000185 PARAMETER Experiment Name: At_Roots__P Parameter: Age (day) Value: 7 vs. 21
  misc_feature: MA Experiment 20000185 PARAMETER Experiment Name: At_Roots__P Parameter: Organism Value: A. thaliana
  misc_feature: MA Experiment 20000185 PARAMETER Experiment Name: At_Roots__P Parameter: Tissue Value: Roots vs. Whole Plant
  misc_feature: MA Experiment ID: 20001451 Result: Down-regulated in Transcription
  misc_feature: MA Experiment 20001451 PARAMETER Experiment Name: At_Far-red-induction_P Parameter: Age (day) Value: 7
  misc_feature: MA Experiment 20001451 PARAMETER Experiment Name: At_Far-red-induction_P Parameter: Light Value: Far-red vs. White
  misc_feature: MA Experiment 20001451 PARAMETER Experiment Name: At_Far-red-induction_P Parameter: Organism Value: A. thaliana
  misc_feature: MA Experiment 20001451 PARAMETER Experiment Name: At_Far-red-induction_P Parameter: Plant Line Value: Columbia
  misc_feature: MA Experiment 20001451 PARAMETER Experiment Name: At_Far-red-induction_P Parameter: Timepoint (hr) Value: 24
  misc_feature: MA Experiment 20001451 PARAMETER Experiment Name: At_Far-red-induction_P Parameter: Tissue Value: Whole Plant
atggcgttgaaggcggtggttattgtatattgtgtggtttctctcgtcagtgttcaattagctgatgctcaacatgaaggactgccagtttcaccaacgttatcaccttcaacttcaccagttatcactgatctgcccctaccagctgaatttccgcggtttcacagaaagtatttcgcaccacaacaagcagaagcacctcagcattctcccccttatagtcgtttggtcgcttctgatcatccccctaccagctcacatttctccaaaccttccatgaaaaggaatgctcagtctcctggagccggcttggctgatattgctccagcacaatctagcaatggtgttcttcctgatgccttaactcagccacctttgtcgccctccatttcaaattgttgcaaatcagatatggtgcttaaacgaagaagtattggttgccactgcgtgtatcctataaaactggacatccttctcttgaatgtttcagaaactcctagttggaacatgttcttgaacgaatttgctacccagcttggtctcctacctcaccaaatcgagctgattaacttctatgtgctaagcttatcaaggatgaacatatcgatggatatcacccctcattctggaattagtttctcagctagtcaggcatccgcaataaactcttcccttatcagccacaagattcaatttagccctactttggtgggagattacaaacttctaaaccttacttggtttgaggcccctgcaccttcgcaagcacctctagtggcttcttcacctcataaagcaccatcacaaggatcctcagcaactacgtcagtaagatctccagggaaaaagaggcatcccaatcttattcttatcttttctatagccgctggtgtgcttatacttgccataatcactgtacttgttatttgttcccgcgcactccgagaagagaaagctccagatcctcacaaagaagctgtaaaaccaaggaacctggacgctggttcatttgggggatctcttcctcacccagcaagtacacggtttctgtcatatgaagaactcaaagaggcaactagcaattttgaatctgctagcattctaggagaaggtgggtttggcaaggtttacagaggcatcttagccgatggtactgctgtagcgattaagaagctcacaagtggtgggccacaaggtgataaagaattccaggtggagattgatatgcttagccgtcttcatcatcgtaatcttgtgaaacttgtgggttactatagtagtcgagattcttctcagcacctactttgttatgagcttgttccaaatggcagcctcgaggcttggctccatgggcctctcgggttgaactgtcctcttgattgggacaccagaatgaagattgcacttgatgctgcaagaggacttgcataccttcatgaagactcgcaaccctccgttatacacagagattttaaagcctctaatatactccttgaaaacaacttcaacgccaaagttgcagattttggcctagccaaacaagctcctgaaggcaggggtaatcacttatctactcgtgttatgggcacatttggatatgttgcgcctgaatatgcaatgacgggacacctactcgtcaagagtgatgtttatagttacggtgtggtccttctcgaattgttaactggtagaaaacctgtggatatgtcacaaccttcaggccaagaaaatctcgtcacttggacaaggccagttttaagagacaaagaccggttagaagaactagtcgattcaagacttgaaggaaaatacccgaaagaagatttcataagagtatgcacaatcgctgcagcttgtgttgcacctgaagctagccagagaccaacgatgggcgaagtggttcagtcacttaaaatggttcaacgggtggttgagtatcaagacccggttttaaacacttcaaataaagctcgtcctaaccggagacaatcatcagctacgttcgagtcagaagtaacctcttctatgttctcttctggtccttattctggtctaagcgcttttgatcatgaaaatattacacgaacaactgttttctcagaagatcttcacgaaggccgatga

SEQ ID NO: 83938 - protein, 707 aa, Arabidopsis thaliana; identical to SEQ ID NO: 48791
  peptide (1)..(707): Ceres Seq. ID no. 12672516
  misc_feature (3)..(707): Homolog of NCBI NO: 34902828 NR Description: unnamed protein product [Oryza sativa (japonica group)] >gi|6498464|dbj|BAA87853.1| unnamed protein product
  misc_feature (126)..(640): Homolog of NCBI NO: 30680947 NR Description: protein kinase family [Arabidopsis thaliana] putative protein kinase [Arabidopsis thaliana]
  misc_feature (336)..(706): Homolog of NCBI NO: 20453162 NR Description: At5g56885 [Arabidopsis thaliana]
  misc_feature (336)..(706): Homolog of NCBI NO: 22327898 NR Description: Expressed protein; protein id: At5g56890.1,
  misc_feature (346)..(640): Homolog of NCBI NO: 25287641 NR Description: probable protein kinase [imported] - Arabidopsis >gi|4512705|gb|AAD21758.1| putative protein kinase [Arabidopsis
  misc_feature (334)..(681): Homolog of NCBI NO: 34903544 NR Description: putative protein kinase APK1AArabidopsis thaliana
  misc_feature (288)..(640): Homolog of NCBI NO: 34910468 NR Description: putative protein kinase [Oryza sativa (japonica group)] >gi|13366186|dbj|BAB39409.1| putative protein kinase
  misc_feature (348)..(637): Homolog of NCBI NO: 34894174 NR Description: putative protein kinase [Oryza sativa (japonica group)] >gi|13486635|dbj|BAB39873.1| putative protein kinase
  misc_feature (334)..(665): Homolog of NCBI NO: 15240947 NR Description: putative protein; protein id: At5g38560.1, by cDNA: gi_15983496, supported by cDNA: gi_18700152 [Arabidopsis >gi|10176824|dbj|BAB10146.1| contains similarity to protein
  misc_feature (348)..(637): Homolog of NCBI NO: 11358842 NR Description: serine/threonine-specific protein kinase-like

SEQ ID NO: 83939 - protein, 615 aa, Arabidopsis thaliana; identical to SEQ ID NO: 48792
  peptide (1)..(615): Ceres Seq. ID no. 12672517
  misc_feature (1)..(615): Homolog of NCBI NO: 34902828 NR Description: unnamed protein product [Oryza sativa (japonica group)] >gi|6498464|dbj|BAA87853.1| unnamed protein product
  misc_feature (34)..(548): Homolog of NCBI NO: 30680947 NR Description: protein kinase family [Arabidopsis thaliana] putative protein kinase [Arabidopsis thaliana]
  misc_feature (244)..(614): Homolog of NCBI NO: 20453162 NR Description: At5g56885 [Arabidopsis thaliana]
  misc_feature (244)..(614): Homolog of NCBI NO: 22327898 NR Description: Expressed protein; protein id: At5g56890.1,
  misc_feature (254)..(548): Homolog of NCBI NO: 25287641 NR Description: probable protein kinase [imported] - Arabidopsis >gi|4512705|gb|AAD21758.1| putative protein kinase [Arabidopsis
  misc_feature (242)..(589): Homolog of NCBI NO: 34903544 NR Description: putative protein kinase APK1AArabidopsis thaliana
  misc_feature (196)..(548): Homolog of NCBI NO: 34910468 NR Description: putative protein kinase [Oryza sativa (japonica group)] >gi|13366186|dbj|BAB39409.1| putative protein kinase
  misc_feature (256)..(545): Homolog of NCBI NO: 34894174 NR Description: putative protein kinase [Oryza sativa (japonica group)] >gi|13486635|dbj|BAB39873.1| putative protein kinase
  misc_feature (242)..(573): Homolog of NCBI NO: 15240947 NR Description: putative protein; protein id: At5g38560.1, by cDNA: gi_15983496, supported by cDNA: gi_18700152 [Arabidopsis >gi|10176824|dbj|BAB10146.1| contains similarity to protein
  misc_feature (256)..(545): Homolog of NCBI NO: 11358842 NR Description: serine/threonine-specific protein kinase-like

SEQ ID NO: 83940 - protein, 570 aa, Arabidopsis thaliana
  peptide (1)..(570): Ceres Seq. ID no. 12672518
  misc_feature (1)..(570): Homolog of NCBI NO: 34902828 NR Description: unnamed protein product [Oryza sativa (japonica group)] >gi|6498464|dbj|BAA87853.1| unnamed protein product
  misc_feature (1)..(503): Homolog of NCBI NO: 30680947 NR Description: protein kinase family [Arabidopsis thaliana] putative protein kinase [Arabidopsis thaliana]
  misc_feature (199)..(569): Homolog of NCBI NO: 20453162 NR Description: At5g56885 [Arabidopsis thaliana]
  misc_feature (199)..(569): Homolog of NCBI NO: 22327898 NR Description: Expressed protein; protein id: At5g56890.1,
  misc_feature (209)..(503): Homolog of NCBI NO: 25287641 NR Description: probable protein kinase [imported] - Arabidopsis >gi|4512705|gb|AAD21758.1| putative protein kinase [Arabidopsis
  misc_feature (197)..(544): Homolog of NCBI NO: 34903544 NR Description: putative protein kinase APK1AArabidopsis thaliana
  misc_feature (151)..(503): Homolog of NCBI NO: 34910468 NR Description: putative protein kinase [Oryza sativa (japonica group)] >gi|13366186|dbj|BAB39409.1| putative protein kinase
  misc_feature (211)..(500): Homolog of NCBI NO: 34894174 NR Description: putative protein kinase [Oryza sativa (japonica group)] >gi|13486635|dbj|BAB39873.1| putative protein kinase
  misc_feature (197)..(528): Homolog of NCBI NO: 15240947 NR Description: putative protein; protein id: At5g38560.1, by cDNA: gi_15983496, supported by cDNA: gi_18700152 [Arabidopsis >gi|10176824|dbj|BAB10146.1| contains similarity to protein
  misc_feature (211)..(500): Homolog of NCBI NO: 11358842 NR Description: serine/threonine-specific protein kinase-like
MVLKRRSIGCHCVYPIKLDILLLNVSETPSWNMFLNEFATQLGLLPHQIELINFYVLSLSRMNISMDITPHSGISFSASQASAINSSLISHKIQFSPTLVGDYKLLNLTWFEAPAPSQAPLVASSPHKAPSQGSSATTSVRSPGKKRHPNLILIFSIAAGVLILAIITVLVICSRALREEKAPDPHKEAVKPRNLDAGSFGGSLPHPASTRFLSYEELKEATSNFESASILGEGGFGKVYRGILADGTAVAIKKLTSGGPQGDKEFQVEIDMLSRLHHRNLVKLVGYYSSRDSSQHLLCYELVPNGSLEAWLHGPLGLNCPLDWDTRMKIALDAARGLAYLHEDSQPSVIHRDFKASNILLENNFNAKVADFGLAKQAPEGRGNHLSTRVMGTFGYVAPEYAMTGHLLVKSDVYSYGVVLLELLTGRKPVDMSQPSGQENLVTWTRPVLRDKDRLEELVDSRLEGKYPKEDFIRVCTIAAACVAPEASQRPTMGEVVQSLKMVQRVVEYQDPVLNTSNKARPNRRQSSATFESEVTSSMFSSGPYSGLSAFDHENITRTTVFSEDLHEGR

SEQ ID NO: 83941 - DNA, 1246 bp, Arabidopsis thaliana
  misc_feature (1)..(1246): Ceres Seq. ID no. 12672574
  misc_feature: MA Experiment ID: 20000264 Result: Up-regulated in Transcription
  misc_feature: MA Experiment 20000264 PARAMETER Experiment Name: At_Open_Flower_P Parameter: Age (day) Value: 21
  misc_feature: MA Experiment 20000264 PARAMETER Experiment Name: At_Open_Flower_P Parameter: Plant Line Value: WS
  misc_feature: MA Experiment 20000264 PARAMETER Experiment Name: At_Open_Flower_P Parameter: Tissue Value: Open Flower vs. Whole Plant
  misc_feature: MA Experiment ID: 20000265 Result: Up-regulated in Transcription
  misc_feature: MA Experiment 20000265 PARAMETER Experiment Name: At_Open_Flower_P Parameter: Age (day) Value: 21
  misc_feature: MA Experiment 20000265 PARAMETER Experiment Name: At_Open_Flower_P Parameter: Plant Line Value: WS
  misc_feature: MA Experiment 20000265 PARAMETER Experiment Name: At_Open_Flower_P Parameter: Tissue Value: Closed Flower vs. Whole Plant
  misc_feature: MA Experiment ID: 20000286 Result: Up-regulated in Transcription
  misc_feature: MA Experiment 20000286 PARAMETER Experiment Name: At_Open_Flower_P Parameter: Age (day) Value: 21
  misc_feature: MA Experiment 20000286 PARAMETER Experiment Name: At_Open_Flower_P Parameter: Plant Line Value: WS
  misc_feature: MA Experiment 20000286 PARAMETER Experiment Name: At_Open_Flower_P Parameter: Tissue Value: Half Open vs. Whole Plant
  misc_feature: MA Experiment ID: 20000438 Result: Down-regulated in Transcription
  misc_feature: MA Experiment 20000438 PARAMETER Experiment Name: At_Shoots__P Parameter: Age (day) Value: 14
  misc_feature: MA Experiment 20000438 PARAMETER Experiment Name: At_Shoots__P Parameter: Tissue Value: Shoots vs. Whole Plant
  misc_feature: MA Experiment ID: 20000439 Result: Down-regulated in Transcription
  misc_feature: MA Experiment 20000439 PARAMETER Experiment Name: At_Roots__P Parameter: Age (day) Value: 14 vs. 21
  misc_feature: MA Experiment 20000439 PARAMETER Experiment Name: At_Roots__P Parameter: Organism Value: A. thaliana
  misc_feature: MA Experiment 20000439 PARAMETER Experiment Name: At_Roots__P Parameter: Tissue Value: Roots vs. Whole Plant
  misc_feature: MA Experiment ID: 20000794 Result: Up-regulated in Transcription
  misc_feature: MA Experiment 20000794 PARAMETER Experiment Name: At_Petals_P Parameter: Age (day) Value: 23-25 days
  misc_feature: MA Experiment 20000794 PARAMETER Experiment Name: At_Petals_P Parameter: Plant Line Value: WS
  misc_feature: MA Experiment 20000794 PARAMETER Experiment Name: At_Petals_P Parameter: Tissue Value: Petals vs. Whole plant
  misc_feature: MA Experiment ID: 20001757 Result: Down-regulated in Transcription
  misc_feature: MA Experiment 20001757 PARAMETER Experiment Name: At_50mM_NH4NO3_L-to-H_P Parameter: Timepoint (hr) Value: 6
  misc_feature: MA Experiment 20001757 PARAMETER Experiment Name: At_50mM_NH4NO3_L-to-H_P Parameter: Tissue Value: Leaf
  misc_feature: MA Experiment 20001757 PARAMETER Experiment Name: At_50mM_NH4NO3_L-to-H_P Parameter: Treatment Value: 50mM NH4NO3 vs 100mM Mannitol
  misc_feature: MA Experiment ID: 20001910 Result: Up-regulated in Transcription
  misc_feature: MA Experiment 20001910 PARAMETER Experiment Name: At_Drought_Reproduction_P Parameter: Age (day) Value: 37
  misc_feature: MA Experiment 20001910 PARAMETER Experiment Name: At_Drought_Reproduction_P Parameter: Organism Value: A. thaliana
  misc_feature: MA Experiment 20001910 PARAMETER Experiment Name: At_Drought_Reproduction_P Parameter: Plant Line Value: WS
  misc_feature: MA Experiment 20001910 PARAMETER Experiment Name: At_Drought_Reproduction_P Parameter: Timepoint (day) Value: 7
  misc_feature: MA Experiment 20001910 PARAMETER Experiment Name: At_Drought_Reproduction_P Parameter: Tissue Value: Flowers
  misc_feature: MA Experiment 20001910 PARAMETER Experiment Name: At_Drought_Reproduction_P Parameter: Treatment Value: Drought vs. No Drought
tcgaaaccaaaatctctctctcgtttgactttccctctctcccgtcgtttcaccggaaaaaaacaacagaaaaaaaaccgacgggagagaagaacaaacaataatggggaaaggaggacgtgagaagatatcatcaaacgaagaagaaagagaaggagtcatggctacagatttcttttggtcttacaccgatgagcctcatgcttcgaggagacgtcagattctgtcttgttaccctcagattagacaactctttggtcctgatccatgggctttcctcaagatcacattagtagtaattcttcaactctcaacagctgcaatccttcacaactctggatggctcaagattctatccattgcttacttctttggatcattcctcaaccacaatctcttcttagcaatccatgagctaagtcacaaccttgccttttcaactcctgtctacaatcgttgtctcggtattttcgcaaatctcccaatcggtgtaccaatgtcagtaactttccaaaaataccatctcgagcatcatcggttccaaggagtagatggtattgacatggatgttcctacttacaccgaagctcatttagtaaccaatatctttgccaaaacaatttgggttttcttacaactcttcttttacgctcttcgtcctatcttcatcaaaccaaaaccacctggctactgggagttcatcaacttcttgattcagattgttttagatgtatcagttgttctcttcttcggatggagatctttcgcgtatctaatcttatcgacatttgttggaggcggtatgcatccaatggcgggacattttatctcggaacattatgtttttaacccgaatcaagagacttattcgtattacggtccattgaatctactaacatggagtgttggttaccataacgagcatcacgatttcccgaggataccgggaaataagctgcatttggtgaaggagattgcaggagagtattatgaaggattggagtcgtataagtcatggtcacaagtgatttatatgtatattatggatacaacagttggtccttatagcagaatgaagaggaagctctcaaagtctgactaatttttctttgtttcttacatcaaactcttcttttattctattttagtatttttgttttgagggttgattttttcaactttattggaggacaaatctgtgatcttaggttgcagattttatgatttctcacggaatttaaaccct

SEQ ID NO: 83942 - protein, 332 aa, Arabidopsis thaliana
  peptide (1)..(332): Ceres Seq. ID no. 12672575
  misc_feature (87)..(296): Pfam Name: Fatty acid desaturase Pfam Description: Fatty acid desaturase
  misc_feature (1)..(332): Homolog of NCBI NO: 15234510 NR Description: putative fatty acid desaturase; protein id: supported by cDNA: gi_6752877 [Arabidopsis thaliana]
  misc_feature (14)..(329): Homolog of NCBI NO: 20147520 NR Description: putative sphingolipid delta 4 desaturase DES-1
  misc_feature (19)..(327): Homolog of NCBI NO: 17136246 NR Description: infertile crescent CG9078-PA [Drosophila
  misc_feature (19)..(326): Homolog of NCBI NO: 34304727 NR Description: fatty acid desaturase [Microtus fortis]
  misc_feature (19)..(326): Homolog of NCBI NO: 4505193 NR Description: sphingolipid delta 4 desaturase; membrane fatty (lipid) desaturase; dihydroceramide desaturase [Homo sapiens] sphingolipid delta 4 desaturase; [Homo sapiens]
  misc_feature (19)..(326): Homolog of NCBI NO: 16758022 NR Description: degenerative spermatocyte homolog [Rattus
  misc_feature (19)..(326): Homolog of NCBI NO: 6681175 NR Description: degenerative spermatocyte homolog (Drosophila) musculus] >gi|2225941|emb|CAA69714.1| Mdes protein [Mus musculus] unnamed protein product [Mus musculus] protein product [Mus
  misc_feature (19)..(326): Homolog of NCBI NO: 20147516 NR Description: sphingolipid delta 4 desaturase protein DES1 [Mus
  misc_feature (23)..(327): Homolog of NCBI NO: 28374221 NR Description: Similar to RIKEN cDNA 2210008A03 gene [Danio
  misc_feature (17)..(332): Homolog of NCBI NO: 17510269 NR Description: Fatty acid desaturase, possibly N-myristoylated elegans] >gi|15718293|emb|CAC70116.1| Hypothetical protein [Caenorhabditis elegans] >gi|15718324|emb|CAA21659.2|
MGKGGREKISSNEEEREGVMATDFFWSYTDEPHASRRRQILSCYPQIRQLFGPDPWAFLKITLVVILQLSTAAILHNSGWLKILSIAYFFGSFLNHNLFLAIHELSHNLAFSTPVYNRCLGIFANLPIGVPMSVTFQKYHLEHHRFQGVDGIDMDVPTYTEAHLVTNIFAKTIWVFLQLFFYALRPIFIKPKPPGYWEFINFLIQIVLDVSVVLFFGWRSFAYLILSTFVGGGMHPMAGHFISEHYVFNPNQETYSYYGPLNLLTWSVGYHNEHHDFPRIPGNKLHLVKEIAGEYYEGLESYKSWSQVIYMYIMDTTVGPYSRMKRKLSKSD

SEQ ID NO: 83943 - protein, 313 aa, Arabidopsis thaliana
  peptide (1)..(313): Ceres Seq. ID no. 12672576
  misc_feature (68)..(277): Pfam Name: Fatty acid desaturase Pfam Description: Fatty acid desaturase
  misc_feature (1)..(313): Homolog of NCBI NO: 15234510 NR Description: putative fatty acid desaturase; protein id: supported by cDNA: gi_6752877 [Arabidopsis thaliana]
  misc_feature (1)..(310): Homolog of NCBI NO: 20147520 NR Description: putative sphingolipid delta 4 desaturase DES-1
  misc_feature (1)..(308): Homolog of NCBI NO: 17136246 NR Description: infertile crescent CG9078-PA [Drosophila
  misc_feature (1)..(307): Homolog of NCBI NO: 34304727 NR Description: fatty acid desaturase [Microtus fortis]
  misc_feature (1)..(307): Homolog of NCBI NO: 4505193 NR Description: sphingolipid delta 4 desaturase; membrane fatty (lipid) desaturase; dihydroceramide desaturase [Homo sapiens] sphingolipid delta 4 desaturase; [Homo sapiens]
  misc_feature (1)..(307): Homolog of NCBI NO: 16758022 NR Description: degenerative spermatocyte homolog [Rattus
  misc_feature (1)..(307): Homolog of NCBI NO: 6681175 NR Description: degenerative spermatocyte homolog (Drosophila) musculus] >gi|2225941|emb|CAA69714.1| Mdes protein [Mus musculus] unnamed protein product [Mus musculus] protein product [Mus
  misc_feature (1)..(307): Homolog of NCBI NO: 20147516 NR Description: sphingolipid delta 4 desaturase protein DES1 [Mus
  misc_feature (4)..(308): Homolog of NCBI NO: 28374221 NR Description: Similar to RIKEN cDNA 2210008A03 gene [Danio
  misc_feature (1)..(313): Homolog of NCBI NO: 17510269 NR Description: Fatty acid desaturase, possibly N-myristoylated elegans] >gi|15718293|emb|CAC70116.1| Hypothetical protein [Caenorhabditis elegans] >gi|15718324|emb|CAA21659.2|
MATDFFWSYTDEPHASRRRQILSCYPQIRQLFGPDPWAFLKITLVVILQLSTAAILHNSGWLKILSIAYFFGSFLNHNLFLAIHELSHNLAFSTPVYNRCLGIFANLPIGVPMSVTFQKYHLEHHRFQGVDGIDMDVPTYTEAHLVTNIFAKTIWVFLQLFFYALRPIFIKPKPPGYWEFINFLIQIVLDVSVVLFFGWRSFAYLILSTFVGGGMHPMAGHFISEHYVFNPNQETYSYYGPLNLLTWSVGYHNEHHDFPRIPGNKLHLVKEIAGEYYEGLESYKSWSQVIYMYIMDTTVGPYSRMKRKLSKSD

SEQ ID NO: 83944 - protein, 201 aa, Arabidopsis thaliana
  peptide (1)..(201): Ceres Seq. ID no. 12672577
  misc_feature (1)..(165): Pfam Name: Fatty acid desaturase Pfam Description: Fatty acid desaturase
  misc_feature (1)..(201): Homolog of NCBI NO: 15234510 NR Description: putative fatty acid desaturase; protein id: supported by cDNA: gi_6752877 [Arabidopsis thaliana]
  misc_feature (1)..(198): Homolog of NCBI NO: 20147520 NR Description: putative sphingolipid delta 4 desaturase DES-1
  misc_feature (1)..(196): Homolog of NCBI NO: 17136246 NR Description: infertile crescent CG9078-PA [Drosophila
  misc_feature (1)..(195): Homolog of NCBI NO: 34304727 NR Description: fatty acid desaturase [Microtus fortis]
  misc_feature (1)..(195): Homolog of NCBI NO: 4505193 NR Description: sphingolipid delta 4 desaturase; membrane fatty (lipid) desaturase; dihydroceramide desaturase [Homo sapiens] sphingolipid delta 4 desaturase; [Homo sapiens]
  misc_feature (1)..(195): Homolog of NCBI NO: 16758022 NR Description: degenerative spermatocyte homolog [Rattus
  misc_feature (1)..(195): Homolog of NCBI NO: 6681175 NR Description: degenerative spermatocyte homolog (Drosophila) musculus] >gi|2225941|emb|CAA69714.1| Mdes protein [Mus musculus] unnamed protein product [Mus musculus] protein product [Mus
  misc_feature (1)..(195): Homolog of NCBI NO: 20147516 NR Description: sphingolipid delta 4 desaturase protein DES1 [Mus
  misc_feature (1)..(196): Homolog of NCBI NO: 28374221 NR Description: Similar to RIKEN cDNA 2210008A03 gene [Danio
  misc_feature (1)..(201): Homolog of NCBI NO: 17510269 NR Description: Fatty acid desaturase, possibly N-myristoylated elegans] >gi|15718293|emb|CAC70116.1| Hypothetical protein [Caenorhabditis elegans] >gi|15718324|emb|CAA21659.2|
MSVTFQKYHLEHHRFQGVDGIDMDVPTYTEAHLVTNIFAKTIWVFLQLFFYALRPIFIKPKPPGYWEFINFLIQIVLDVSVVLFFGWRSFAYLILSTFVGGGMHPMAGHFISEHYVFNPNQETYSYYGPLNLLTWSVGYHNEHHDFPRIPGNKLHLVKEIAGEYYEGLESYKSWSQVIYMYIMDTTVGPYSRMKRKLSKSD

SEQ ID NO: 83945 - DNA, 1087 bp, Arabidopsis thaliana
  misc_feature (1)..(1087): Ceres Seq. ID no. 12672593
  misc_feature: MA Experiment ID: 20000227 Result: Down-regulated in Transcription
  misc_feature: MA Experiment 20000227 PARAMETER Experiment Name: At_Root-Tips-vs-Tops_P Parameter: Tissue Value: Root Tips vs. Root Tops
  misc_feature: MA Experiment ID: 20000267 Result: Up-regulated in Transcription
  misc_feature: MA Experiment 20000267 PARAMETER Experiment Name: At_Drought_P Parameter: Age (day) Value: 7
  misc_feature: MA Experiment 20000267 PARAMETER Experiment Name: At_Drought_P Parameter: Organism Value: A. thaliana
  misc_feature: MA Experiment 20000267 PARAMETER Experiment Name: At_Drought_P Parameter: Plant Line Value: WS
  misc_feature: MA Experiment 20000267 PARAMETER Experiment Name: At_Drought_P Parameter: Timepoint (hr) Value: 6
  misc_feature: MA Experiment 20000267 PARAMETER Experiment Name: At_Drought_P Parameter: Tissue Value: Whole Plant
  misc_feature: MA Experiment 20000267 PARAMETER Experiment Name: At_Drought_P Parameter: Treatment Value: Drought vs. No Drought
  misc_feature: MA Experiment ID: 20000268 Result: Up-regulated in Transcription
  misc_feature: MA Experiment 20000268 PARAMETER Experiment Name: At_100mM_NaCl__P Parameter: Age (day) Value: 14
  misc_feature: MA Experiment 20000268 PARAMETER Experiment Name: At_100mM_NaCl__P Parameter: Organism Value: A. thaliana
  misc_feature: MA Experiment 20000268 PARAMETER Experiment Name: At_100mM_NaCl__P Parameter: Plant Line Value: WS
  misc_feature: MA Experiment 20000268 PARAMETER Experiment Name: At_100mM_NaCl__P Parameter: Timepoint (hr) Value: 6
  misc_feature: MA Experiment 20000268 PARAMETER Experiment Name: At_100mM_NaCl__P Parameter: Tissue Value: Whole Plant
  misc_feature: MA Experiment 20000268 PARAMETER Experiment Name: At_100mM_NaCl__P Parameter: Treatment Value: 100mM NaCl vs. No Treatment
  misc_feature: MA Experiment ID: 20000308 Result: Up-regulated in Transcription
  misc_feature: MA Experiment 20000308 PARAMETER Experiment Name: At_100mM_NaCl__P Parameter: Age (day) Value: 17
  misc_feature: MA Experiment 20000308 PARAMETER Experiment Name: At_100mM_NaCl__P Parameter: Organism Value: A. thaliana
  misc_feature: MA Experiment 20000308 PARAMETER Experiment Name: At_100mM_NaCl__P Parameter: Plant Line Value: WS
  misc_feature: MA Experiment 20000308 PARAMETER Experiment Name: At_100mM_NaCl__P Parameter: Timepoint (hr) Value: 72
  misc_feature: MA Experiment 20000308 PARAMETER Experiment Name: At_100mM_NaCl__P Parameter: Tissue Value: Whole Plant
  misc_feature: MA Experiment 20000308 PARAMETER Experiment Name: At_100mM_NaCl__P Parameter: Treatment Value: 100mM NaCl vs. No Treatment
  misc_feature: MA Experiment ID: 20000436 Result: Up-regulated in Transcription
  misc_feature: MA Experiment 20000436 PARAMETER Experiment Name: At_Drought_P Parameter: Age (day) Value: 7
  misc_feature: MA Experiment 20000436 PARAMETER Experiment Name: At_Drought_P Parameter: Organism Value: A. thaliana
  misc_feature: MA Experiment 20000436 PARAMETER Experiment Name: At_Drought_P Parameter: Plant Line Value: WS
  misc_feature: MA Experiment 20000436 PARAMETER Experiment Name: At_Drought_P Parameter: Timepoint (hr) Value: 12
  misc_feature: MA Experiment 20000436 PARAMETER Experiment Name: At_Drought_P Parameter: Tissue Value: Whole Plant
  misc_feature: MA Experiment 20000436 PARAMETER Experiment Name: At_Drought_P Parameter: Treatment Value: Drought vs. No Drought
  misc_feature: MA Experiment ID: 20000437 Result: Up-regulated in Transcription
  misc_feature: MA Experiment 20000437 PARAMETER Experiment Name: At_Drought_P Parameter: Age (day) Value: 8
  misc_feature: MA Experiment 20000437 PARAMETER Experiment Name: At_Drought_P Parameter: Organism Value: A. thaliana
  misc_feature: MA Experiment 20000437 PARAMETER Experiment Name: At_Drought_P Parameter: Plant Line Value: WS
  misc_feature: MA Experiment 20000437 PARAMETER Experiment Name: At_Drought_P Parameter: Timepoint (hr) Value: 24
  misc_feature: MA Experiment 20000437 PARAMETER Experiment Name: At_Drought_P Parameter: Tissue Value: Whole Plant
  misc_feature: MA Experiment 20000437 PARAMETER Experiment Name: At_Drought_P Parameter: Treatment Value: Drought vs. No Drought
  misc_feature: MA Experiment ID: 20000451 Result: Up-regulated in Transcription
  misc_feature: MA Experiment 20000451 PARAMETER Experiment Name: At_CS6879_Shoots-Roots_P Parameter: Age (day) Value: 14
  misc_feature: MA Experiment 20000451 PARAMETER Experiment Name: At_CS6879_Shoots-Roots_P Parameter: Organism Value: A. thaliana
  misc_feature: MA Experiment 20000451 PARAMETER Experiment Name: At_CS6879_Shoots-Roots_P Parameter: Plant Line Value: CS6879 vs. WS
  misc_feature: MA Experiment 20000451 PARAMETER Experiment Name: At_CS6879_Shoots-Roots_P Parameter: Tissue Value: Roots
  misc_feature: MA Experiment ID: 20001248 Result: Down-regulated in Transcription
  misc_feature: MA Experiment 20001248 PARAMETER Experiment Name: At_Far-red-induction_P Parameter: Age (day) Value: 7
  misc_feature: MA Experiment 20001248 PARAMETER Experiment Name: At_Far-red-induction_P Parameter: Light Value: Far-red vs. White
  misc_feature: MA Experiment 20001248 PARAMETER Experiment Name: At_Far-red-induction_P Parameter: Organism Value: A. thaliana
  misc_feature: MA Experiment 20001248 PARAMETER Experiment Name: At_Far-red-induction_P Parameter: Plant Line Value: Columbia
  misc_feature: MA Experiment 20001248 PARAMETER Experiment Name: At_Far-red-induction_P Parameter: Timepoint (hr) Value: 4
  misc_feature: MA Experiment 20001248 PARAMETER Experiment Name: At_Far-red-induction_P Parameter: Tissue Value: Whole Plant
  misc_feature: MA Experiment ID: 20001554 Result: Up-regulated in Transcription
  misc_feature: MA Experiment 20001554 PARAMETER Experiment Name: At_Drought_Soil_Dry_P Parameter: Age (day) Value: 21
  misc_feature: MA Experiment 20001554 PARAMETER Experiment Name: At_Drought_Soil_Dry_P Parameter: Organism Value: A. thaliana
  misc_feature: MA Experiment 20001554 PARAMETER Experiment Name: At_Drought_Soil_Dry_P Parameter: Plant Line Value: WS
  misc_feature: MA Experiment 20001554 PARAMETER Experiment Name: At_Drought_Soil_Dry_P Parameter: Post Timepoint (hr) Value: None
  misc_feature: MA Experiment 20001554 PARAMETER Experiment Name: At_Drought_Soil_Dry_P Parameter: Post-Treatment Value: None
  misc_feature: MA Experiment 20001554 PARAMETER Experiment Name: At_Drought_Soil_Dry_P Parameter: Timepoint (day) Value: 7
  misc_feature: MA Experiment 20001554 PARAMETER Experiment Name: At_Drought_Soil_Dry_P Parameter: Treatment Value: Drought vs. No Drought
  misc_feature: MA Experiment ID: 20001555 Result: Up-regulated in Transcription
  misc_feature: MA Experiment 20001555 PARAMETER Experiment Name: At_Drought_Soil_Dry_P Parameter: Age (day) Value: 24
  misc_feature: MA Experiment 20001555 PARAMETER Experiment Name: At_Drought_Soil_Dry_P Parameter: Organism Value: A. thaliana
  misc_feature: MA Experiment 20001555 PARAMETER Experiment Name: At_Drought_Soil_Dry_P Parameter: Plant Line Value: WS
  misc_feature: MA Experiment 20001555 PARAMETER Experiment Name: At_Drought_Soil_Dry_P Parameter: Post Timepoint (hr) Value: None
  misc_feature: MA Experiment 20001555 PARAMETER Experiment Name: At_Drought_Soil_Dry_P Parameter: Post-Treatment Value: None
  misc_feature: MA Experiment 20001555 PARAMETER Experiment Name: At_Drought_Soil_Dry_P Parameter: Timepoint (day) Value: 10
  misc_feature: MA Experiment 20001555 PARAMETER Experiment Name: At_Drought_Soil_Dry_P Parameter: Treatment Value: Drought vs. No Drought
  misc_feature: MA Experiment ID: 20001556 Result: Up-regulated in Transcription
  misc_feature: MA Experiment 20001556 PARAMETER Experiment Name: At_Drought_Soil_Dry_P Parameter: Age (day) Value: 26
  misc_feature: MA Experiment 20001556 PARAMETER Experiment Name: At_Drought_Soil_Dry_P Parameter: Organism Value: A. thaliana
  misc_feature: MA Experiment 20001556 PARAMETER Experiment Name: At_Drought_Soil_Dry_P Parameter: Plant Line Value: WS
  misc_feature: MA Experiment 20001556 PARAMETER Experiment Name: At_Drought_Soil_Dry_P Parameter: Post Timepoint (hr) Value: None
  misc_feature: MA Experiment 20001556 PARAMETER Experiment Name: At_Drought_Soil_Dry_P Parameter: Post-Treatment Value: None
  misc_feature: MA Experiment 20001556 PARAMETER Experiment Name: At_Drought_Soil_Dry_P Parameter: Timepoint (day) Value: 12
  misc_feature: MA Experiment 20001556 PARAMETER Experiment Name: At_Drought_Soil_Dry_P Parameter: Treatment Value: Drought vs. No Drought
  misc_feature: MA Experiment ID: 20001559 Result: Up-regulated in Transcription
  misc_feature: MA Experiment 20001559 PARAMETER Experiment Name: At_Drought_Soil_Dry_P Parameter: Age (day) Value: 28
  misc_feature: MA Experiment 20001559 PARAMETER Experiment Name: At_Drought_Soil_Dry_P Parameter: Organism Value: A. thaliana
  misc_feature: MA Experiment 20001559 PARAMETER Experiment Name: At_Drought_Soil_Dry_P Parameter: Plant Line Value: WS
  misc_feature: MA Experiment 20001559 PARAMETER Experiment Name: At_Drought_Soil_Dry_P Parameter: Post Timepoint (hr) Value: 29
  misc_feature: MA Experiment 20001559 PARAMETER Experiment Name: At_Drought_Soil_Dry_P Parameter: Post-Treatment Value: Re-Water vs. No Drought
  misc_feature: MA Experiment 20001559 PARAMETER Experiment Name: At_Drought_Soil_Dry_P Parameter: Timepoint (day) Value: 14
  misc_feature: MA Experiment 20001559 PARAMETER Experiment Name: At_Drought_Soil_Dry_P Parameter: Treatment Value: Drought vs. No Drought
  misc_feature: MA Experiment ID: 20001904 Result: Up-regulated in Transcription
  misc_feature: MA Experiment 20001904 PARAMETER Experiment Name: At_Drought_Reproduction_P Parameter: Age (day) Value: 37
  misc_feature: MA Experiment 20001904 PARAMETER Experiment Name: At_Drought_Reproduction_P Parameter: Organism Value: A. thaliana
  misc_feature: MA Experiment 20001904 PARAMETER Experiment Name: At_Drought_Reproduction_P Parameter: Plant Line Value: WS
  misc_feature: MA Experiment 20001904 PARAMETER Experiment Name: At_Drought_Reproduction_P Parameter: Timepoint (day) Value: 7
  misc_feature: MA Experiment 20001904 PARAMETER Experiment Name: At_Drought_Reproduction_P Parameter: Tissue Value: Rosettes
  misc_feature: MA Experiment 20001904 PARAMETER Experiment Name: At_Drought_Reproduction_P Parameter: Treatment Value: Drought vs. No Drought
acttttatcttcactctccttgaacatattttccctcttaatatcttcaaggaaaaaaaaaaaactgcaaagagaagtggtgtgagtgaaaatgggagtggaaggaacgatggagtatatatcagaccttttaaagaagaggaagaggaagaagaagaagcaaatgcaaacagtagctctccgtgttgctcgtatcgactgcgaaggctgtgaacgtaagatcaaacatgtcctctccggtgtcaaaggggtgaagtcagtggacgtggacgtaaagctgcagaaggtaacggtaacgggatatatagacccaaagaaggttttggaggctgccaagtcaacgaagaagaaagtggagttatggccgtacgttccttacacaatggtggcgaatccgtacatatctcaggcgtatgacaagaaggcaccaccaaacatggttcggaaagtccccgacacggcctctgtcaacgagaccaccgtcgatgactcttacactattatgtttagcgacgagaaccctaattcttgcgctatcatgtagaagagtgtgcttttgtaaattaattaagtatatggctatagattatattatactattatatattatcggttttggtaatagtacctacgtaagagtcgtggtgtacgggtttggctttacaactattacgtgagaaaatcgagatttcttaacacttataaggaatttaaataagaggttttatagatagctaaattatgttttgaaatattctgctgatgagtggatgatatataattcattcgtttagagtatattcactttttattttggataacttgggtgtgatccagttcaaaggataccataaactccgagtcaaatcgcggaggcttttttcccaagctggttctcgggtcaacgagtcatgagcagagcgtgcctaggtttttggtggtcttaggcaaataaggaaaaacattttatacatattgtgataaaatgtctgataatgtataattaaatttaacatatttttcaataattcctgaatttttgctttcaccggattatcgggtactcttatgaaatagattttcgatt

SEQ ID NO: 83946 - protein, 150 aa, Arabidopsis thaliana
  peptide (1)..(150): Ceres Seq. ID no. 12672594
  misc_feature (29)..(90): Pfam Name: Heavy-metal-associated domain Pfam Description: Heavy-metal-associated domain
  misc_feature (1)..(150): Homolog of NCBI NO: 15236529 NR Description: copper chaperone (CCH)-related; protein id: supported by cDNA: gi_17979352, supported by cDNA: gi_20465504
  misc_feature (1)..(150): Homolog of NCBI NO: 15235984 NR Description: copper chaperone (CCH)-related; protein id:
  misc_feature (8)..(150): Homolog of NCBI NO: 15219990 NR Description: copper chaperone (CCH)-related; protein id: supported by cDNA: gi_13899062, supported by cDNA: gi_15450582, by cDNA: gi_17386147, supported by cDNA: gi_18377445
  misc_feature (1)..(150): Homolog of NCBI NO: 15223925 NR Description: copper chaperone (CCH)-related; protein id: supported by cDNA: 39127. [Arabidopsis thaliana]
  misc_feature (1)..(150): Homolog of NCBI NO: 23304411 NR Description: farnesylated protein 1 [Hordeum vulgare subsp.
  misc_feature (1)..(150): Homolog of NCBI NO: 38346843 NR Description: OSJNBa0091C12.3 [Oryza sativa (japonica
  misc_feature (5)..(150): Homolog of NCBI NO: 15233937 NR Description: copper chaperone (CCH)-related; protein id: supported by cDNA: 10238., supported by cDNA: gi_11908067, by cDNA: gi_12642881, supported by cDNA: gi_13265451, supported
  misc_feature (5)..(150): Homolog of NCBI NO: 21536547 NR Description: farnesylated protein (ATFP6) [Arabidopsis
  misc_feature (5)..(150): Homolog of NCBI NO: 28866019 NR Description: farnesylated protein 3 [Hordeum vulgare subsp.
  misc_feature (5)..(150): Homolog of NCBI NO: 37573003 NR Description: putative farnesylated protein [Oryza sativa
MGVEGTMEYISDLLKKRKRKKKKQMQTVALRVARIDCEGCERKIKHVLSGVKGVKSVDVDVKLQKVTVTGYIDPKKVLEAAKSTKKKVELWPYVPYTMVANPYISQAYDKKAPPNMVRKVPDTASVNETTVDDSYTIMFSDENPNSCAIM

SEQ ID NO: 83947 - protein, 144 aa, Arabidopsis thaliana
  peptide (1)..(144): Ceres Seq. ID no. 12672595
  misc_feature (23)..(84): Pfam Name: Heavy-metal-associated domain Pfam Description: Heavy-metal-associated domain
  misc_feature (1)..(144): Homolog of NCBI NO: 15236529 NR Description: copper chaperone (CCH)-related; protein id: supported by cDNA: gi_17979352, supported by cDNA: gi_20465504
  misc_feature (1)..(144): Homolog of NCBI NO: 15235984 NR Description: copper chaperone (CCH)-related; protein id:
  misc_feature (2)..(144): Homolog of NCBI NO: 15219990 NR Description: copper chaperone (CCH)-related; protein id: supported by cDNA: gi_13899062, supported by cDNA: gi_15450582, by cDNA: gi_17386147, supported by cDNA: gi_18377445
  misc_feature (1)..(144): Homolog of NCBI NO: 15223925 NR Description: copper chaperone (CCH)-related; protein id: supported by cDNA: 39127. [Arabidopsis thaliana]
  misc_feature (1)..(144): Homolog of NCBI NO: 23304411 NR Description: farnesylated protein 1 [Hordeum vulgare subsp.
  misc_feature (1)..(144): Homolog of NCBI NO: 38346843 NR Description: OSJNBa0091C12.3 [Oryza sativa (japonica
  misc_feature (1)..(144): Homolog of NCBI NO: 15233937 NR Description: copper chaperone (CCH)-related; protein id: supported by cDNA: 10238., supported by cDNA: gi_11908067, by cDNA: gi_12642881, supported by cDNA: gi_13265451, supported
  misc_feature (1)..(144): Homolog of NCBI NO: 21536547 NR Description: farnesylated protein (ATFP6) [Arabidopsis
  misc_feature (1)..(144): Homolog of NCBI NO: 28866019 NR Description: farnesylated protein 3 [Hordeum vulgare subsp.
  misc_feature (1)..(144): Homolog of NCBI NO: 37573003 NR Description: putative farnesylated protein [Oryza sativa
MEYISDLLKKRKRKKKKQMQTVALRVARIDCEGCERKIKHVLSGVKGVKSVDVDVKLQKVTVTGYIDPKKVLEAAKSTKKKVELWPYVPYTMVANPYISQAYDKKAPPNMVRKVPDTASVNETTVDDSYTIMFSDENPNSCAIM

SEQ ID NO: 83948 - protein, 126 aa, Arabidopsis thaliana
  peptide (1)..(126): Ceres Seq. ID no. 12672596
  misc_feature (5)..(66): Pfam Name: Heavy-metal-associated domain Pfam Description: Heavy-metal-associated domain
  misc_feature (1)..(126): Homolog of NCBI NO: 15236529 NR Description: copper chaperone (CCH)-related; protein id: supported by cDNA: gi_17979352, supported by cDNA: gi_20465504
  misc_feature (1)..(126): Homolog of NCBI NO: 15235984 NR Description: copper chaperone (CCH)-related; protein id:
  misc_feature (1)..(126): Homolog of NCBI NO: 15219990 NR Description: copper chaperone (CCH)-related; protein id: supported by cDNA: gi_13899062, supported by cDNA: gi_15450582, by cDNA: gi_17386147, supported by cDNA: gi_18377445
  misc_feature (1)..(126): Homolog of NCBI NO: 15223925 NR Description: copper chaperone (CCH)-related; protein id: supported by cDNA: 39127. [Arabidopsis thaliana]
  misc_feature (1)..(126): Homolog of NCBI NO: 23304411 NR Description: farnesylated protein 1 [Hordeum vulgare subsp.
  misc_feature (1)..(126): Homolog of NCBI NO: 38346843 NR Description: OSJNBa0091C12.3 [Oryza sativa (japonica
  misc_feature (1)..(126): Homolog of NCBI NO: 15233937 NR Description: copper chaperone (CCH)-related; protein id: supported by cDNA: 10238., supported by cDNA: gi_11908067, by cDNA: gi_12642881, supported by cDNA: gi_13265451, supported
  misc_feature (1)..(126): Homolog of NCBI NO: 21536547 NR Description: farnesylated protein (ATFP6) [Arabidopsis
  misc_feature (1)..(126): Homolog of NCBI NO: 28866019 NR Description: farnesylated protein 3 [Hordeum vulgare subsp.
  misc_feature (1)..(126): Homolog of NCBI NO: 37573003 NR Description: putative farnesylated protein [Oryza sativa
MQTVALRVARIDCEGCERKIKHVLSGVKGVKSVDVDVKLQKVTVTGYIDPKKVLEAAKSTKKKVELWPYVPYTMVANPYISQAYDKKAPPNMVRKVPDTASVNETTVDDSYTIMFSDENPNSCAIM

SEQ ID NO: 83949 - DNA, 1659 bp, Arabidopsis thaliana
  misc_feature (1)..(1659): Ceres Seq. ID no. 12672597
  misc_feature: MA Experiment ID: 108461 Result: Up-regulated in Transcription
  misc_feature: MA Experiment 108461 PARAMETER Experiment Name: At_Germinating_Seeds_cDNA_P Parameter: Age (day) Value: 1 vs. 0
  misc_feature: MA Experiment 108461 PARAMETER Experiment Name: At_Germinating_Seeds_cDNA_P Parameter: Tissue Value: Germinating Seeds
  misc_feature: MA Experiment ID: 108462 Result: Up-regulated in Transcription
  misc_feature: MA Experiment 108462 PARAMETER Experiment Name: At_Germinating_Seeds_cDNA_P Parameter: Age (day) Value: 2 vs. 0
  misc_feature: MA Experiment 108462 PARAMETER Experiment Name: At_Germinating_Seeds_cDNA_P Parameter: Tissue Value: Germinating Seeds
  misc_feature: MA Experiment ID: 108463 Result: Up-regulated in Transcription
  misc_feature: MA Experiment 108463 PARAMETER Experiment Name: At_Germinating_Seeds_cDNA_P Parameter: Age (day) Value: 3 vs. 0
  misc_feature: MA Experiment 108463 PARAMETER Experiment Name: At_Germinating_Seeds_cDNA_P Parameter: Tissue Value: Germinating Seeds
  misc_feature: MA Experiment ID: 108464 Result: Up-regulated in Transcription
  misc_feature: MA Experiment 108464 PARAMETER Experiment Name: At_Germinating_Seeds_cDNA_P Parameter: Age (day) Value: 4 vs. 0
  misc_feature: MA Experiment 108464 PARAMETER Experiment Name: At_Germinating_Seeds_cDNA_P Parameter: Tissue Value: Germinating Seeds
  misc_feature: MA Experiment ID: 108577 Result: Down-regulated in Transcription
  misc_feature: MA Experiment 108577 PARAMETER Experiment Name: At_42deg_Heat_cDNA_P Parameter: Temperature (deg C) Value: 42 vs. 22
  misc_feature: MA Experiment 108577 PARAMETER Experiment Name: At_42deg_Heat_cDNA_P Parameter: Timepoint (hr) Value: 6
  misc_feature: MA Experiment 108577 PARAMETER Experiment Name: At_42deg_Heat_cDNA_P Parameter: Tissue Value: Aerial
  misc_feature: MA Experiment ID: 108595 Result: Down-regulated in Transcription
  misc_feature: MA Experiment 108595 PARAMETER Experiment Name: At_Ler-pi_Ovule_cDNA_P Parameter: Plant Line Value: null
  misc_feature: MA Experiment ID: 20000113 Result: Down-regulated in Transcription
  misc_feature: MA Experiment 20000113 PARAMETER Experiment Name: At_42deg_Heat_cDNA_P Parameter: Temperature (deg C) Value: 42 vs. 22
  misc_feature: MA Experiment 20000113 PARAMETER Experiment Name: At_42deg_Heat_cDNA_P Parameter: Timepoint (hr) Value: 8
  misc_feature: MA Experiment 20000113 PARAMETER Experiment Name: At_42deg_Heat_cDNA_P Parameter: Tissue Value: Aerial
  misc_feature: MA Experiment ID: 20000144 Result: Down-regulated in Transcription
  misc_feature: MA Experiment 20000144 PARAMETER Experiment Name: At_42deg_Heat_cDNA_P Parameter: Temperature (deg C) Value: 42 vs. 22
  misc_feature: MA Experiment 20000144 PARAMETER Experiment Name: At_42deg_Heat_cDNA_P Parameter: Timepoint (hr) Value: 1
  misc_feature: MA Experiment 20000144 PARAMETER Experiment Name: At_42deg_Heat_cDNA_P Parameter: Tissue Value: Aerial
  misc_feature: MA Experiment ID: 20000224 Result: Down-regulated in Transcription
atgaaggaatcagatctaaccaccgaaccaatcgcacaaaatctaatcaagctaataagcaatgtctgtttctcagtcttcgttttcacagttctcatcttcacagtaatcgcagtaacttaccaaccaccagatccatggcttgaatctgctccagcactcaccaaactcctaaccgaaaccgaaaacgcaactttcaaaatcgacggttcgattctcaaaaccggcgaagatctcgcttcatctccgtcatcatcacctccgtcgaactccacagagcaagtcacggaggcgacgattgagaaatccgaggcgaaaatcggtaatatgactgtgaagaactctatagattgtgatgaggatttgaagattgtgaattgttctgatccgagagttttagttgctgttgagaggtttaatttgaaggtttttaaatctattgtgttcttagagtacgaaactccggttaacggatcgaaactagacgaatgcgatgtttcttggaggtttaggaataagaaggagaagtcatggaggagatacagagatttcaggaggtttaggtttggatttggtgagaattgtacttataaagtgtttcatactagtggttggcattctggtgttaatgctcgtaggcctaggattagtagaccgagctcgagtcgaggagctcgcggtggtgattcggagattaatgatacgattccgactcttggttcgcagacgagtttccggagagggaagtatttgtattattcgcggggtggtgattattgtaagggtatgaatcagtatatgtggagtttcttgtgtggtttaggtgaagcaatgtatttgaataggacttttgtgatggatttgagtttgtgtttgtcttcgagttatagttctaaggggaaagatgaggaaggtaaggattttcggtattattttgatttcgagcatcttaaggagacggcttcgattgttgaagagggtgagttcttgagagattggaagaaatggaatcggttgcataaacggaaagttcctgttaggaaggttaagacgcatagagtgtcgcctttgcagcttagtaaagataagagtacgattatatggaggcagtttgatactcctgagcctgaaaactattggtatagagtttgtgaagggcaagcatcgaagtatgttgagaggccgtggcatgcgttgtggaagtcgaagaggttgatgaatattgtctctgagattagtgggaaaatggactgggattttgatgctgttcatgtggttagaggcgagaaagcgaagaacaagaagctatggccacatttggatgcagacacatggcctgatgcgatattgaccaaacttaaaggattggttcaggtgtggaggaatttgtacgttgcaactaatgaaccgttttataattactttgacaagttgaggtctcagtacaaggttcacttgcttgatgactatagctacttgtggggaaataagagtgaatggtacaatgagactagtctcttgaacaatgggaaaccagttgagtttgatgggtacatgagagtagctgttgatacagaggtgttttatagaggaaagactcgcgtcgagacgttctataaccttaccacggactgcaaagacgggatcaatacatgctaa

SEQ ID NO: 83950 - protein, 552 aa, Arabidopsis thaliana; identical to SEQ ID NO: 23115
  peptide (1)..(552): Ceres Seq. ID no. 12672598
  misc_feature (1)..(552): Homolog of NCBI NO: 15236611 NR Description: putative protein; protein id: At4g08810.1, by cDNA: gi_15912228 [Arabidopsis thaliana]
  misc_feature (2)..(552): Homolog of NCBI NO: 34913308 NR Description: P0519E12.32 [Oryza sativa (japonica
  misc_feature (9)..(552): Homolog of NCBI NO: 18395698 NR Description: expressed protein; protein id: At2g04280.1, by cDNA: gi_15810336 [Arabidopsis thaliana]
  misc_feature (9)..(552): Homolog of NCBI NO: 15235454 NR Description: putative protein; protein id: At4g12700.1
  misc_feature (232)..(552): Homolog of NCBI NO: 37534994 NR Description: unknown protein [Oryza sativa (japonica
  misc_feature (113)..(425): Homolog of NCBI NO: 34909040 NR Description: P0034E02.33 [Oryza sativa (japonica
  misc_feature (317)..(536): Homolog of NCBI NO: 34909040 NR Description: P0034E02.33 [Oryza sativa (japonica

SEQ ID NO: 83951 - protein, 443 aa, Arabidopsis thaliana; identical to SEQ ID NO: 23116
  peptide (1)..(443): Ceres Seq. ID no. 12672599
  misc_feature (1)..(443): Homolog of NCBI NO: 15236611 NR Description: putative protein; protein id: At4g08810.1, by cDNA: gi_15912228 [Arabidopsis thaliana]
  misc_feature (1)..(443): Homolog of NCBI NO: 34913308 NR Description: P0519E12.32 [Oryza sativa (japonica
  misc_feature (1)..(443): Homolog of NCBI NO: 18395698 NR Description: expressed protein; protein id: At2g04280.1, by cDNA: gi_15810336 [Arabidopsis thaliana]
  misc_feature (1)..(443): Homolog of NCBI NO: 15235454 NR Description: putative protein; protein id: At4g12700.1
  misc_feature (123)..(443): Homolog of NCBI NO: 37534994 NR Description: unknown protein [Oryza sativa (japonica
  misc_feature (4)..(316): Homolog of NCBI NO: 34909040 NR Description: P0034E02.33 [Oryza sativa (japonica
  misc_feature (208)..(427): Homolog of NCBI NO: 34909040 NR Description: P0034E02.33 [Oryza sativa (japonica

SEQ ID NO: 83952 - protein, 290 aa, Arabidopsis thaliana
  peptide (1)..(290): Ceres Seq. ID no. 12672600
  misc_feature (1)..(290): Homolog of NCBI NO: 15236611 NR Description: putative protein; protein id: At4g08810.1, by cDNA: gi_15912228 [Arabidopsis thaliana]
  misc_feature (1)..(290): Homolog of NCBI NO: 34913308 NR Description: P0519E12.32 [Oryza sativa (japonica
  misc_feature (1)..(290): Homolog of NCBI NO: 18395698 NR Description: expressed protein; protein id: At2g04280.1, by cDNA: gi_15810336 [Arabidopsis thaliana]
  misc_feature (1)..(290): Homolog of NCBI NO: 15235454 NR Description: putative protein; protein id: At4g12700.1
  misc_feature (1)..(290): Homolog of NCBI NO: 37534994 NR Description: unknown protein [Oryza sativa (japonica
  misc_feature (1)..(163): Homolog of NCBI NO: 34909040 NR Description: P0034E02.33 [Oryza sativa (japonica
  misc_feature (55)..(274): Homolog of NCBI NO: 34909040 NR Description: P0034E02.33 [Oryza sativa (japonica
MNQYMWSFLCGLGEAMYLNRTFVMDLSLCLSSSYSSKGKDEEGKDFRYYFDFEHLKETASIVEEGEFLRDWKKWNRLHKRKVPVRKVKTHRVSPLQLSKDKSTIIWRQFDTPEPENYWYRVCEGQASKYVERPWHALWKSKRLMNIVSEISGKMDWDFDAVHVVRGEKAKNKKLWPHLDADTWPDAILTKLKGLVQVWRNLYVATNEPFYNYFDKLRSQYKVHLLDDYSYLWGNKSEWYNETSLLNNGKPVEFDGYMRVAVDTEVFYRGKTRVETFYNLTTDCKDGINTC

SEQ ID NO: 83953 - DNA, 2979 bp, Arabidopsis thaliana
  misc_feature (1)..(2979): Ceres Seq. ID no. 12672624
  misc_feature: MA Experiment ID: 20000234 Result: Up-regulated in Transcription
  misc_feature: MA Experiment 20000234 PARAMETER Experiment Name: At_Siliques_P Parameter: Age (day) Value: 21
  misc_feature: MA Experiment 20000234 PARAMETER Experiment Name: At_Siliques_P Parameter: Organism Value: A. thaliana
  misc_feature: MA Experiment 20000234 PARAMETER Experiment Name: At_Siliques_P Parameter: Plant Line Value: WS
  misc_feature: MA Experiment 20000234 PARAMETER Experiment Name: At_Siliques_P Parameter: Tissue Value: Less Than 5mm Siliques vs. Whole Plant
tgtgtgcaaaacgtctctctctctgtctcataaaatctcagagaagaaacatcgtcgggtcaggtcgaagaaaggagagaaatgagtggtcacgattcgaaatacttctccacgacgaagaagggagagatccctgagctcaaggaagagcttaattcccagtataaggataagagaaaagatgcagttaagaaggttattgcggcgatgactgttggaaaggatgtttcatcacttttcactgatgtagtcaattgtatgcaaacggaaaatttggagttgaagaagcttgtttacttgtatctcataaattatgcgaaaagccagccagatcttgctattcttgcagtaaatacctttgtaaaggattcacaggatccaaatccgctgattcgtgctttggctgtgcggacaatgggctgcattcgtgttgataaaatcacagaatatctatgtgatcctcttcaaaagtgcctaaaggatgatgacccatatgtcaggaagactgcggctatttgcgtcgctaagcttttcgacataaatgctgaattagttgaggacagaggtttccttgaagccttgaaggatttgatatcagataacaatccaatggttgttgccaatgctgtagcagcccttgcggagattcaagagaacagtagtagccccatctttgagatcaatagtaccactcttacaaagctccttactgctctaaatgaatgcactgagtggggtcaagtttttatactagatgctttatcgaagtataaagcagctgatccccgtgaggctgaaaatattgttgagagagtaacaccaaggttgcaacatgccaactgcgctgttgttctttcagctgttaagatgatccttcaacaaatggaacttattactagtacagacgtgattagaaatctttgtaagaagatggctccaccccttgttacattgctttctgccgaacctgagatacaatatgttgcacttcgtaacattaatcttattgtgcaaaaacgacccactatccttgcccatgaaattaaggttttcttctgcaagtataacgacccaatttatgttaagatggagaagttggagattatgattaaacttgcctctgacagaaacatagaccaggttcttctggaattcaaagagtatgccacagaagtagacgttgattttgttagaaaggctgttcgtgcgataggccgatgtgctatcaaactagagagagcagctgaacggtgcatcagtgttttgctcgagttgatcaagattaaagtgaattatgttgtccaggaggccattattgtcatcaaagatatcttcagaagatatccaaacacgtatgagtccataattgcaacactctgtgagagtttagacactttggatgaaccagaagctaaggcatctatgatatggatcattggtgaatatgctgaaagaattgacaatgccgatgagcttcttgaaagctttctggagaattttcctgaggaaccagcacaggtccagttgcagctcctaactgctactgttaagctattcctgaagaagccaactgaaggccctcaacaaatgattcaggttgtcttgaataatgctactgtggagacggataatcctgatctcagagatcgtgcatacatatactggcgtcttctatccactgatcctgaggctgccaaggatgttgtcttagctgaaaagcccgtgatttctgacgactcaaaccagctagacccatcacttcttgatgagcttcttacaaatatttcgaccttgtcctctgtgtaccacaaacccccagaggcttttgttacccgcttgaaaacgacagttcagaaaacagaagacgaggactttgcggaaggaagcgaagcaggatactcatctagtaatccggttgatagtgcagcttctcctccaggtaatatcccacagccttccggaagacaaccagcaccagcggtcccagctcctgtacctgatctgctaggtgacctgatgggattggataatgccgctattgtcccggttgatgatcccataactcaatctggtcctcctctgcccgttgtcgtcccagcttcaagtggtcaaggtctgcagataagcgctcaattatcccgaaaagatggacaagtattttacagtatgctcttcgagaacaactcgcagtcggttcttgatggtttcatgattcagttcaacaaaaacacattcggccttgcagctgctggatctcttcagattccgcctttgcatcccgcaacatccgccaggacaatgctacctatggtcttgttccaaaacatgtctgctgggcctccaagctcgctcttacaagtcgctgtcaaaaacaaccagcagcccgtgtggtacttcaccgataagattatacttcatgctcttttcggtgaagacggtagaatggaacgtggaaccttccttgagacatggaggtcgttaccggactcaaatgaagtcctgaaagaattccccgggatcaccatcacgagcgtcgaatcaactatcgaattgctcacagcattcaacatgttctttatagcaaagcgcaagaacgggaaccaagacgtgatctacttatcagccaaagatccacgagatgtaccgtttttgatcgagctcactgcaatggtgggccaaccaggtctcaaatgcgcagtgaaaactcccactcccgagattgcgcctctcttcttcgaagctttggagcttctcttcaaggcttgatgattaacgttgttatcaaaaggctaataagaccaagacctgaaaggtttcagagattctttcttgtttcgttatatcccaccttttttcttcttctgagtttagtgtatgtaataaatcccatgtttgtgttacttccggttgcacccttttagtttggtatttgtaatgctcactattttcttataattcttgtatcggaaccacattttt

SEQ ID NO: 83954 - protein, 894 aa, Arabidopsis thaliana
  peptide (1)..(894): Ceres Seq. ID no. 12672625
  misc_feature (13)..(535): Pfam Name: Adaptin N terminal region Pfam Description: Adaptin N terminal region
  misc_feature (5)..(659): Homolog of NCBI NO: 1703167 NR Description: Adapter-related protein complex 1 beta 1 subunit
  misc_feature (5)..(659): Homolog of NCBI NO: 6671553 NR Description: adaptor protein complex AP-1, beta 1 subunit;
  misc_feature (620)..(893): Homolog of NCBI NO: 1703167 NR Description: Adapter-related protein complex 1 beta 1 subunit
  misc_feature (630)..(893): Homolog of NCBI NO: 6671553 NR Description: adaptor protein complex AP-1, beta 1 subunit;
  misc_feature (5)..(659): Homolog of NCBI NO: 22027651 NR Description: adaptor-related protein complex 1 beta 1 subunit
  misc_feature (620)..(893): Homolog of NCBI NO: 22027651 NR Description: adaptor-related protein complex 1 beta 1 subunit
  misc_feature (6)..(583): Homolog of NCBI NO: 19113227 NR Description: putative beta-adaptin [Schizosaccharomyces pombe]
  misc_feature (255)..(663): Homolog of NCBI NO: 37546242 NR Description: similar to adaptor-related protein complex 2,
  misc_feature (630)..(893): Homolog of NCBI NO: 37546242 NR Description: similar to adaptor-related protein complex 2,
  misc_feature (14)..(578): Homolog of NCBI NO: 6322714 NR Description: Beta-adaptin, large subunit of the
MSGHDSKYFSTTKKGEIPELKEELNSQYKDKRKDAVKKVIAAMTVGKDVSSLFTDVVNCMQTENLELKKLVYLYLINYAKSQPDLAILAVNTFVKDSQDPNPLIRALAVRTMGCIRVDKITEYLCDPLQKCLKDDDPYVRKTAAICVAKLFDINAELVEDRGFLEALKDLISDNNPMVVANAVAALAEIQENSSSPIFEINSTTLTKLLTALNECTEWGQVFILDALSKYKAADPREAENIVERVTPRLQHANCAVVLSAVKMILQQMELITSTDVIRNLCKKMAPPLVTLLSAEPEIQYVALRNINLIVQKRPTILAHEIKVFFCKYNDPIYVKMEKLEIMIKLASDRNIDQVLLEFKEYATEVDVDFVRKAVRAIGRCAIKLERAAERCISVLLELIKIKVNYVVQEAIIVIKDIFRRYPNTYESIIATLCESLDTLDEPEAKASMIWIIGEYAERIDNADELLESFLENFPEEPAQVQLQLLTATVKLFLKKPTEGPQQMIQVVLNNATVETDNPDLRDRAYIYWRLLSTDPEAAKDVVLAEKPVISDDSNQLDPSLLDELLTNISTLSSVYHKPPEAFVTRLKTTVQKTEDEDFAEGSEAGYSSSNPVDSAASPPGNIPQPSGRQPAPAVPAPVPDLLGDLMGLDNAAIVPVDDPITQSGPPLPVVVPASSGQGLQISAQLSRKDGQVFYSMLFENNSQSVLDGFMIQFNKNTFGLAAAGSLQIPPLHPATSARTMLPMVLFQNMSAGPPSSLLQVAVKNNQQPVWYFTDKIILHALFGEDGRMERGTFLETWRSLPDSNEVLKEFPGITITSVESTIELLTAFNMFFIAKRKNGNQDVIYLSAKDPRDVPFLIELTAMVGQPGLKCAVKTPTPEIAPLFFEALELLFKA

SEQ ID NO: 83955 - protein, 852 aa, Arabidopsis thaliana
  peptide (1)..(852): Ceres Seq. ID no. 12672626
  misc_feature (1)..(493): Pfam Name: Adaptin N terminal region Pfam Description: Adaptin N terminal region
  misc_feature (1)..(617): Homolog of NCBI NO: 1703167 NR Description: Adapter-related protein complex 1 beta 1 subunit
  misc_feature (1)..(617): Homolog of NCBI NO: 6671553 NR Description: adaptor protein complex AP-1, beta 1 subunit;
  misc_feature (578)..(851): Homolog of NCBI NO: 1703167 NR Description: Adapter-related protein complex 1 beta 1 subunit
  misc_feature (588)..(851): Homolog of NCBI NO: 6671553 NR Description: adaptor protein complex AP-1, beta 1 subunit;
  misc_feature (1)..(617): Homolog of NCBI NO: 22027651 NR Description: adaptor-related protein complex 1 beta 1 subunit
  misc_feature (578)..(851): Homolog of NCBI NO: 22027651 NR Description: adaptor-related protein complex 1 beta 1 subunit
  misc_feature (1)..(541): Homolog of NCBI NO: 19113227 NR Description: putative beta-adaptin [Schizosaccharomyces pombe]
  misc_feature (213)..(621): Homolog of NCBI NO: 37546242 NR Description: similar to adaptor-related protein complex 2,
  misc_feature (588)..(851): Homolog of NCBI NO: 37546242 NR Description: similar to adaptor-related protein complex 2,
  misc_feature (1)..(536): Homolog of NCBI NO: 6322714 NR Description: Beta-adaptin, large subunit of the
MTVGKDVSSLFTDVVNCMQTENLELKKLVYLYLINYAKSQPDLAILAVNTFVKDSQDPNPLIRALAVRTMGCIRVDKITEYLCDPLQKCLKDDDPYVRKTAAICVAKLFDINAELVEDRGFLEALKDLISDNNPMVVANAVAALAEIQENSSSPIFEINSTTLTKLLTALNECTEWGQVFILDALSKYKAADPREAENIVERVTPRLQHANCAVVLSAVKMILQQMELITSTDVIRNLCKKMAPPLVTLLSAEPEIQYVALRNINLIVQKRPTILAHEIKVFFCKYNDPIYVKMEKLEIMIKLASDRNIDQVLLEFKEYATEVDVDFVRKAVRAIGRCAIKLERAAERCISVLLELIKIKVNYVVQEAIIVIKDIFRRYPNTYESIIATLCESLDTLDEPEAKASMIWIIGEYAERIDNADELLESFLENFPEEPAQVQLQLLTATVKLFLKKPTEGPQQMIQVVLNNATVETDNPDLRDRAYIYWRLLSTDPEAAKDVVLAEKPVISDDSNQLDPSLLDELLTNISTLSSVYHKPPEAFVTRLKTTVQKTEDEDFAEGSEAGYSSSNPVDSAASPPGNIPQPSGRQPAPAVPAPVPDLLGDLMGLDNAAIVPVDDPITQSGPPLPVVVPASSGQGLQISAQLSRKDGQVFYSMLFENNSQSVLDGFMIQFNKNTFGLAAAGSLQIPPLHPATSARTMLPMVLFQNMSAGPPSSLLQVAVKNNQQPVWYFTDKIILHALFGEDGRMERGTFLETWRSLPDSNEVLKEFPGITITSVESTIELLTAFNMFFIAKRKNGNQDVIYLSAKDPRDVPFLIELTAMVGQPGLKCAVKTPTPEIAPLFFEALELLFKA

SEQ ID NO: 83956 - protein, 835 aa, Arabidopsis thaliana
  peptide (1)..(835): Ceres Seq. ID no. 12672627
  misc_feature (1)..(476): Pfam Name: Adaptin N terminal region Pfam Description: Adaptin N terminal region
  misc_feature (1)..(600): Homolog of NCBI NO: 1703167 NR Description: Adapter-related protein complex 1 beta 1 subunit
  misc_feature (1)..(600): Homolog of NCBI NO: 6671553 NR Description: adaptor protein complex AP-1, beta 1 subunit;
  misc_feature (561)..(834): Homolog of NCBI NO: 1703167 NR Description: Adapter-related protein complex 1 beta 1 subunit
  misc_feature (571)..(834): Homolog of NCBI NO: 6671553 NR Description: adaptor protein complex AP-1, beta 1 subunit;
  misc_feature (1)..(600): Homolog of NCBI NO: 22027651 NR Description: adaptor-related protein complex 1 beta 1 subunit
  misc_feature (561)..(834): Homolog of NCBI NO: 22027651 NR Description: adaptor-related protein complex 1 beta 1 subunit
  misc_feature (1)..(524): Homolog of NCBI NO: 19113227 NR Description: putative beta-adaptin [Schizosaccharomyces pombe]
  misc_feature (196)..(604): Homolog of NCBI NO: 37546242 NR Description: similar to adaptor-related protein complex 2,
  misc_feature (571)..(834): Homolog of NCBI NO: 37546242 NR Description: similar to adaptor-related protein complex 2,
  misc_feature (1)..(519): Homolog of NCBI NO: 6322714 NR Description: Beta-adaptin, large subunit of the
MQTENLELKKLVYLYLINYAKSQPDLAILAVNTFVKDSQDPNPLIRALAVRTMGCIRVDKITEYLCDPLQKCLKDDDPYVRKTAAICVAKLFDINAELVEDRGFLEALKDLISDNNPMVVANAVAALAEIQENSSSPIFEINSTTLTKLLTALNECTEWGQVFILDALSKYKAADPREAENIVERVTPRLQHANCAVVLSAVKMILQQMELITSTDVIRNLCKKMAPPLVTLLSAEPEIQYVALRNINLIVQKRPTILAHEIKVFFCKYNDPIYVKMEKLEIMIKLASDRNIDQVLLEFKEYATEVDVDFVRKAVRAIGRCAIKLERAAERCISVLLELIKIKVNYVVQEAIIVIKDIFRRYPNTYESIIATLCESLDTLDEPEAKASMIWIIGEYAERIDNADELLESFLENFPEEPAQVQLQLLTATVKLFLKKPTEGPQQMIQVVLNNATVETDNPDLRDRAYIYWRLLSTDPEAAKDVVLAEKPVISDDSNQLDPSLLDELLTNISTLSSVYHKPPEAFVTRLKTTVQKTEDEDFAEGSEAGYSSSNPVDSAASPPGNIPQPSGRQPAPAVPAPVPDLLGDLMGLDNAAIVPVDDPITQSGPPLPVVVPASSGQGLQISAQLSRKDGQVFYSMLFENNSQSVLDGFMIQFNKNTFGLAAAGSLQIPPLHPATSARTMLPMVLFQNMSAGPPSSLLQVAVKNNQQPVWYFTDKIILHALFGEDGRMERGTFLETWRSLPDSNEVLKEFPGITITSVESTIELLTAFNMFFIAKRKNGNQDVIYLSAKDPRDVPFLIELTAMVGQPGLKCAVKTPTPEIAPLFFEALELLFKA

SEQ ID NO: 83957 - DNA, 1961 bp, Arabidopsis thaliana
  misc_feature (1)..(1961): Ceres Seq. ID no. 12672628
  misc_feature: MA Experiment ID: 20000171 Result: Up-regulated in Transcription
  misc_feature: MA Experiment 20000171 PARAMETER Experiment Name: At_42deg_Heat_P Parameter: Age (day) Value: 14
  misc_feature: MA Experiment 20000171 PARAMETER Experiment Name: At_42deg_Heat_P Parameter: Organism Value: A. thaliana
  misc_feature: MA Experiment 20000171 PARAMETER Experiment Name: At_42deg_Heat_P Parameter: Plant Line Value: WS
  misc_feature: MA Experiment 20000171 PARAMETER Experiment Name: At_42deg_Heat_P Parameter: Temperature (deg C) Value: 42 vs. 22
  misc_feature: MA Experiment 20000171 PARAMETER Experiment Name: At_42deg_Heat_P Parameter: Timepoint (hr) Value: 1
  misc_feature: MA Experiment 20000171 PARAMETER Experiment Name: At_42deg_Heat_P Parameter: Tissue Value: Aerial
  misc_feature: MA Experiment ID: 20000173 Result: Up-regulated in Transcription
  misc_feature: MA Experiment 20000173 PARAMETER Experiment Name: At_42deg_Heat_P Parameter: Age (day) Value: 14
  misc_feature: MA Experiment 20000173 PARAMETER Experiment Name: At_42deg_Heat_P Parameter: Organism Value: A. thaliana
  misc_feature: MA Experiment 20000173 PARAMETER Experiment Name: At_42deg_Heat_P Parameter: Plant Line Value: WS
  misc_feature: MA Experiment 20000173 PARAMETER Experiment Name: At_42deg_Heat_P Parameter: Temperature (deg C) Value: 42 vs. 22
  misc_feature: MA Experiment 20000173 PARAMETER Experiment Name: At_42deg_Heat_P Parameter: Timepoint (hr) Value: 6
  misc_feature: MA Experiment 20000173 PARAMETER Experiment Name: At_42deg_Heat_P Parameter: Tissue Value: Aerial
  misc_feature: MA Experiment ID: 20000179 Result: Up-regulated in Transcription
  misc_feature: MA Experiment 20000179 PARAMETER Experiment Name: At_Germinating_Seeds_P Parameter: Age (hr) Value: 6 vs. 0
  misc_feature: MA Experiment 20000179 PARAMETER Experiment Name: At_Germinating_Seeds_P Parameter: Tissue Value: Germinating Seeds
  misc_feature: MA Experiment ID: 20000436 Result: Up-regulated in Transcription
  misc_feature: MA Experiment 20000436 PARAMETER Experiment Name: At_Drought_P Parameter: Age (day) Value: 7
  misc_feature: MA Experiment 20000436 PARAMETER Experiment Name: At_Drought_P Parameter: Organism Value: A. thaliana
  misc_feature: MA Experiment 20000436 PARAMETER Experiment Name: At_Drought_P Parameter: Plant Line Value: WS
  misc_feature: MA Experiment 20000436 PARAMETER Experiment Name: At_Drought_P Parameter: Timepoint (hr) Value: 12
  misc_feature: MA Experiment 20000436 PARAMETER Experiment Name: At_Drought_P Parameter: Tissue Value: Whole Plant
  misc_feature: MA Experiment 20000436 PARAMETER Experiment Name: At_Drought_P Parameter: Treatment Value: Drought vs. No Drought
  misc_feature: MA Experiment ID: 20000437 Result: Up-regulated in Transcription
  misc_feature: MA Experiment 20000437 PARAMETER Experiment Name: At_Drought_P Parameter: Age (day) Value: 8
  misc_feature: MA Experiment 20000437 PARAMETER Experiment Name: At_Drought_P Parameter: Organism Value: A. thaliana
  misc_feature: MA Experiment 20000437 PARAMETER Experiment Name: At_Drought_P Parameter: Plant Line Value: WS
  misc_feature: MA Experiment 20000437 PARAMETER Experiment Name: At_Drought_P Parameter: Timepoint (hr) Value: 24
  misc_feature: MA Experiment 20000437 PARAMETER Experiment Name: At_Drought_P Parameter: Tissue Value: Whole Plant
  misc_feature: MA Experiment 20000437 PARAMETER Experiment Name: At_Drought_P Parameter: Treatment Value: Drought vs. No Drought
  misc_feature: MA Experiment ID: 20000443 Result: Up-regulated in Transcription
  misc_feature: MA Experiment 20000443 PARAMETER Experiment Name: At_1uM_BR-BRZ__P Parameter: Tissue Value: Shoot Apices
  misc_feature: MA Experiment 20000443 PARAMETER Experiment Name: At_1uM_BR-BRZ__P Parameter: Treatment Value: 1uM BRZ vs. No Treatment
  misc_feature: MA Experiment ID: 20000495 Result: Down-regulated in Transcription
  misc_feature: MA Experiment 20000495 PARAMETER Experiment Name: At_Guard_Cells_P Parameter: Harvest Date Value: 8/2/2002
  misc_feature: MA Experiment 20000495 PARAMETER Experiment Name: At_Guard_Cells_P Parameter: Organism Value: A. thaliana
  misc_feature: MA Experiment 20000495 PARAMETER Experiment Name: At_Guard_Cells_P Parameter: Tissue Value: Guard Cells vs. Leaves
  misc_feature: MA Experiment ID: 20001248 Result: Down-regulated in Transcription
  misc_feature: MA Experiment 20001248 PARAMETER Experiment Name: At_Far-red-induction_P Parameter: Age (day) Value: 7
  misc_feature: MA Experiment 20001248 PARAMETER Experiment Name: At_Far-red-induction_P Parameter: Light Value: Far-red vs. White
  misc_feature: MA Experiment 20001248 PARAMETER Experiment Name: At_Far-red-induction_P Parameter: Organism Value: A. thaliana
  misc_feature: MA Experiment 20001248 PARAMETER Experiment Name: At_Far-red-induction_P Parameter: Plant Line Value: Columbia
  misc_feature: MA Experiment 20001248 PARAMETER Experiment Name: At_Far-red-induction_P Parameter: Timepoint (hr) Value: 4
  misc_feature: MA Experiment 20001248 PARAMETER Experiment Name: At_Far-red-induction_P Parameter: Tissue Value: Whole Plant
  misc_feature: MA Experiment ID: 20001450 Result: Down-regulated in Transcription
  misc_feature: MA Experiment 20001450 PARAMETER Experiment Name: At_Far-red-induction_P Parameter: Age (day) Value: 7
  misc_feature: MA Experiment 20001450 PARAMETER Experiment Name: At_Far-red-induction_P Parameter: Light Value: Far-red vs. White
  misc_feature: MA Experiment 20001450 PARAMETER Experiment Name: At_Far-red-induction_P Parameter: Organism Value: A. thaliana
  misc_feature: MA Experiment 20001450 PARAMETER Experiment Name: At_Far-red-induction_P Parameter: Plant Line Value: Columbia
  misc_feature: MA Experiment 20001450 PARAMETER Experiment Name: At_Far-red-induction_P Parameter: Timepoint (hr) Value: 8
  misc_feature: MA Experiment 20001450 PARAMETER Experiment Name: At_Far-red-induction_P Parameter: Tissue Value: Whole Plant
  misc_feature: MA Experiment ID: 20001774 Result: Down-regulated in Transcription
  misc_feature: MA Experiment 20001774 PARAMETER Experiment Name: At_Far-red-enriched-adult_P Parameter: Age (day) Value: 31
  misc_feature: MA Experiment 20001774 PARAMETER Experiment Name: At_Far-red-enriched-adult_P Parameter: Light Value: Far-red enriched vs. White
  misc_feature: MA Experiment 20001774 PARAMETER Experiment Name: At_Far-red-enriched-adult_P Parameter: Organism Value: A. thaliana
  misc_feature: MA Experiment 20001774 PARAMETER Experiment Name: At_Far-red-enriched-adult_P Parameter: Plant Line Value: Columbia
  misc_feature: MA Experiment 20001774 PARAMETER Experiment Name: At_Far-red-enriched-adult_P Parameter: Timepoint (hr) Value: 72
  misc_feature: MA Experiment 20001774 PARAMETER Experiment Name: At_Far-red-enriched-adult_P Parameter: Tissue Value: Aerial
  misc_feature: MA Experiment ID: 20001905 Result: Up-regulated in Transcription
  misc_feature: MA Experiment 20001905 PARAMETER Experiment Name: At_Drought_Reproduction_P Parameter: Age (day) Value: 40
  misc_feature: MA Experiment 20001905 PARAMETER Experiment Name: At_Drought_Reproduction_P Parameter: Organism Value: A. thaliana
  misc_feature: MA Experiment 20001905 PARAMETER Experiment Name: At_Drought_Reproduction_P Parameter: Plant Line Value: WS
  misc_feature: MA Experiment 20001905 PARAMETER Experiment Name: At_Drought_Reproduction_P Parameter: Timepoint (day) Value: 10
  misc_feature: MA Experiment 20001905 PARAMETER Experiment Name: At_Drought_Reproduction_P Parameter: Tissue Value: Rosettes
  misc_feature: MA Experiment 20001905 PARAMETER Experiment Name: At_Drought_Reproduction_P Parameter: Treatment Value: Drought vs. No Drought
  misc_feature: MA Experiment ID: 20001911 Result: Up-regulated in Transcription
  misc_feature: MA Experiment 20001911 PARAMETER Experiment Name: At_Drought_Reproduction_P Parameter: Age (day) Value: 40
  misc_feature: MA Experiment 20001911 PARAMETER Experiment Name: At_Drought_Reproduction_P Parameter: Organism Value: A. thaliana
  misc_feature: MA Experiment 20001911 PARAMETER Experiment Name: At_Drought_Reproduction_P Parameter: Plant Line Value: WS
  misc_feature: MA Experiment 20001911 PARAMETER Experiment Name: At_Drought_Reproduction_P Parameter: Timepoint (day) Value: 10
  misc_feature: MA Experiment 20001911 PARAMETER Experiment Name: At_Drought_Reproduction_P Parameter: Tissue Value: Flowers
  misc_feature: MA Experiment 20001911 PARAMETER Experiment Name: At_Drought_Reproduction_P Parameter: Treatment Value: Drought vs. No Drought
atcaatacgttcctctcagaacattctggaacttcacaacataatctctctctctctctatctctagcttcgtgatcatcgtgtgtctctgtgttcaatctggattgtgacaatctctttctttcttggttggtgtagattacgtcaagagagagatagagaagtttttggatttggttctaatgggtctgtgatagacgtttcctttctcttctctgtctagtttctgttttgagatctctatgtttccaactttcttcaaagctcattcccattggtagatttcatcattatcttaatttgggtattgggattaaggaaagtttagatttttgatctataactcatgccgggggaacaaaccggagaaactccgacggtggccggagttggcggcggtggagctggttgtagcgccgggaatagtggtggaagtagtggatgtggtgctggtggtggcggtggtggtagtggtggaggtggtggcggaggaggagattcacagaggtcaattccgacgccgtttttgacgaaaacgtatcagcttgtggaagatccggtttacgacgaattgatctcgtggaacgaagatggaaccacttttattgtgtggcgaccagctgaattcgctagagatcttcttcccaaatacttcaaacataataacttctcgagttttgttcgtcagctcaatacttacggatttcgaaaagtagttccagatcgttgggagttttctaatgattgttttaagagaggtgagaagattctgcttcgggatattcaacggcggaaaatctctcagcctgctatggccgcggctgctgcagcggcggcggcagccgtagcggcttcggctgttacagtagcagctgttcctgttgtagctcatattgtttctccatcgaactctggagaagaacaggttatatcgtctaattcttcgcctgcggctgctgctgctgctataggaggagtggttggtggtggttctttgcagaggacaacgagctgcaccactgcaccagagctggttgaggagaatgagcgattgaggaaagataatgagcgattgaggaaagagatgacaaagcttaaaggattgtatgcgaatatctacacattaatggcgaatttcacaccgggtcaagaagattgtgcgcatttgttacctgaagggaaacctttagatcttttaccggagagacaagagatgagtgaagccattatggcttctgaaatagagacagggattggtctgaaacttggtgaggatttgactccaaggttgtttggggtttctattggggtcaagcgagctagaagagaagaagaattgggtgctgcagaggaagaagatgatgatagacgagaagctgctgcccaagagggagaacaaagttctgatgttaaggcagagccaatggaggagaataactccggtaaccataatgggtcgtggcttgaactcggaaaatgaaaaacacttgccgattcagaggcattgttgaatatgcaagaaactgttactgatccccattgcataggcaagccattgcgctgtcccggacggaaaatggggatgtgttcggtcataagaggacagatgttcattgagttggggtagtacaaaagtatctaaaaacactgattctaccatcctgagttgttcctgatttcagatgttgcctcctgaatcttcttcttgatggaactgaaactattctggcttgctgtgctccagtgagtggatgtgcttctcacgatttcggataaagcaggcagattcaatgttacatcttcatattctgcaacaaatagcaggaatcaatggtttttaagagttatggcaatgttgatacagaatcatttcttttgagttcaaaacaattgtagctctctgacttgtaatgatcttaatgaaatttatctctcttatttaaagatggtccaagttctct

SEQ ID NO: 83958 - protein, 377 aa, Arabidopsis thaliana
  peptide (1)..(377): Ceres Seq. ID no. 12672629
  misc_feature (58)..(275): Pfam Name: HSF-type DNA-binding Pfam Description: HSF-type DNA-binding
  misc_feature (1)..(377): Homolog of NCBI NO: 15234264 NR Description: heat shock transcription factor - like protein; id: At4g11660.1, supported by cDNA: gi_20260613 [Arabidopsis >gi|12643858|sp|Q9T0D3|HSF7_ARATH Heat shock factor protein 7
  misc_feature (51)..(377): Homolog of NCBI NO: 6624618 NR Description: heat shock factor 7 [Arabidopsis thaliana]
MPGEQTGETPTVAGVGGGGAGCSAGNSGGSSGCGAGGGGGGSGGGGGGGGDSQRSIPTPFLTKTYQLVEDPVYDELISWNEDGTTFIVWRPAEFARDLLPKYFKHNNFSSFVRQLNTYGFRKVVPDRWEFSNDCFKRGEKILLRDIQRRKISQPAMAAAAAAAAAAVAASAVTVAAVPVVAHIVSPSNSGEEQVISSNSSPAAAAAAIGGVVGGGSLQRTTSCTTAPELVEENERLRKDNERLRKEMTKLKGLYANIYTLMANFTPGQEDCAHLLPEGKPLDLLPERQEMSEAIMASEIETGIGLKLGEDLTPRLFGVSIGVKRARREEELGAAEEEDDDRREAAAQEGEQSSDVKAEPMEENNSGNHNGSWLELGK

SEQ ID NO: 83959 - protein, 222 aa, Arabidopsis thaliana
  peptide (1)..(222): Ceres Seq. ID no. 12672630
  misc_feature (1)..(120): Pfam Name: HSF-type DNA-binding Pfam Description: HSF-type DNA-binding
  misc_feature (1)..(222): Homolog of NCBI NO: 15234264 NR Description: heat shock transcription factor - like protein; id: At4g11660.1, supported by cDNA: gi_20260613 [Arabidopsis >gi|12643858|sp|Q9T0D3|HSF7_ARATH Heat shock factor protein 7
  misc_feature (1)..(222): Homolog of NCBI NO: 6624618 NR Description: heat shock factor 7 [Arabidopsis thaliana]
MAAAAAAAAAAVAASAVTVAAVPVVAHIVSPSNSGEEQVISSNSSPAAAAAAIGGVVGGGSLQRTTSCTTAPELVEENERLRKDNERLRKEMTKLKGLYANIYTLMANFTPGQEDCAHLLPEGKPLDLLPERQEMSEAIMASEIETGIGLKLGEDLTPRLFGVSIGVKRARREEELGAAEEEDDDRREAAAQEGEQSSDVKAEPMEENNSGNHNGSWLELGK

SEQ ID NO: 83960 - DNA, 1483 bp, Arabidopsis thaliana
  misc_feature (1)..(1483): Ceres Seq. ID no. 12672634
  misc_feature: MA Experiment ID: 20000171 Result: Up-regulated in Transcription
  misc_feature: MA Experiment 20000171 PARAMETER Experiment Name: At_42deg_Heat_P Parameter: Age (day) Value: 14
  misc_feature: MA Experiment 20000171 PARAMETER Experiment Name: At_42deg_Heat_P Parameter: Organism Value: A. thaliana
  misc_feature: MA Experiment 20000171 PARAMETER Experiment Name: At_42deg_Heat_P Parameter: Plant Line Value: WS
  misc_feature: MA Experiment 20000171 PARAMETER Experiment Name: At_42deg_Heat_P Parameter: Temperature (deg C) Value: 42 vs. 22
  misc_feature: MA Experiment 20000171 PARAMETER Experiment Name: At_42deg_Heat_P Parameter: Timepoint (hr) Value: 1
  misc_feature: MA Experiment 20000171 PARAMETER Experiment Name: At_42deg_Heat_P Parameter: Tissue Value: Aerial
  misc_feature: MA Experiment ID: 20000179 Result: Down-regulated in Transcription
  misc_feature: MA Experiment 20000179 PARAMETER Experiment Name: At_Germinating_Seeds_P Parameter: Age (hr) Value: 6 vs. 0
  misc_feature: MA Experiment 20000179 PARAMETER Experiment Name: At_Germinating_Seeds_P Parameter: Tissue Value: Germinating Seeds
  misc_feature: MA Experiment ID: 20000180 Result: Down-regulated in Transcription
  misc_feature: MA Experiment 20000180 PARAMETER Experiment Name: At_Germinating_Seeds_P Parameter: Age (hr) Value: 24 vs. 0
  misc_feature: MA Experiment 20000180 PARAMETER Experiment Name: At_Germinating_Seeds_P Parameter: Tissue Value: Germinating Seeds
  misc_feature: MA Experiment ID: 20000794 Result: Up-regulated in Transcription
  misc_feature: MA Experiment 20000794 PARAMETER Experiment Name: At_Petals_P Parameter: Age (day) Value: 23-25 days
  misc_feature: MA Experiment 20000794 PARAMETER Experiment Name: At_Petals_P Parameter: Plant Line Value: WS
  misc_feature: MA Experiment 20000794 PARAMETER Experiment Name: At_Petals_P Parameter: Tissue Value: Petals vs. Whole plant
aggttaaggatagcagtgggccatctggacgatctagtgatgctcctactattgaagatgtgacagaaacagctcatgttcagggtccagtaactacccaaggaactgttattattgatgaagagagtgatgatgatattccttttgcaccaatgggacgaagtaggcaagacagacctgctggttctgtagccaataataataatcaagattacaatgatatagaagaagaaatgatcagagctgccattgaggcctcaaagaaagaggctgagggatcaagtaaccctttacttgaagagaggccacttcacatggaagatgatgatgacatagcaatagctgttacaatgtcattgaagtcagcggaggaagaagttttgcgcagtcaagggtataaggcctcaacctcggaaataggagcttctgcagtgactgctgctcaaggacctcaggatacccaggccctgaacggaagattggcagcacctagttcaccatttgatgatgactctgatgatgttgatgagcaacctcttgttagacacaggccaagacgtgcagcatccggatctctggctccacctaacgctgatcgttcccggagtgggagtcctgaagaagaacatgcaagtattaatccagcggagcgtggcagtgggtttccttctgagtggggaggcatttcatctgaggaacatgatgaagctgtcatgctcgaggcagccatgtttggtggcattcctgaaactggatataatcatcttccattcttacctcctcagccgagggcccaaccacgtccaccctcaccttcgctgacagctcagaggttgatacgggaacagcaggatgatgagtatgttgcgtccctgcaagctgaccgagataaagaaatgaagtccattagagatgctgaggcacgtcagctagaggaagaaactgcgagaaaggcttttctggaggaagaaaagaaaaaagaggaagaagctcaaagaaaactcgaggaggaacaggagctagaaagacaactagatgcaaaagaagcgtctttacctaaggagcctcaagctgatgaagagaatgccattacccttctaatccggatgccggatggaacacgtcggggccgccggttccttaaatctgacaaactccaaacccttttcaactttatagacattgccagagtggtgaaacccaacacttacagactggtgaggccatatccgaggcatgcgtttggagatggggaaagtgagtcgaccttaaacgatcttggattgaccagcaaacaagaagcattgttccttgagcttatctagttttaagctcttaaatatataagaagaattacatttgtcttctgcttagaaaactctttaattttcaagttattttttttatctttctttatacaaaagaaaaagtatttgttgagggtggaggattatatggtttataaaaccgtcgtcgtttagtc

SEQ ID NO: 83961 - protein, 440 aa, Arabidopsis thaliana
  peptide (1)..(440): Ceres Seq. ID no. 12672635
  misc_feature (357)..(439): Pfam Name: UBX domain Pfam Description: UBX domain
  misc_feature (1)..(440): Homolog of NCBI NO: 7487672 NR Description: hypothetical protein T5C23.170 - Arabidopsis >gi|4539465|emb|CAB39945.1| putative protein [Arabidopsis >gi|7267874|emb|CAB78217.1| putative protein [Arabidopsis
  misc_feature (51)..(440): Homolog of NCBI NO: 18413644 NR Description: putative protein; protein id: At4g11740.1, by cDNA: gi_14596000, supported by cDNA: gi_17978734 [Arabidopsis >gi|14596001|gb|AAK68728.1| Unknown protein [Arabidopsis
  misc_feature (1)..(338): Homolog of NCBI NO: 13160609 NR Description: Ara4-interacting protein [Arabidopsis thaliana]
  misc_feature (1)..(440): Homolog of NCBI NO: 7486575 NR Description: hypothetical protein F7H19.230 - Arabidopsis >gi|3292830|emb|CAA19820.1| putative protein [Arabidopsis >gi|7269151|emb|CAB79259.1| putative protein [Arabidopsis
  misc_feature (105)..(440): Homolog of NCBI NO: 18416058 NR Description: putative protein; protein id: At4g23040.1, by cDNA: gi_13430703 [Arabidopsis thaliana] unknown protein [Arabidopsis thaliana]
  misc_feature (1)..(348): Homolog of NCBI NO: 18416058 NR Description: putative protein; protein id: At4g23040.1, by cDNA: gi_13430703 [Arabidopsis thaliana] unknown protein [Arabidopsis thaliana]
  misc_feature (324)..(440): Homolog of NCBI NO: 30678726 NR Description: expressed protein [Arabidopsis thaliana]
  misc_feature (279)..(439): Homolog of NCBI NO: 7486906 NR Description: hypothetical protein T12H20.9 - Arabidopsis >gi|3600032|gb|AAC35520.1| contains similarity to tropomyosin
  misc_feature (279)..(439): Homolog of NCBI NO: 15236931 NR Description: hypothetical protein; protein id: At4g10790.1
  misc_feature (273)..(439): Homolog of NCBI NO: 37536146 NR Description: unknown protein [Oryza sativa (japonica
VKDSSGPSGRSSDAPTIEDVTETAHVQGPVTTQGTVIIDEESDDDIPFAPMGRSRQDRPAGSVANNNNQDYNDIEEEMIRAAIEASKKEAEGSSNPLLEERPLHMEDDDDIAIAVTMSLKSAEEEVLRSQGYKASTSEIGASAVTAAQGPQDTQALNGRLAAPSSPFDDDSDDVDEQPLVRHRPRRAASGSLAPPNADRSRSGSPEEEHASINPAERGSGFPSEWGGISSEEHDEAVMLEAAMFGGIPETGYNHLPFLPPQPRAQPRPPSPSLTAQRLIREQQDDEYVASLQADRDKEMKSIRDAEARQLEEETARKAFLEEEKKKEEEAQRKLEEEQELERQLDAKEASLPKEPQADEENAITLLIRMPDGTRRGRRFLKSDKLQTLFNFIDIARVVKPNTYRLVRPYPRHAFGDGESESTLNDLGLTSKQEALFLELI

SEQ ID NO: 83962 - protein, 390 aa, Arabidopsis thaliana
  peptide (1)..(390): Ceres Seq. ID no. 12672636
  misc_feature (307)..(389): Pfam Name: UBX domain Pfam Description: UBX domain
  misc_feature (1)..(390): Homolog of NCBI NO: 7487672 NR Description: hypothetical protein T5C23.170 - Arabidopsis >gi|4539465|emb|CAB39945.1| putative protein [Arabidopsis >gi|7267874|emb|CAB78217.1| putative protein [Arabidopsis
  misc_feature (1)..(390): Homolog of NCBI NO: 18413644 NR Description: putative protein; protein id: At4g11740.1, by cDNA: gi_14596000, supported by cDNA: gi_17978734 [Arabidopsis >gi|14596001|gb|AAK68728.1| Unknown protein [Arabidopsis
  misc_feature (1)..(288): Homolog of NCBI NO: 13160609 NR Description: Ara4-interacting protein [Arabidopsis thaliana]
  misc_feature (1)..(390): Homolog of NCBI NO: 7486575 NR Description: hypothetical protein F7H19.230 - Arabidopsis >gi|3292830|emb|CAA19820.1| putative protein [Arabidopsis >gi|7269151|emb|CAB79259.1| putative protein [Arabidopsis
  misc_feature (55)..(390): Homolog of NCBI NO: 18416058 NR Description: putative protein; protein id: At4g23040.1, by cDNA: gi_13430703 [Arabidopsis thaliana] unknown protein [Arabidopsis thaliana]
  misc_feature (1)..(298): Homolog of NCBI NO: 18416058 NR Description: putative protein; protein id: At4g23040.1, by cDNA: gi_13430703 [Arabidopsis thaliana] unknown protein [Arabidopsis thaliana]
  misc_feature (274)..(390): Homolog of NCBI NO: 30678726 NR Description: expressed protein [Arabidopsis thaliana]
  misc_feature (229)..(389): Homolog of NCBI NO: 7486906 NR Description: hypothetical protein T12H20.9 - Arabidopsis >gi|3600032|gb|AAC35520.1| contains similarity to tropomyosin
  misc_feature (229)..(389): Homolog of NCBI NO: 15236931 NR Description: hypothetical protein; protein id: At4g10790.1
  misc_feature (223)..(389): Homolog of NCBI NO: 37536146 NR Description: unknown protein [Oryza sativa (japonica
MGRSRQDRPAGSVANNNNQDYNDIEEEMIRAAIEASKKEAEGSSNPLLEERPLHMEDDDDIAIAVTMSLKSAEEEVLRSQGYKASTSEIGASAVTAAQGPQDTQALNGRLAAPSSPFDDDSDDVDEQPLVRHRPRRAASGSLAPPNADRSRSGSPEEEHASINPAERGSGFPSEWGGISSEEHDEAVMLEAAMFGGIPETGYNHLPFLPPQPRAQPRPPSPSLTAQRLIREQQDDEYVASLQADRDKEMKSIRDAEARQLEEETARKAFLEEEKKKEEEAQRKLEEEQELERQLDAKEASLPKEPQADEENAITLLIRMPDGTRRGRRFLKSDKLQTLFNFIDIARVVKPNTYRLVRPYPRHAFGDGESESTLNDLGLTSKQEALFLELI

SEQ ID NO: 83963 - protein, 363 aa, Arabidopsis thaliana
  peptide (1)..(363): Ceres Seq. ID no. 12672637
  misc_feature (280)..(362): Pfam Name: UBX domain Pfam Description: UBX domain
  misc_feature (1)..(363): Homolog of NCBI NO: 7487672 NR Description: hypothetical protein T5C23.170 - Arabidopsis >gi|4539465|emb|CAB39945.1| putative protein [Arabidopsis >gi|7267874|emb|CAB78217.1| putative protein [Arabidopsis
  misc_feature (1)..(363): Homolog of NCBI NO: 18413644 NR Description: putative protein; protein id: At4g11740.1, by cDNA: gi_14596000, supported by cDNA: gi_17978734 [Arabidopsis >gi|14596001|gb|AAK68728.1| Unknown protein [Arabidopsis
  misc_feature (1)..(261): Homolog of NCBI NO: 13160609 NR Description: Ara4-interacting protein [Arabidopsis thaliana]
  misc_feature (1)..(363): Homolog of NCBI NO: 7486575 NR Description: hypothetical protein F7H19.230 - Arabidopsis >gi|3292830|emb|CAA19820.1| putative protein [Arabidopsis >gi|7269151|emb|CAB79259.1| putative protein [Arabidopsis
  misc_feature (28)..(363): Homolog of NCBI NO: 18416058 NR Description: putative protein; protein id: At4g23040.1, by cDNA: gi_13430703 [Arabidopsis thaliana] unknown protein [Arabidopsis thaliana]
  misc_feature (1)..(271): Homolog of NCBI NO: 18416058 NR Description: putative protein; protein id: At4g23040.1, by cDNA: gi_13430703 [Arabidopsis thaliana] unknown protein [Arabidopsis thaliana]
  misc_feature (247)..(363): Homolog of NCBI NO: 30678726 NR Description: expressed protein [Arabidopsis thaliana]
  misc_feature (202)..(362): Homolog of NCBI NO: 7486906 NR Description: hypothetical protein T12H20.9 - Arabidopsis >gi|3600032|gb|AAC35520.1| contains similarity to tropomyosin
  misc_feature (202)..(362): Homolog of NCBI NO: 15236931 NR Description: hypothetical protein; protein id: At4g10790.1
  misc_feature (196)..(362): Homolog of NCBI NO: 37536146 NR Description: unknown protein [Oryza sativa (japonica
MIRAAIEASKKEAEGSSNPLLEERPLHMEDDDDIAIAVTMSLKSAEEEVLRSQGYKASTSEIGASAVTAAQGPQDTQALNGRLAAPSSPFDDDSDDVDEQPLVRHRPRRAASGSLAPPNADRSRSGSPEEEHASINPAERGSGFPSEWGGISSEEHDEAVMLEAAMFGGIPETGYNHLPFLPPQPRAQPRPPSPSLTAQRLIREQQDDEYVASLQADRDKEMKSIRDAEARQLEEETARKAFLEEEKKKEEEAQRKLEEEQELERQLDAKEASLPKEPQADEENAITLLIRMPDGTRRGRRFLKSDKLQTLFNFIDIARVVKPNTYRLVRPYPRHAFGDGESESTLNDLGLTSKQEALFLELI

SEQ ID NO: 83964 - DNA, 2601 bp, Arabidopsis thaliana
  misc_feature (1)..(2601): Ceres Seq. ID no. 12672641
  misc_feature: MA Experiment ID: 20000306 Result: Up-regulated in Transcription
  misc_feature: MA Experiment 20000306 PARAMETER Experiment Name: At_Germinating_Seeds_Sub_P Parameter: Age (hr) Value: 6 vs. 0
  misc_feature: MA Experiment 20000306 PARAMETER Experiment Name: At_Germinating_Seeds_Sub_P Parameter: Organism Value: A. thaliana
  misc_feature: MA Experiment 20000306 PARAMETER Experiment Name: At_Germinating_Seeds_Sub_P Parameter: Plant Line Value: WS
  misc_feature: MA Experiment 20000306 PARAMETER Experiment Name: At_Germinating_Seeds_Sub_P Parameter: Tissue Value: Germinating Seeds
  misc_feature: MA Experiment ID: 20000327 Result: Down-regulated in Transcription
  misc_feature: MA Experiment 20000327 PARAMETER Experiment Name: At_42deg_Heat_Sub_P Parameter: Age (day) Value: 14
  misc_feature: MA Experiment 20000327 PARAMETER Experiment Name: At_42deg_Heat_Sub_P Parameter: Organism Value: A. thaliana
  misc_feature: MA Experiment 20000327 PARAMETER Experiment Name: At_42deg_Heat_Sub_P Parameter: Plant Line Value: WS
  misc_feature: MA Experiment 20000327 PARAMETER Experiment Name: At_42deg_Heat_Sub_P Parameter: Temperature (deg C) Value: 42 vs. 22
  misc_feature: MA Experiment 20000327 PARAMETER Experiment Name: At_42deg_Heat_Sub_P Parameter: Timepoint (hr) Value: 1
  misc_feature: MA Experiment 20000327 PARAMETER Experiment Name: At_42deg_Heat_Sub_P Parameter: Tissue Value: Aerial
  misc_feature: MA Experiment ID: 20000328 Result: Down-regulated in Transcription
  misc_feature: MA Experiment 20000328 PARAMETER Experiment Name: At_42deg_Heat_Sub_P Parameter: Age (day) Value: 14
  misc_feature: MA Experiment 20000328 PARAMETER Experiment Name: At_42deg_Heat_Sub_P Parameter: Organism Value: A. thaliana
  misc_feature: MA Experiment 20000328 PARAMETER Experiment Name: At_42deg_Heat_Sub_P Parameter: Plant Line Value: WS
  misc_feature: MA Experiment 20000328 PARAMETER Experiment Name: At_42deg_Heat_Sub_P Parameter: Temperature (deg C) Value: 42 vs. 22
  misc_feature: MA Experiment 20000328 PARAMETER Experiment Name: At_42deg_Heat_Sub_P Parameter: Timepoint (hr) Value: 6
  misc_feature: MA Experiment 20000328 PARAMETER Experiment Name: At_42deg_Heat_Sub_P Parameter: Tissue Value: Aerial
  misc_feature: MA Experiment ID: 20000347 Result: Up-regulated in Transcription
  misc_feature: MA Experiment 20000347 PARAMETER Experiment Name: At_2mM_SA_Sub_P Parameter: Age (day) Value: 14
  misc_feature: MA Experiment 20000347 PARAMETER Experiment Name: At_2mM_SA_Sub_P Parameter: Organism Value: A. thaliana
  misc_feature: MA Experiment 20000347 PARAMETER Experiment Name: At_2mM_SA_Sub_P Parameter: Plant Line Value: WS
  misc_feature: MA Experiment 20000347 PARAMETER Experiment Name: At_2mM_SA_Sub_P Parameter: Timepoint (hr) Value: 6
  misc_feature: MA Experiment 20000347 PARAMETER Experiment Name: At_2mM_SA_Sub_P Parameter: Tissue Value: Aerial
  misc_feature: MA Experiment 20000347 PARAMETER Experiment Name: At_2mM_SA_Sub_P Parameter: Treatment Value: 2mM SA vs. No Treatment
  misc_feature: MA Experiment ID: 20000355 Result: Down-regulated in Transcription
  misc_feature: MA Experiment 20000355 PARAMETER Experiment Name: At_Siliques_Sub_P Parameter: Age (day) Value: 21
  misc_feature: MA Experiment 20000355 PARAMETER Experiment Name: At_Siliques_Sub_P Parameter: Organism Value: A. thaliana
  misc_feature: MA Experiment 20000355 PARAMETER Experiment Name: At_Siliques_Sub_P Parameter: Plant Line Value: WS
  misc_feature: MA Experiment 20000355 PARAMETER Experiment Name: At_Siliques_Sub_P Parameter: Tissue Value: Less Than 5mm Siliques vs. Whole Plant
atggcgtatcatccagtttataacgagactatgtctatgggaggagggtcaagcaacgagtttggccagtggcttgacaagcaactcgtgccgtttgatacaagtagtggctctttgagggttgaattattacatggtaacttagacatttgggttaaggaagctaaacatcttcctaacatggatggtttccataacacccttgttggtgggatgttttttgggttaggtcggaggaatcataaagtggatggtgagaattcttctaagatcacaagtgatccttatgttactgtctctatctctggtgctgtgattggtagaacttttgttattagcaatagtgagaatcctgtgtggatgcagcattttgatgtaccagttgctcatagtgctgcgaaagttcactttgttgtgaaagacagtgatattattggatcacagatcattggagctgttgaaatcccaaccgagcagttgtgttccgggaatagaatcgaagggctgtttccgatacttaacagtagaggaaagccttgtaaacaaggtgctgtgttgagtctgtctattcagtatattccaatggaaagaatgagactttaccaaaagggtgttggttttggtgttgaatgtgtaggagttcccggtacatacttccctttaaggaaaggcggtagggttactctttatcaggatgctcatgttgatgacggtactcttccgagtgtacatcttgatggtgggattcagtatagacatggaaaatgctgggaagatatggctgatgcgatacgacgggcaaggaggttgatttatatcacaggttggtcagttttccatccggttaggctggttcgtcgtaacaatgatccgacccaaggtacattaggagagttgcttaaagtcaaatctcaagaaggtgttagagtgttggttttggtgtgggatgatccaacttcaaggagtcttttgggattcagtacaaaaggacttatgaacacaagcgatgaggagactcgccgttttttcaagcactcatcggtgcaagttctcctttgtcctagatatggagggaaaggtcacagcttcataaaaaaatctgaagttgaaacaatctacacgcatcatcagaaaactatgattgtagatgctgaagcagctcagaaccgaagaaagattgtagcatttgttggagggctagacttgtgcaacggacgatttgatactcccaagcatcctctcttcaggacattaaagacaatccataaagatgacttccataacccaaattttgtgactactgcggatgatggaccaagagaaccatggcatgatctgcacagcaagattgatggtccagctgcatatgatgtgcttgctaattttgaggaacgctggatgaaggcttcaaaacctcgcggaattgggagactaagaacttcttctgatgattctttgcttaggttagacagaattcctgacataatgggactttccgaagcttcttctgctaatgataatgatccagagtcttggcatgttcaggttttccgttcaattgattcgagttcagttaaagggtttccaaaggacccaaaggaagctactggaagaaaccttctatgtgggaagaacattctcatagatatgagcatacatgcagcttatgttaaagccatacgatctgctcagcacttcatttacattgaaaaccaatattttcttggatcatcattcaattgggattcaaacaagaacttgggtgcgaataatctaatcccgatggaaatcgcgctgaagattgctaacaaaattagagcaagggaaaagtttgctgcttatattgtcattccaatgtggccagaaggtgctccaacaagtaatcctattcaaagaattctctactggcagcacaaaaccatgcaaatgatgtatcaaaccatctacaaggcacttgtggaagttggtcttgatggccagcttgagccacaagactttttgaactttttctgtcttggaaccagagaggttggaaccagagaggttcctgatggaactgttagcgtatataatagtcctcggaagccacctcagctaaatgctgcacaggtacaagctttgaagagtcggagattcatgatatatgttcattccaaaggtatggtagtggatgatgagtttgtcttaattggttccgcgaatatcaaccagagatccttggaaggaactagagacactgaaatcgctatgggagggtatcagccacaccattcatgggctaagaaaggttctcgtcctcgtggtcagatctttggatatagaatgtcgttatgggcagaacatctagggtttctagagcaagaattcgaggaaccagagaacatggaatgcgtgagacgagttaggcaattgagtgagctgaattggagacaatatgcagcggaagaagtcacagagatgccaggtcatcttcttaagtatccagttcaagttgatagaacaggcaaagtgagttctcttcctggatacgagacattcccagatctcggtggcaagatcataggatcgttccttgtagtagaagaaaacctcaccatatga

SEQ ID NO: 83965 - protein, 866 aa, Arabidopsis thaliana
  peptide (1)..(866): Ceres Seq. ID no. 12672642
  misc_feature (48)..(154): Pfam Name: C2 domain Pfam Description: C2 domain
  misc_feature (29)..(866): Homolog of NCBI NO: 18411265 NR Description: phospholipase D, putative; protein id:
  misc_feature (29)..(694): Homolog of NCBI NO: 20138867 NR Description: Phospholipase D beta 2 (AtPLDbeta2) (PLD beta 2)
  misc_feature (91)..(865): Homolog of NCBI NO: 15983515 NR Description: AT4g35790/F4B14_60 [Arabidopsis thaliana]
  misc_feature (91)..(865): Homolog of NCBI NO: 30690488 NR Description: phospholipase D -related [Arabidopsis thaliana] phospholipase D delta [Arabidopsis thaliana]
  misc_feature (100)..(694): Homolog of NCBI NO: 7488147 NR Description: probable phospholipase D (EC 3.1.4.4) - Arabidopsis thaliana >gi|2252846|gb|AAB62845.1| Similar to D [Arabidopsis thaliana] >gi|6049888|gb|AAF02803.1|AF195115_23
  misc_feature (91)..(859): Homolog of NCBI NO: 22795064 NR Description: phospholipase D delta isoform 1a [Gossypium
  misc_feature (41)..(512): Homolog of NCBI NO: 30690492 NR Description: phospholipase D -related [Arabidopsis thaliana]
  misc_feature (465)..(687): Homolog of NCBI NO: 30690492 NR Description: phospholipase D -related [Arabidopsis thaliana]
  misc_feature (295)..(865): Homolog of NCBI NO: 7486399 NR Description: hypothetical protein F4B14.60 - Arabidopsis >gi|3805845|emb|CAA21465.1| putative protein [Arabidopsis >gi|7270531|emb|CAB81488.1| putative protein [Arabidopsis
  misc_feature (282)..(856): Homolog of NCBI NO: 30013697 NR Description: phopholipase D [Mirabilis jalapa]
MAYHPVYNETMSMGGGSSNEFGQWLDKQLVPFDTSSGSLRVELLHGNLDIWVKEAKHLPNMDGFHNTLVGGMFFGLGRRNHKVDGENSSKITSDPYVTVSISGAVIGRTFVISNSENPVWMQHFDVPVAHSAAKVHFVVKDSDIIGSQIIGAVEIPTEQLCSGNRIEGLFPILNSRGKPCKQGAVLSLSIQYIPMERMRLYQKGVGFGVECVGVPGTYFPLRKGGRVTLYQDAHVDDGTLPSVHLDGGIQYRHGKCWEDMADAIRRARRLIYITGWSVFHPVRLVRRNNDPTQGTLGELLKVKSQEGVRVLVLVWDDPTSRSLLGFSTKGLMNTSDEETRRFFKHSSVQVLLCPRYGGKGHSFIKKSEVETIYTHHQKTMIVDAEAAQNRRKIVAFVGGLDLCNGRFDTPKHPLFRTLKTIHKDDFHNPNFVTTADDGPREPWHDLHSKIDGPAAYDVLANFEERWMKASKPRGIGRLRTSSDDSLLRLDRIPDIMGLSEASSANDNDPESWHVQVFRSIDSSSVKGFPKDPKEATGRNLLCGKNILIDMSIHAAYVKAIRSAQHFIYIENQYFLGSSFNWDSNKNLGANNLIPMEIALKIANKIRAREKFAAYIVIPMWPEGAPTSNPIQRILYWQHKTMQMMYQTIYKALVEVGLDGQLEPQDFLNFFCLGTREVGTREVPDGTVSVYNSPRKPPQLNAAQVQALKSRRFMIYVHSKGMVVDDEFVLIGSANINQRSLEGTRDTEIAMGGYQPHHSWAKKGSRPRGQIFGYRMSLWAEHLGFLEQEFEEPENMECVRRVRQLSELNWRQYAAEEVTEMPGHLLKYPVQVDRTGKVSSLPGYETFPDLGGKIIGSFLVVEENLTI

SEQ ID NO: 83966 - protein, 856 aa, Arabidopsis thaliana
  peptide (1)..(856): Ceres Seq. ID no. 12672643
  misc_feature (38)..(144): Pfam Name: C2 domain Pfam Description: C2 domain
  misc_feature (19)..(856): Homolog of NCBI NO: 18411265 NR Description: phospholipase D, putative; protein id:
  misc_feature (19)..(684): Homolog of NCBI NO: 20138867 NR Description: Phospholipase D beta 2 (AtPLDbeta2) (PLD beta 2)
  misc_feature (81)..(855): Homolog of NCBI NO: 15983515 NR Description: AT4g35790/F4B14_60 [Arabidopsis thaliana]
  misc_feature (81)..(855): Homolog of NCBI NO: 30690488 NR Description: phospholipase D -related [Arabidopsis thaliana] phospholipase D delta [Arabidopsis thaliana]
  misc_feature (90)..(684): Homolog of NCBI NO: 7488147 NR Description: probable phospholipase D (EC 3.1.4.4) - Arabidopsis thaliana >gi|2252846|gb|AAB62845.1| Similar to D [Arabidopsis thaliana] >gi|6049888|gb|AAF02803.1|AF195115_23
  misc_feature (81)..(849): Homolog of NCBI NO: 22795064 NR Description: phospholipase D delta isoform 1a [Gossypium
  misc_feature (31)..(502): Homolog of NCBI NO: 30690492 NR Description: phospholipase D -related [Arabidopsis thaliana]
  misc_feature (455)..(677): Homolog of NCBI NO: 30690492 NR Description: phospholipase D -related [Arabidopsis thaliana]
  misc_feature (285)..(855): Homolog of NCBI NO: 7486399 NR Description: hypothetical protein F4B14.60 - Arabidopsis >gi|3805845|emb|CAA21465.1| putative protein [Arabidopsis >gi|7270531|emb|CAB81488.1| putative protein [Arabidopsis
  misc_feature (272)..(846): Homolog of NCBI NO: 30013697 NR Description: phopholipase D [Mirabilis jalapa]
MSMGGGSSNEFGQWLDKQLVPFDTSSGSLRVELLHGNLDIWVKEAKHLPNMDGFHNTLVGGMFFGLGRRNHKVDGENSSKITSDPYVTVSISGAVIGRTFVISNSENPVWMQHFDVPVAHSAAKVHFVVKDSDIIGSQIIGAVEIPTEQLCSGNRIEGLFPILNSRGKPCKQGAVLSLSIQYIPMERMRLYQKGVGFGVECVGVPGTYFPLRKGGRVTLYQDAHVDDGTLPSVHLDGGIQYRHGKCWEDMADAIRRARRLIYITGWSVFHPVRLVRRNNDPTQGTLGELLKVKSQEGVRVLVLVWDDPTSRSLLGFSTKGLMNTSDEETRRFFKHSSVQVLLCPRYGGKGHSFIKKSEVETIYTHHQKTMIVDAEAAQNRRKIVAFVGGLDLCNGRFDTPKHPLFRTLKTIHKDDFHNPNFVTTADDGPREPWHDLHSKIDGPAAYDVLANFEERWMKASKPRGIGRLRTSSDDSLLRLDRIPDIMGLSEASSANDNDPESWHVQVFRSIDSSSVKGFPKDPKEATGRNLLCGKNILIDMSIHAAYVKAIRSAQHFIYIENQYFLGSSFNWDSNKNLGANNLIPMEIALKIANKIRAREKFAAYIVIPMWPEGAPTSNPIQRILYWQHKTMQMMYQTIYKALVEVGLDGQLEPQDFLNFFCLGTREVGTREVPDGTVSVYNSPRKPPQLNAAQVQALKSRRFMIYVHSKGMVVDDEFVLIGSANINQRSLEGTRDTEIAMGGYQPHHSWAKKGSRPRGQIFGYRMSLWAEHLGFLEQEFEEPENMECVRRVRQLSELNWRQYAAEEVTEMPGHLLKYPVQVDRTGKVSSLPGYETFPDLGGKIIGSFLVVEENLTI

SEQ ID NO: 83967 - protein, 854 aa, Arabidopsis thaliana
  peptide (1)..(854): Ceres Seq. ID no. 12672644
  misc_feature (36)..(142): Pfam Name: C2 domain Pfam Description: C2 domain
  misc_feature (17)..(854): Homolog of NCBI NO: 18411265 NR Description: phospholipase D, putative; protein id:
  misc_feature (17)..(682): Homolog of NCBI NO: 20138867 NR Description: Phospholipase D beta 2 (AtPLDbeta2) (PLD beta 2)
  misc_feature (79)..(853): Homolog of NCBI NO: 15983515 NR Description: AT4g35790/F4B14_60 [Arabidopsis thaliana]
  misc_feature (79)..(853): Homolog of NCBI NO: 30690488 NR Description: phospholipase D -related [Arabidopsis thaliana] phospholipase D delta [Arabidopsis thaliana]
  misc_feature (88)..(682): Homolog of NCBI NO: 7488147 NR Description: probable phospholipase D (EC 3.1.4.4) - Arabidopsis thaliana >gi|2252846|gb|AAB62845.1| Similar to D [Arabidopsis thaliana] >gi|6049888|gb|AAF02803.1|AF195115_23
  misc_feature (79)..(847): Homolog of NCBI NO: 22795064 NR Description: phospholipase D delta isoform 1a [Gossypium
  misc_feature (29)..(500): Homolog of NCBI NO: 30690492 NR Description: phospholipase D -related [Arabidopsis thaliana]
  misc_feature (453)..(675): Homolog of NCBI NO: 30690492 NR Description: phospholipase D -related [Arabidopsis thaliana]
  misc_feature (283)..(853): Homolog of NCBI NO: 7486399 NR Description: hypothetical protein F4B14.60 - Arabidopsis >gi|3805845|emb|CAA21465.1| putative protein [Arabidopsis >gi|7270531|emb|CAB81488.1| putative protein [Arabidopsis
  misc_feature (270)..(844): Homolog of NCBI NO: 30013697 NR Description: phopholipase D [Mirabilis jalapa]
MGGGSSNEFGQWLDKQLVPFDTSSGSLRVELLHGNLDIWVKEAKHLPNMDGFHNTLVGGMFFGLGRRNHKVDGENSSKITSDPYVTVSISGAVIGRTFVISNSENPVWMQHFDVPVAHSAAKVHFVVKDSDIIGSQIIGAVEIPTEQLCSGNRIEGLFPILNSRGKPCKQGAVLSLSIQYIPMERMRLYQKGVGFGVECVGVPGTYFPLRKGGRVTLYQDAHVDDGTLPSVHLDGGIQYRHGKCWEDMADAIRRARRLIYITGWSVFHPVRLVRRNNDPTQGTLGELLKVKSQEGVRVLVLVWDDPTSRSLLGFSTKGLMNTSDEETRRFFKHSSVQVLLCPRYGGKGHSFIKKSEVETIYTHHQKTMIVDAEAAQNRRKIVAFVGGLDLCNGRFDTPKHPLFRTLKTIHKDDFHNPNFVTTADDGPREPWHDLHSKIDGPAAYDVLANFEERWMKASKPRGIGRLRTSSDDSLLRLDRIPDIMGLSEASSANDNDPESWHVQVFRSIDSSSVKGFPKDPKEATGRNLLCGKNILIDMSIHAAYVKAIRSAQHFIYIENQYFLGSSFNWDSNKNLGANNLIPMEIALKIANKIRAREKFAAYIVIPMWPEGAPTSNPIQRILYWQHKTMQMMYQTIYKALVEVGLDGQLEPQDFLNFFCLGTREVGTREVPDGTVSVYNSPRKPPQLNAAQVQALKSRRFMIYVHSKGMVVDDEFVLIGSANINQRSLEGTRDTEIAMGGYQPHHSWAKKGSRPRGQIFGYRMSLWAEHLGFLEQEFEEPENMECVRRVRQLSELNWRQYAAEEVTEMPGHLLKYPVQVDRTGKVSSLPGYETFPDLGGKIIGSFLVVEENLTI

SEQ ID NO: 83968 - DNA, 390 bp, Arabidopsis thaliana
  misc_feature (1)..(390): Ceres Seq. ID no. 12672668
  misc_feature: MA Experiment ID: 20000314 Result: Up-regulated in Transcription
  misc_feature: MA Experiment 20000314 PARAMETER Experiment Name: At_14day_Shoots-Roots_Sub_P Parameter: Age (day) Value: 14
  misc_feature: MA Experiment 20000314 PARAMETER Experiment Name: At_14day_Shoots-Roots_Sub_P Parameter: Organism Value: A. thaliana
  misc_feature: MA Experiment 20000314 PARAMETER Experiment Name: At_14day_Shoots-Roots_Sub_P Parameter: Plant Line Value: WS
  misc_feature: MA Experiment 20000314 PARAMETER Experiment Name: At_14day_Shoots-Roots_Sub_P Parameter: Tissue Value: Roots vs. Whole Plant
atggcttcaaaaatttcagcctctcttgtcattttcctcacattcaacattctttttttcactttaaccaccgcatgtggcggtggctgcagttccacccctaaacccaaacctaagcccaagtccaccggaagctgccctaaagacactctcaagctcggcgtttgcgccaatgttctcaaggatcttctcaaaattcagttgggaacaccaccagtgaagccttgttgttcgctcctcaatggtttagttgatcttgaggctgccgcttgtctctgcaccgccctaaaggctaaagttttaggcattaatcttaatgttcccgtctctctcagccttcttctcaatgtttgtggcaagaaggttccttctggtttcgtatgtgcttga

SEQ ID NO: 83969 - protein, 129 aa, Arabidopsis thaliana
  peptide (1)..(129): Ceres Seq. ID no. 12672669
  misc_feature (46)..(128): Pfam Name: Protease inhibitor/seed storage/LTP family Pfam Description: Protease inhibitor/seed storage/LTP family
  misc_feature (1)..(129): Homolog of NCBI NO: 18413820 NR Description: pEARLI 1-like protein; protein id: At4g12510.1
  misc_feature (1)..(129): Homolog of NCBI NO: 7484770 NR Description: extensin like protein - black poplar extensin like protein [Populus nigra] >gi|1199774|dbj|BAA11855.1|
  misc_feature (1)..(128): Homolog of NCBI NO: 10798758 NR Description: P-rich protein Nt-SubC29 [Nicotiana tabacum]
  misc_feature (1)..(123): Homolog of NCBI NO: 21360370 NR Description: extensin-like protein [Citrus junos]
  misc_feature (6)..(128): Homolog of NCBI NO: 15221201 NR Description: pEARLI 1-like protein; protein id: At1g12090.1, by cDNA: 5712., supported by cDNA: gi_16648817, supported by
  misc_feature (1)..(129): Homolog of NCBI NO: 4454097 NR Description: hybrid proline-rich protein [Catharanthus roseus]
  misc_feature (1)..(129): Homolog of NCBI NO: 481236 NR Description: hypothetical protein - Madagascar periwinkle
MASKISASLVIFLTFNILFFTLTTACGGGCSSTPKPKPKPKSTGSCPKDTLKLGVCANVLKDLLKIQLGTPPVKPCCSLLNGLVDLEAAACLCTALKAKVLGINLNVPVSLSLLLNVCGKKVPSGFVCA

SEQ ID NO: 83970 - DNA, 925 bp, Arabidopsis thaliana
  misc_feature (1)..(925): Ceres Seq. ID no. 12672678
  misc_feature: MA Experiment ID: 20000307 Result: Up-regulated in Transcription
  misc_feature: MA Experiment 20000307 PARAMETER Experiment Name: At_Germinating_Seeds_Sub_P Parameter: Age (hr) Value: 24 vs. 0
  misc_feature: MA Experiment 20000307 PARAMETER Experiment Name: At_Germinating_Seeds_Sub_P Parameter: Organism Value: A. thaliana
  misc_feature: MA Experiment 20000307 PARAMETER Experiment Name: At_Germinating_Seeds_Sub_P Parameter: Plant Line Value: WS
  misc_feature: MA Experiment 20000307 PARAMETER Experiment Name: At_Germinating_Seeds_Sub_P Parameter: Tissue Value: Germinating Seeds
  misc_feature: MA Experiment ID: 20000314 Result: Down-regulated in Transcription
  misc_feature: MA Experiment 20000314 PARAMETER Experiment Name: At_14day_Shoots-Roots_Sub_P Parameter: Age (day) Value: 14
  misc_feature: MA Experiment 20000314 PARAMETER Experiment Name: At_14day_Shoots-Roots_Sub_P Parameter: Organism Value: A. thaliana
  misc_feature: MA Experiment 20000314 PARAMETER Experiment Name: At_14day_Shoots-Roots_Sub_P Parameter: Plant Line Value: WS
  misc_feature: MA Experiment 20000314 PARAMETER Experiment Name: At_14day_Shoots-Roots_Sub_P Parameter: Tissue Value: Roots vs. Whole Plant
  misc_feature: MA Experiment ID: 20000329 Result: Down-regulated in Transcription
  misc_feature: MA Experiment 20000329 PARAMETER Experiment Name: At_4deg_Cold_Sub_P Parameter: Age (day) Value: 14
  misc_feature: MA Experiment 20000329 PARAMETER Experiment Name: At_4deg_Cold_Sub_P Parameter: Organism Value: A. thaliana
  misc_feature: MA Experiment 20000329 PARAMETER Experiment Name: At_4deg_Cold_Sub_P Parameter: Plant Line Value: WS
  misc_feature: MA Experiment 20000329 PARAMETER Experiment Name: At_4deg_Cold_Sub_P Parameter: Temperature (deg C) Value: 4 vs. 22
  misc_feature: MA Experiment 20000329 PARAMETER Experiment Name: At_4deg_Cold_Sub_P Parameter: Timepoint (hr) Value: 6
  misc_feature: MA Experiment 20000329 PARAMETER Experiment Name: At_4deg_Cold_Sub_P Parameter: Tissue Value: Aerial
  misc_feature: MA Experiment ID: 20000355 Result: Down-regulated in Transcription
  misc_feature: MA Experiment 20000355 PARAMETER Experiment Name: At_Siliques_Sub_P Parameter: Age (day) Value: 21
  misc_feature: MA Experiment 20000355 PARAMETER Experiment Name: At_Siliques_Sub_P Parameter: Organism Value: A. thaliana
  misc_feature: MA Experiment 20000355 PARAMETER Experiment Name: At_Siliques_Sub_P Parameter: Plant Line Value: WS
  misc_feature: MA Experiment 20000355 PARAMETER Experiment Name: At_Siliques_Sub_P Parameter: Tissue Value: Less Than 5mm Siliques vs. Whole Plant
  misc_feature: MA Experiment ID: 20000440 Result: Down-regulated in Transcription
  misc_feature: MA Experiment 20000440 PARAMETER Experiment Name: At_Closed-Flower__Sub_P Parameter: Tissue Value: Closed Flower vs. Whole Plant
atgaaccttaaggagacggagctttgtcttggcctccccggaggcactgaaaccgttgaaagtccggccaagtcgggtgttgggaacaagagaggcttctccgagaccgttgatctcaaacttaatcttcaatctaacaaacaaggacatgtggatctcaacactaatggagctcccaaggagaagaccttccttaaagacccttctaagcctcctgctaaagcacaagtggtgggttggccaccggtgaggaactaccggaaaaatgttatggctaatcagaagagcggcgaagcagaggaggcaatgagtagtggtggaggaaccgtcgcctttgtgaaggtttccatggatggagctccttatcttcggaaggttgacctcaagatgtacaccagctacaaggatctctctgatgccttggccaaaatgttcagctcctttaccatggggagttatggagcacaagggatgatagatttcatgaacgagagtaaagtgatggatctgttgaacagttctgagtatgttccaagctacgaggacaaagatggtgactggatgctcgttggtgatgtcccctggccgatgtttgtcgagtcatgcaaacgtttgcgcataatgaaaggatccgaagcaattggacttgctccaagagcaatggagaagttcaagaacagatcatgaacaaaaaaaaaagaggacaatatgcattgattttttttttttggtattgttatgatcatgtgtttttaatttaaaatattggaagtatataggaaaatataattgtttacgaaaaaaataactttaaatatgtctttttttttttttttgaaattagtctgtgtttttgttttcatctcttaattagtagaaatcattttttaatatgtaattgtgatagtaaatctatagagttcgt

SEQ ID NO: 83971 - protein, 228 aa, Arabidopsis thaliana
  peptide (1)..(228): Ceres Seq. ID no. 12672679
  misc_feature (1)..(220): Pfam Name: AUX/IAA family Pfam Description: AUX/IAA family
  misc_feature (1)..(228): Homolog of NCBI NO: 22328628 NR Description: IAA7 like protein; protein id: At4g14550.1, by cDNA: gi_12248008 [Arabidopsis thaliana]
  misc_feature (1)..(216): Homolog of NCBI NO: 7442224 NR Description: auxin-induced protein - Arabidopsis thaliana
  misc_feature (1)..(216): Homolog of NCBI NO: 25296229 NR Description: IAA7 like protein [imported] - Arabidopsis >gi|5302771|emb|CAB46059.1| IAA7 like protein [Arabidopsis >gi|7268161|emb|CAB78497.1| IAA7 like protein [Arabidopsis
  misc_feature (1)..(228): Homolog of NCBI NO: 21593352 NR Description: indoleacetic acid (IAA)-inducible gene (IAA7)
  misc_feature (1)..(228): Homolog of NCBI NO: 15228943 NR Description: indoleacetic acid (IAA)-inducible gene (IAA7); id: At3g23050.1, supported by cDNA: 38286., supported by cDNA:
  misc_feature (65)..(228): Homolog of NCBI NO: 972931 NR Description: IAA14
  misc_feature (65)..(228): Homolog of NCBI NO: 2119765 NR Description: auxin-induced protein IAA14 - Arabidopsis
  misc_feature (1)..(228): Homolog of NCBI NO: 20385508 NR Description: auxin-regulated protein [Populus tremula x
  misc_feature (1)..(228): Homolog of NCBI NO: 15219694 NR Description: putative auxin-induced protein, IAA17/AXR3-1; id: At1g04250.1, supported by cDNA: 33613., supported by cDNA:
  misc_feature (1)..(228): Homolog of NCBI NO: 21592887 NR Description: putative auxin-induced protein, IAA17/AXR3-1
MNLKETELCLGLPGGTETVESPAKSGVGNKRGFSETVDLKLNLQSNKQGHVDLNTNGAPKEKTFLKDPSKPPAKAQVVGWPPVRNYRKNVMANQKSGEAEEAMSSGGGTVAFVKVSMDGAPYLRKVDLKMYTSYKDLSDALAKMFSSFTMGSYGAQGMIDFMNESKVMDLLNSSEYVPSYEDKDGDWMLVGDVPWPMFVESCKRLRIMKGSEAIGLAPRAMEKFKNRS

SEQ ID NO: 83972 - protein, 138 aa, Arabidopsis thaliana
  peptide (1)..(138): Ceres Seq. ID no. 12672680
  misc_feature (1)..(130): Pfam Name: AUX/IAA family Pfam Description: AUX/IAA family
  misc_feature (1)..(138): Homolog of NCBI NO: 22328628 NR Description: IAA7 like protein; protein id: At4g14550.1, by cDNA: gi_12248008 [Arabidopsis thaliana]
  misc_feature (1)..(126): Homolog of NCBI NO: 7442224 NR Description: auxin-induced protein - Arabidopsis thaliana
  misc_feature (1)..(126): Homolog of NCBI NO: 25296229 NR Description: IAA7 like protein [imported] - Arabidopsis >gi|5302771|emb|CAB46059.1| IAA7 like protein [Arabidopsis >gi|7268161|emb|CAB78497.1| IAA7 like protein [Arabidopsis
  misc_feature (1)..(138): Homolog of NCBI NO: 21593352 NR Description: indoleacetic acid (IAA)-inducible gene (IAA7)
  misc_feature (1)..(138): Homolog of NCBI NO: 15228943 NR Description: indoleacetic acid (IAA)-inducible gene (IAA7); id: At3g23050.1, supported by cDNA: 38286., supported by cDNA:
  misc_feature (1)..(138): Homolog of NCBI NO: 972931 NR Description: IAA14
  misc_feature (1)..(138): Homolog of NCBI NO: 2119765 NR Description: auxin-induced protein IAA14 - Arabidopsis
  misc_feature (1)..(138): Homolog of NCBI NO: 20385508 NR Description: auxin-regulated protein [Populus tremula x
  misc_feature (1)..(138): Homolog of NCBI NO: 15219694 NR Description: putative auxin-induced protein, IAA17/AXR3-1; id: At1g04250.1, supported by cDNA: 33613., supported by cDNA:
  misc_feature (1)..(138): Homolog of NCBI NO: 21592887 NR Description: putative auxin-induced protein, IAA17/AXR3-1
MANQKSGEAEEAMSSGGGTVAFVKVSMDGAPYLRKVDLKMYTSYKDLSDALAKMFSSFTMGSYGAQGMIDFMNESKVMDLLNSSEYVPSYEDKDGDWMLVGDVPWPMFVESCKRLRIMKGSEAIGLAPRAMEKFKNRS

SEQ ID NO: 83973 - protein, 126 aa, Arabidopsis thaliana
  peptide (1)..(126): Ceres Seq. ID no. 12672681
  misc_feature (1)..(118): Pfam Name: AUX/IAA family Pfam Description: AUX/IAA family
  misc_feature (1)..(126): Homolog of NCBI NO: 22328628 NR Description: IAA7 like protein; protein id: At4g14550.1, by cDNA: gi_12248008 [Arabidopsis thaliana]
  misc_feature (1)..(114): Homolog of NCBI NO: 7442224 NR Description: auxin-induced protein - Arabidopsis thaliana
  misc_feature (1)..(114): Homolog of NCBI NO: 25296229 NR Description: IAA7 like protein [imported] - Arabidopsis >gi|5302771|emb|CAB46059.1| IAA7 like protein [Arabidopsis >gi|7268161|emb|CAB78497.1| IAA7 like protein [Arabidopsis
  misc_feature (1)..(126): Homolog of NCBI NO: 21593352 NR Description: indoleacetic acid (IAA)-inducible gene (IAA7)
  misc_feature (1)..(126): Homolog of NCBI NO: 15228943 NR Description: indoleacetic acid (IAA)-inducible gene (IAA7); id: At3g23050.1, supported by cDNA: 38286., supported by cDNA:
  misc_feature (1)..(126): Homolog of NCBI NO: 972931 NR Description: IAA14
  misc_feature (1)..(126): Homolog of NCBI NO: 2119765 NR Description: auxin-induced protein IAA14 - Arabidopsis
  misc_feature (1)..(126): Homolog of NCBI NO: 20385508 NR Description: auxin-regulated protein [Populus tremula x
  misc_feature (1)..(126): Homolog of NCBI NO: 15219694 NR Description: putative auxin-induced protein, IAA17/AXR3-1; id: At1g04250.1, supported by cDNA: 33613., supported by cDNA:
  misc_feature (1)..(126): Homolog of NCBI NO: 21592887 NR Description: putative auxin-induced protein, IAA17/AXR3-1
MSSGGGTVAFVKVSMDGAPYLRKVDLKMYTSYKDLSDALAKMFSSFTMGSYGAQGMIDFMNESKVMDLLNSSEYVPSYEDKDGDWMLVGDVPWPMFVESCKRLRIMKGSEAIGLAPRAMEKFKNRS

SEQ ID NO: 83974 - DNA, 1545 bp, Arabidopsis thaliana
  misc_feature (1)..(1545): Ceres Seq. ID no. 12672696
  misc_feature: MA Experiment ID: 20000173 Result: Down-regulated in Transcription
  misc_feature: MA Experiment 20000173 PARAMETER Experiment Name: At_42deg_Heat_P Parameter: Age (day) Value: 14
  misc_feature: MA Experiment 20000173 PARAMETER Experiment Name: At_42deg_Heat_P Parameter: Organism Value: A. thaliana
  misc_feature: MA Experiment 20000173 PARAMETER Experiment Name: At_42deg_Heat_P Parameter: Plant Line Value: WS
  misc_feature: MA Experiment 20000173 PARAMETER Experiment Name: At_42deg_Heat_P Parameter: Temperature (deg C) Value: 42 vs. 22
  misc_feature: MA Experiment 20000173 PARAMETER Experiment Name: At_42deg_Heat_P Parameter: Timepoint (hr) Value: 6
  misc_feature: MA Experiment 20000173 PARAMETER Experiment Name: At_42deg_Heat_P Parameter: Tissue Value: Aerial
  misc_feature: MA Experiment ID: 20000495 Result: Down-regulated in Transcription
  misc_feature: MA Experiment 20000495 PARAMETER Experiment Name: At_Guard_Cells_P Parameter: Harvest Date Value: 8/2/2002
  misc_feature: MA Experiment 20000495 PARAMETER Experiment Name: At_Guard_Cells_P Parameter: Organism Value: A. thaliana
  misc_feature: MA Experiment 20000495 PARAMETER Experiment Name: At_Guard_Cells_P Parameter: Tissue Value: Guard Cells vs. Leaves
  misc_feature: MA Experiment ID: 20001451 Result: Down-regulated in Transcription
  misc_feature: MA Experiment 20001451 PARAMETER Experiment Name: At_Far-red-induction_P Parameter: Age (day) Value: 7
  misc_feature: MA Experiment 20001451 PARAMETER Experiment Name: At_Far-red-induction_P Parameter: Light Value: Far-red vs. White
  misc_feature: MA Experiment 20001451 PARAMETER Experiment Name: At_Far-red-induction_P Parameter: Organism Value: A. thaliana
  misc_feature: MA Experiment 20001451 PARAMETER Experiment Name: At_Far-red-induction_P Parameter: Plant Line Value: Columbia
  misc_feature: MA Experiment 20001451 PARAMETER Experiment Name: At_Far-red-induction_P Parameter: Timepoint (hr) Value: 24
  misc_feature: MA Experiment 20001451 PARAMETER Experiment Name: At_Far-red-induction_P Parameter: Tissue Value: Whole Plant
atggggaagcaaggaccttgctaccactgtggagttacaaacacacctttgtggagaaatggaccaccagagaagccggtattgtgcaatgcgtgtggatcgcgttggaggacaaagggaacacttgtgaactacacaccgcttcatgctcgtgctgatggtgatgagaatgatgatcatcacaggtttcaaagaatgaagagcatttctttaggcaataagaacaaagagataaagatgctcaagaggaaagcaattcaagaaaacatcatcattaaaagaccggtctttgaattcagttatggtttgaaggcggctgtgatagaggaggatgctagtaatagatcgagttccggttcggctgtatcaaactctgagagctgtgcacagtttagcagtgcagatgggagtgagttaacaggtccatctcaatctaatgcgtgggacacaactgttccttgcaagaggaggacgtgtgtgggccgtcctaagtcctcttctgttgaaaagctcacaaaggacctttacaatattttacaagagcagcaatcgtcatgtctctcagtttcatcagaggaagatcttctttttgagaatgaaatgtcaatggtctcagttgagattggacatgggagtgttctgatgaagaatccccactcgtttgctcgggaagaggagtctgaagccagctcactctcttcgattgagaacaagtcctccatcagtgacgcatactcacattccgtgaagcgtgttgagattggagcagtgagaggttcatattatggtggacaaacaataaagcaagaacaattcaagagaaccaagtctcaaactgaaagagtgcatgtcctggggagtcatggttcaccactatgtagcatagatttgaaggatgttttcaactttgatgagttcatagaacaattcacagaggaagaacagaagaaactgatgaacttgcttcctcagattgactctgatgaccttcctcatagcctcagaatgatgtttgaaagtgctcagttcaaggacaacttctctttgtttcagcagctcattgctgatggtgtctttgatgtgtcttcttcctcgggggcaaaactcgaagaaatcaggacttttaagaagcttgctttgacagattttaacaaatctcgtttggtggaaagctataacctcctcaaggaacgcgaaaaagggaccggagattctgttactacaacttcaaaaagctcaatcccaaatgtacctaaaaatattgtaaccattaagaggcgctatgaaaaccaaatccaagtaaagtcagagtcaagggggctaatgaggagccccaaaagggtgatgaagatgaaagcaagccatgagacagagaacaatgtctcatgcttcagaccaagaagcttggcttctgtgtttgcacaagaaggtggctctgcagtgtttagctatgaaggtaattgcagttctgatcaagatctccttcttctggacttgccgtcaaacgggtcatttcctcaagcagagctacttcaccaactctga

SEQ ID NO: 83975 - protein, 514 aa, Arabidopsis thaliana
  peptide (1)..(514): Ceres Seq. ID no. 12672697
  misc_feature (1)..(514): Homolog of NCBI NO: 30684095 NR Description: GATA zinc finger protein [Arabidopsis thaliana]
  misc_feature (40)..(416): Homolog of NCBI NO: 7485111 NR Description: hypothetical protein - Arabidopsis thaliana hypothetical protein [Arabidopsis thaliana]
  misc_feature (242)..(514): Homolog of NCBI NO: 22327632 NR Description: GATA zinc finger protein; protein id: At5g47140.1
  misc_feature (1)..(204): Homolog of NCBI NO: 22327632 NR Description: GATA zinc finger protein; protein id: At5g47140.1
  misc_feature (242)..(514): Homolog of NCBI NO: 8978081 NR Description: gene_id:K14A3.9~pir||D71445~similar to unknown
  misc_feature (13)..(204): Homolog of NCBI NO: 8978081 NR Description: gene_id:K14A3.9~pir||D71445~similar to unknown
  misc_feature (65)..(278): Homolog of NCBI NO: 8978081 NR Description: gene_id:K14A3.9~pir||D71445~similar to unknown
  misc_feature (65)..(278): Homolog of NCBI NO: 22327632 NR Description: GATA zinc finger protein; protein id: At5g47140.1
  misc_feature (1)..(298): Homolog of NCBI NO: 38345953 NR Description: OSJNBb0038F03.10 [Oryza sativa (japonica
MGKQGPCYHCGVTNTPLWRNGPPEKPVLCNACGSRWRTKGTLVNYTPLHARADGDENDDHHRFQRMKSISLGNKNKEIKMLKRKAIQENIIIKRPVFEFSYGLKAAVIEEDASNRSSSGSAVSNSESCAQFSSADGSELTGPSQSNAWDTTVPCKRRTCVGRPKSSSVEKLTKDLYNILQEQQSSCLSVSSEEDLLFENEMSMVSVEIGHGSVLMKNPHSFAREEESEASSLSSIENKSSISDAYSHSVKRVEIGAVRGSYYGGQTIKQEQFKRTKSQTERVHVLGSHGSPLCSIDLKDVFNFDEFIEQFTEEEQKKLMNLLPQIDSDDLPHSLRMMFESAQFKDNFSLFQQLIADGVFDVSSSSGAKLEEIRTFKKLALTDFNKSRLVESYNLLKEREKGTGDSVTTTSKSSIPNVPKNIVTIKRRYENQIQVKSESRGLMRSPKRVMKMKASHETENNVSCFRPRSLASVFAQEGGSAVFSYEGNCSSDQDLLLLDLPSNGSFPQAELLHQL

SEQ ID NO: 83976 - protein, 449 aa, Arabidopsis thaliana
  peptide (1)..(449): Ceres Seq. ID no. 12672698
  misc_feature (1)..(449): Homolog of NCBI NO: 30684095 NR Description: GATA zinc finger protein [Arabidopsis thaliana]
  misc_feature (1)..(351): Homolog of NCBI NO: 7485111 NR Description: hypothetical protein - Arabidopsis thaliana hypothetical protein [Arabidopsis thaliana]
  misc_feature (177)..(449): Homolog of NCBI NO: 22327632 NR Description: GATA zinc finger protein; protein id: At5g47140.1
  misc_feature (1)..(139): Homolog of NCBI NO: 22327632 NR Description: GATA zinc finger protein; protein id: At5g47140.1
  misc_feature (177)..(449): Homolog of NCBI NO: 8978081 NR Description: gene_id:K14A3.9~pir||D71445~similar to unknown
  misc_feature (1)..(139): Homolog of NCBI NO: 8978081 NR Description: gene_id:K14A3.9~pir||D71445~similar to unknown
  misc_feature (1)..(213): Homolog of NCBI NO: 8978081 NR Description: gene_id:K14A3.9~pir||D71445~similar to unknown
  misc_feature (1)..(213): Homolog of NCBI NO: 22327632 NR Description: GATA zinc finger protein; protein id: At5g47140.1
  misc_feature (1)..(233): Homolog of NCBI NO: 38345953 NR Description: OSJNBb0038F03.10 [Oryza sativa (japonica
MKSISLGNKNKEIKMLKRKAIQENIIIKRPVFEFSYGLKAAVIEEDASNRSSSGSAVSNSESCAQFSSADGSELTGPSQSNAWDTTVPCKRRTCVGRPKSSSVEKLTKDLYNILQEQQSSCLSVSSEEDLLFENEMSMVSVEIGHGSVLMKNPHSFAREEESEASSLSSIENKSSISDAYSHSVKRVEIGAVRGSYYGGQTIKQEQFKRTKSQTERVHVLGSHGSPLCSIDLKDVFNFDEFIEQFTEEEQKKLMNLLPQIDSDDLPHSLRMMFESAQFKDNFSLFQQLIADGVFDVSSSSGAKLEEIRTFKKLALTDFNKSRLVESYNLLKEREKGTGDSVTTTSKSSIPNVPKNIVTIKRRYENQIQVKSESRGLMRSPKRVMKMKASHETENNVSCFRPRSLASVFAQEGGSAVFSYEGNCSSDQDLLLLDLPSNGSFPQAELLHQL

SEQ ID NO: 83977 - protein, 435 aa, Arabidopsis thaliana
  peptide (1)..(435): Ceres Seq. ID no. 12672699
  misc_feature (1)..(435): Homolog of NCBI NO: 30684095 NR Description: GATA zinc finger protein [Arabidopsis thaliana]
  misc_feature (1)..(337): Homolog of NCBI NO: 7485111 NR Description: hypothetical protein - Arabidopsis thaliana hypothetical protein [Arabidopsis thaliana]
  misc_feature (163)..(435): Homolog of NCBI NO: 22327632 NR Description: GATA zinc finger protein; protein id: At5g47140.1
  misc_feature (1)..(125): Homolog of NCBI NO: 22327632 NR Description: GATA zinc finger protein; protein id: At5g47140.1
  misc_feature (163)..(435): Homolog of NCBI NO: 8978081 NR Description: gene_id:K14A3.9~pir||D71445~similar to unknown
  misc_feature (1)..(125): Homolog of NCBI NO: 8978081 NR Description: gene_id:K14A3.9~pir||D71445~similar to unknown
  misc_feature (1)..(199): Homolog of NCBI NO: 8978081 NR Description: gene_id:K14A3.9~pir||D71445~similar to unknown
  misc_feature (1)..(199): Homolog of NCBI NO: 22327632 NR Description: GATA zinc finger protein; protein id: At5g47140.1
  misc_feature (1)..(219): Homolog of NCBI NO: 38345953 NR Description: OSJNBb0038F03.10 [Oryza sativa (japonica
MLKRKAIQENIIIKRPVFEFSYGLKAAVIEEDASNRSSSGSAVSNSESCAQFSSADGSELTGPSQSNAWDTTVPCKRRTCVGRPKSSSVEKLTKDLYNILQEQQSSCLSVSSEEDLLFENEMSMVSVEIGHGSVLMKNPHSFAREEESEASSLSSIENKSSISDAYSHSVKRVEIGAVRGSYYGGQTIKQEQFKRTKSQTERVHVLGSHGSPLCSIDLKDVFNFDEFIEQFTEEEQKKLMNLLPQIDSDDLPHSLRMMFESAQFKDNFSLFQQLIADGVFDVSSSSGAKLEEIRTFKKLALTDFNKSRLVESYNLLKEREKGTGDSVTTTSKSSIPNVPKNIVTIKRRYENQIQVKSESRGLMRSPKRVMKMKASHETENNVSCFRPRSLASVFAQEGGSAVFSYEGNCSSDQDLLLLDLPSNGSFPQAELLHQL

SEQ ID NO: 83978 - DNA, 691 bp, Arabidopsis thaliana
  misc_feature (1)..(691): Ceres Seq. ID no. 12672733
  misc_feature: MA Experiment ID: 20000355 Result: Down-regulated in Transcription
  misc_feature: MA Experiment 20000355 PARAMETER Experiment Name: At_Siliques_Sub_P Parameter: Age (day) Value: 21
  misc_feature: MA Experiment 20000355 PARAMETER Experiment Name: At_Siliques_Sub_P Parameter: Organism Value: A. thaliana
  misc_feature: MA Experiment 20000355 PARAMETER Experiment Name: At_Siliques_Sub_P Parameter: Plant Line Value: WS
  misc_feature: MA Experiment 20000355 PARAMETER Experiment Name: At_Siliques_Sub_P Parameter: Tissue Value: Less Than 5mm Siliques vs. Whole Plant
  misc_feature: MA Experiment ID: 20000440 Result: Down-regulated in Transcription
  misc_feature: MA Experiment 20000440 PARAMETER Experiment Name: At_Closed-Flower__Sub_P Parameter: Tissue Value: Closed Flower vs. Whole Plant
atggtgaggggcaaaacggagatgaagaggatagagaacgcaacaagcaggcaagtgacgttttcgaagagaagaaatggactcttgaagaaagccttcgaattatcggtcctttgtgatgctgaagttgctttggttatcttctctccaagatccaaactctatgagttctctagctctagtatagcagcaacaattgaacgctatcagagacgaataaaagaaattgggaataatcataagagaaatgataattctcagcaagcgagagacgaaacatctggattgacaaaaaagattgaacagctagagatatctaaacgaaaattgcttggagaaggcattgatgcatgttccatcgaggagctgcaacagttagagaatcagttggaccgaagcttgagcaggataagagccaagaagtaccaattactccgtgaagaaattgagaagttgaaggcagaggagaggaatctcgttaaggaaaataaagatctgaaggagaagtggcttggaatgggaacagcaacaatagcatcatcacaatcaacgttatcatcatcagaagtgaacatagatgacaatatggaagtggagactggtttgttcattggacctcctgagacaagacaatccaaaaaattccctcctcaaaattaatcttacaacttcttcaaaaagaatgttttaa

SEQ ID NO: 83979 - protein, 219 aa, Arabidopsis thaliana
  peptide (1)..(219): Ceres Seq. ID no. 12672734
  misc_feature (96)..(172): Pfam Name: K-box region Pfam Description: K-box region
  misc_feature (1)..(219): Homolog of NCBI NO: 15235869 NR Description: MADS-box protein; protein id: At4g22950.1, by cDNA: gi_11545542 [Arabidopsis thaliana]
  misc_feature (1)..(219): Homolog of NCBI NO: 15234342 NR Description: MADS-box protein AGL14; protein id: At4g11880.1
  misc_feature (7)..(219): Homolog of NCBI NO: 862644 NR Description: MADS-box protein AGL14
  misc_feature (1)..(208): Homolog of NCBI NO: 4322475 NR Description: putative MADS box transcription factor ETL
  misc_feature (1)..(210): Homolog of NCBI NO: 3493647 NR Description: transcription activator [Pimpinella brachycarpa]
  misc_feature (1)..(219): Homolog of NCBI NO: 13384056 NR Description: MADS-box transcription factor FBP21 [Petunia x
  misc_feature (1)..(213): Homolog of NCBI NO: 40641816 NR Description: putative MADS-box transcription factor DEFH68
  misc_feature (1)..(207): Homolog of NCBI NO: 15225534 NR Description: MADS-box protein (AGL20); protein id: supported by cDNA: 5467., supported by cDNA: gi_11496164, by cDNA: gi_14326553, supported by cDNA: gi_20334733 [Arabidopsis
  misc_feature (1)..(219): Homolog of NCBI NO: 1076646 NR Description: MADS box protein mads1 - common tobacco
  misc_feature (1)..(207): Homolog of NCBI NO: 7446552 NR Description: MADS box protein A - white mustard
MVRGKTEMKRIENATSRQVTFSKRRNGLLKKAFELSVLCDAEVALVIFSPRSKLYEFSSSSIAATIERYQRRIKEIGNNHKRNDNSQQARDETSGLTKKIEQLEISKRKLLGEGIDACSIEELQQLENQLDRSLSRIRAKKYQLLREEIEKLKAEERNLVKENKDLKEKWLGMGTATIASSQSTLSSSEVNIDDNMEVETGLFIGPPETRQSKKFPPQN

SEQ ID NO: 83980 - protein, 212 aa, Arabidopsis thaliana
  peptide (1)..(212): Ceres Seq. ID no. 12672735
  misc_feature (89)..(165): Pfam Name: K-box region Pfam Description: K-box region
  misc_feature (1)..(212): Homolog of NCBI NO: 15235869 NR Description: MADS-box protein; protein id: At4g22950.1, by cDNA: gi_11545542 [Arabidopsis thaliana]
  misc_feature (1)..(212): Homolog of NCBI NO: 15234342 NR Description: MADS-box protein AGL14; protein id: At4g11880.1
  misc_feature (1)..(212): Homolog of NCBI NO: 862644 NR Description: MADS-box protein AGL14
  misc_feature (1)..(201): Homolog of NCBI NO: 4322475 NR Description: putative MADS box transcription factor ETL
  misc_feature (1)..(203): Homolog of NCBI NO: 3493647 NR Description: transcription activator [Pimpinella brachycarpa]
  misc_feature (1)..(212): Homolog of NCBI NO: 13384056 NR Description: MADS-box transcription factor FBP21 [Petunia x
  misc_feature (1)..(206): Homolog of NCBI NO: 40641816 NR Description: putative MADS-box transcription factor DEFH68
  misc_feature (1)..(200): Homolog of NCBI NO: 15225534 NR Description: MADS-box protein (AGL20); protein id: supported by cDNA: 5467., supported by cDNA: gi_11496164, by cDNA: gi_14326553, supported by cDNA: gi_20334733 [Arabidopsis
  misc_feature (1)..(212): Homolog of NCBI NO: 1076646 NR Description: MADS box protein mads1 - common tobacco
  misc_feature (1)..(200): Homolog of NCBI NO: 7446552 NR Description: MADS box protein A - white mustard
MKRIENATSRQVTFSKRRNGLLKKAFELSVLCDAEVALVIFSPRSKLYEFSSSSIAATIERYQRRIKEIGNNHKRNDNSQQARDETSGLTKKIEQLEISKRKLLGEGIDACSIEELQQLENQLDRSLSRIRAKKYQLLREEIEKLKAEERNLVKENKDLKEKWLGMGTATIASSQSTLSSSEVNIDDNMEVETGLFIGPPETRQSKKFPPQN

SEQ ID NO: 83981 - DNA, 897 bp, Arabidopsis thaliana
  misc_feature (1)..(897): Ceres Seq. ID no. 12672761
  misc_feature: MA Experiment ID: 20000451 Result: Down-regulated in Transcription
  misc_feature: MA Experiment 20000451 PARAMETER Experiment Name: At_CS6879_Shoots-Roots_P Parameter: Age (day) Value: 14
  misc_feature: MA Experiment 20000451 PARAMETER Experiment Name: At_CS6879_Shoots-Roots_P Parameter: Organism Value: A. thaliana
  misc_feature: MA Experiment 20000451 PARAMETER Experiment Name: At_CS6879_Shoots-Roots_P Parameter: Plant Line Value: CS6879 vs. WS
  misc_feature: MA Experiment 20000451 PARAMETER Experiment Name: At_CS6879_Shoots-Roots_P Parameter: Tissue Value: Roots
atggcgaagacgaaatatggagagagacataggaaagggttatggtcacctgaagaagacgagaagctaaggagcttcatcctctcttatggccattcttgctggaccactgttcccatcaaagctgggttacaaaggaatgggaagagctgcagattaagatggattaattacctaagaccagggttaaagagggatatgattagtgcagaagaagaagagactatcttgacgtttcattcttccttgggtaacaagtggtcgcaaatagctaaattcttaccgggaagaacagacaatgagataaagaactattggcactctcatttgaaaaagaaatggctcaagtctcagagcttacaagatgcaaaatctatttcccctccttcgtcttcatcatcatcacttgttgcttgtggaaaaagaaatccggaaaccttgatctcgaatcacgtgttctccttccagagacttctagagaacaaatcttcatctccctcacaagaaagcaacggaaataacagccatcaatgttcttctgctcctgagattccaaggcttttcttctctgaatggctttcttcttcatatccccacaccgattattcctctgagtttaccgactctaagcacagtcaagctccaaatgtcgaagagactctctcagcttatgaagaaatgggtgatgttgatcagttccattacaacgaaatgatgatcaacaacagcaactggactcttaacgacattgtgtttggttccaaatgtaagaagcaggagcatcatatttatagagaggcttcagattgtaattcttctgctgaattcttttctccatcaacaacgacgtaaattgcgtttattgtaatgtaaatcaaatttctaaggcaaaaccgg

SEQ ID NO: 83982 - protein, 283 aa, Arabidopsis thaliana
  peptide (1)..(283): Ceres Seq. ID no. 12672762
  misc_feature (12)..(59): Pfam Name: Myb-like DNA-binding domain Pfam Description: Myb-like DNA-binding domain
  misc_feature (1)..(283): Homolog of NCBI NO: 15235149 NR Description: myb family transcription factor; protein id:
  misc_feature (2)..(283): Homolog of NCBI NO: 25387539 NR Description: myb-like protein [imported] - Arabidopsis thaliana
  misc_feature (52)..(283): Homolog of NCBI NO: 11358530 NR Description: myb-related transcription factor MYB18 [imported] Arabidopsis thaliana (fragment) >gi|3941426|gb|AAC83589.1|
  misc_feature (4)..(261): Homolog of NCBI NO: 15242947 NR Description: myb family transcription factor(MYB19); protein At5g52260.1 [Arabidopsis thaliana] >gi|8885539|dbj|BAA97469.1|
  misc_feature (52)..(261): Homolog of NCBI NO: 11358531 NR Description: myb-related transcription factor MYB19 [imported] Arabidopsis thaliana (fragment) >gi|3941428|gb|AAC83590.1|
  misc_feature (5)..(147): Homolog of NCBI NO: 15229055 NR Description: myb family transcription factor; protein id:
  misc_feature (1)..(223): Homolog of NCBI NO: 28927688 NR Description: putative Myb-like DNA-binding protein [Oryza
  misc_feature (11)..(217): Homolog of NCBI NO: 22266673 NR Description: myb-related transcription factor VlMYBB1-1 [Vitis
  misc_feature (11)..(208): Homolog of NCBI NO: 15219313 NR Description: myb family transcription factor; protein id:
  misc_feature (1)..(123): Homolog of NCBI NO: 34913340 NR Description: contains ESTs to Oryza sativa chromosome 1, OSJNBa0026J14.1~unknown protein
MAKTKYGERHRKGLWSPEEDEKLRSFILSYGHSCWTTVPIKAGLQRNGKSCRLRWINYLRPGLKRDMISAEEEETILTFHSSLGNKWSQIAKFLPGRTDNEIKNYWHSHLKKKWLKSQSLQDAKSISPPSSSSSSLVACGKRNPETLISNHVFSFQRLLENKSSSPSQESNGNNSHQCSSAPEIPRLFFSEWLSSSYPHTDYSSEFTDSKHSQAPNVEETLSAYEEMGDVDQFHYNEMMINNSNWTLNDIVFGSKCKKQEHHIYREASDCNSSAEFFSPSTTT

SEQ ID NO: 83983 - protein, 217 aa, Arabidopsis thaliana
  peptide (1)..(217): Ceres Seq. ID no. 12672763
  misc_feature (1)..(217): Homolog of NCBI NO: 15235149 NR Description: myb family transcription factor; protein id:
  misc_feature (1)..(217): Homolog of NCBI NO: 25387539 NR Description: myb-like protein [imported] - Arabidopsis thaliana
  misc_feature (1)..(217): Homolog of NCBI NO: 11358530 NR Description: myb-related transcription factor MYB18 [imported] Arabidopsis thaliana (fragment) >gi|3941426|gb|AAC83589.1|
  misc_feature (1)..(195): Homolog of NCBI NO: 15242947 NR Description: myb family transcription factor(MYB19); protein At5g52260.1 [Arabidopsis thaliana] >gi|8885539|dbj|BAA97469.1|
  misc_feature (1)..(195): Homolog of NCBI NO: 11358531 NR Description: myb-related transcription factor MYB19 [imported] Arabidopsis thaliana (fragment) >gi|3941428|gb|AAC83590.1|
  misc_feature (1)..(81): Homolog of NCBI NO: 15229055 NR Description: myb family transcription factor; protein id:
  misc_feature (1)..(157): Homolog of NCBI NO: 28927688 NR Description: putative Myb-like DNA-binding protein [Oryza
  misc_feature (1)..(151): Homolog of NCBI NO: 22266673 NR Description: myb-related transcription factor VlMYBB1-1 [Vitis
  misc_feature (1)..(142): Homolog of NCBI NO: 15219313 NR Description: myb family transcription factor; protein id:
  misc_feature (1)..(57): Homolog of NCBI NO: 34913340 NR Description: contains ESTs to Oryza sativa chromosome 1, OSJNBa0026J14.1~unknown protein
MISAEEEETILTFHSSLGNKWSQIAKFLPGRTDNEIKNYWHSHLKKKWLKSQSLQDAKSISPPSSSSSSLVACGKRNPETLISNHVFSFQRLLENKSSSPSQESNGNNSHQCSSAPEIPRLFFSEWLSSSYPHTDYSSEFTDSKHSQAPNVEETLSAYEEMGDVDQFHYNEMMINNSNWTLNDIVFGSKCKKQEHHIYREASDCNSSAEFFSPSTTT

SEQ ID NO: 83984 - DNA, 1893 bp, Arabidopsis thaliana
  misc_feature (1)..(1893): Ceres Seq. ID no. 12672773
  misc_feature: MA Experiment ID: 20000307 Result: Down-regulated in Transcription
  misc_feature: MA Experiment 20000307 PARAMETER Experiment Name: At_Germinating_Seeds_Sub_P Parameter: Age (hr) Value: 24 vs. 0
  misc_feature: MA Experiment 20000307 PARAMETER Experiment Name: At_Germinating_Seeds_Sub_P Parameter: Organism Value: A. thaliana
  misc_feature: MA Experiment 20000307 PARAMETER Experiment Name: At_Germinating_Seeds_Sub_P Parameter: Plant Line Value: WS
  misc_feature: MA Experiment 20000307 PARAMETER Experiment Name: At_Germinating_Seeds_Sub_P Parameter: Tissue Value: Germinating Seeds
  misc_feature: MA Experiment ID: 20000315 Result: Down-regulated in Transcription
  misc_feature: MA Experiment 20000315 PARAMETER Experiment Name: At_14day_Shoots-Roots_Sub_P Parameter: Age (day) Value: 14
  misc_feature: MA Experiment 20000315 PARAMETER Experiment Name: At_14day_Shoots-Roots_Sub_P Parameter: Organism Value: A. thaliana
  misc_feature: MA Experiment 20000315 PARAMETER Experiment Name: At_14day_Shoots-Roots_Sub_P Parameter: Plant Line Value: WS
  misc_feature: MA Experiment 20000315 PARAMETER Experiment Name: At_14day_Shoots-Roots_Sub_P Parameter: Tissue Value: Shoots vs. Whole Plant
atgtacttgtgttgttcgcagatctcagaaaagagggtttttttattttctggaggtaataatattatgaagaggaatttcgagaggaacgatgacgacaagcctgagcgaaagcgtcctgctcttgctagtgtgattgttgaggctctgaaagttgacagtttgcagaagctttgctcgtctttggaacctatcctccgccgagtttacggtattggtgctgagcaggttagtgaggaggtggaacgggctttagcaaaattagtccctactaggcttactacaagttctgtattttctccgaaacgaattggaggtccagatggccggaacttgcagctgcatttcaagtctagattatctctccctttattcactggaggaagagtggaaggagagcaaggtgctactatccatgttgtattgattgatgcaaacacgggtcgtcctgtaacagttggaccagaagcttccctgaagcttgaggttgttgttcttgggggtgactttaacaatgaagatgatgaagattggacccaggaagagtttgaaagtcatgttgtaaaagagcgtgaaggaaagagacctttgcttactggagacttgtttgttgttctcaaggaaggggtaggcactttgggtgagattgttttcacggataattcgagttggattagaagtcgcaagttcaggcttggtttgagggtaccctctgggtactgtgatggcatacgtatacgtgaagcaaaaacagaagctttctctgttaaagatcacaggggcgaattgtacaagaagcattatccacctgctttgaatgatgaggtgtggaggttagagaagattggtaaagatggggcgtttcataagaggctaaccgctgcaggaatagtcactgtggaaggctttctgagacaattggtcagagattctacaaaattacgggctattcttggaagtggcatgtcaaataagatgtgggatttgctagtggagcatgcaaaaacatgtgtcctaagcggtaagctttatatctactatactgaagattcaaggtctgttggcgttgtattcaataacatctacgagttaagtggcctcataactgaagaccaatacttatctgctgattcactctctgaaagccaaaaggtatatgtggatggactggtgaagaaagcgtatgaaaattggaaccaggtcgtggagtatgaaggcgaatctcttttaaacttaaaccagcctgagaggttggatatttctcagactgatcctgtaacagctctggcaagttactctacggtgcctcttagtcagtttcctgaattcgctatagaagggtataatcaaacgctgacaacagccctacctcataacccacaagcacaatttgattttgttccccagcaagatcagtttatcggaatacagcaacctcaaactcaaaccaacatagagaatgaaaatgtaactaggttggttcttggtcctccacaatcatccacaggtgggtaccaagacatcaaatcttctgctgaccaggaaaatcttaatcctttcgaagactggacaaacctaagtgagaatgactttttctcggaggaagagatccggcaaacaagccatgacttgttagcgaatgaggacatgcaacagttgctcttcagcatgggaggtggcaaaggagaagatggttttactttcccatcgtttatgcagaatacaccaatgatgcagggatatgatgaggagggccgtgggcgatcaggaaaagcggttgttggatggctgaaggtaaaagctgctatgagatggggattcttcataaggaggaaagctgctgagaggagagcacagattgtggagcttcatgataataacgatggtaaatga

SEQ ID NO: 83985 - protein, 630 aa, Arabidopsis thaliana
  peptide (1)..(630): Ceres Seq. ID no. 12672774
  misc_feature (119)..(630): Homolog of NCBI NO: 7484830 NR Description: calmodulin-binding protein homolog F14M19.80 -
  misc_feature (17)..(461): Homolog of NCBI NO: 15242785 NR Description: calmodulin-binding protein; protein id: supported by cDNA: gi_15810500, supported by cDNA: gi_20259274
  misc_feature (456)..(630): Homolog of NCBI NO: 15242785 NR Description: calmodulin-binding protein; protein id: supported by cDNA: gi_15810500, supported by cDNA: gi_20259274
  misc_feature (75)..(628): Homolog of NCBI NO: 25354646 NR Description: probable calmodulin-binding protein [imported] -
  misc_feature (24)..(72): Homolog of NCBI NO: 25354646 NR Description: probable calmodulin-binding protein [imported] -
  misc_feature (123)..(442): Homolog of NCBI NO: 7489107 NR Description: calmodulin-binding protein TCB60 - common tobacco
  misc_feature (447)..(625): Homolog of NCBI NO: 7489107 NR Description: calmodulin-binding protein TCB60 - common tobacco
  misc_feature (20)..(411): Homolog of NCBI NO: 22329041 NR Description: calmodulin-binding protein; protein id:
  misc_feature (530)..(623): Homolog of NCBI NO: 22329041 NR Description: calmodulin-binding protein; protein id:
  misc_feature (124)..(623): Homolog of NCBI NO: 15224117 NR Description: calmodulin-binding protein; protein id:
MYLCCSQISEKRVFLFSGGNNIMKRNFERNDDDKPERKRPALASVIVEALKVDSLQKLCSSLEPILRRVYGIGAEQVSEEVERALAKLVPTRLTTSSVFSPKRIGGPDGRNLQLHFKSRLSLPLFTGGRVEGEQGATIHVVLIDANTGRPVTVGPEASLKLEVVVLGGDFNNEDDEDWTQEEFESHVVKEREGKRPLLTGDLFVVLKEGVGTLGEIVFTDNSSWIRSRKFRLGLRVPSGYCDGIRIREAKTEAFSVKDHRGELYKKHYPPALNDEVWRLEKIGKDGAFHKRLTAAGIVTVEGFLRQLVRDSTKLRAILGSGMSNKMWDLLVEHAKTCVLSGKLYIYYTEDSRSVGVVFNNIYELSGLITEDQYLSADSLSESQKVYVDGLVKKAYENWNQVVEYEGESLLNLNQPERLDISQTDPVTALASYSTVPLSQFPEFAIEGYNQTLTTALPHNPQAQFDFVPQQDQFIGIQQPQTQTNIENENVTRLVLGPPQSSTGGYQDIKSSADQENLNPFEDWTNLSENDFFSEEEIRQTSHDLLANEDMQQLLFSMGGGKGEDGFTFPSFMQNTPMMQGYDEEGRGRSGKAVVGWLKVKAAMRWGFFIRRKAAERRAQIVELHDNNDGK

SEQ ID NO: 83986 - protein, 608 aa, Arabidopsis thaliana
  peptide (1)..(608): Ceres Seq. ID no. 12672775
  misc_feature (97)..(608): Homolog of NCBI NO: 7484830 NR Description: calmodulin-binding protein homolog F14M19.80 -
  misc_feature (1)..(439): Homolog of NCBI NO: 15242785 NR Description: calmodulin-binding protein; protein id: supported by cDNA: gi_15810500, supported by cDNA: gi_20259274
  misc_feature (434)..(608): Homolog of NCBI NO: 15242785 NR Description: calmodulin-binding protein; protein id: supported by cDNA: gi_15810500, supported by cDNA: gi_20259274
  misc_feature (53)..(606): Homolog of NCBI NO: 25354646 NR Description: probable calmodulin-binding protein [imported] -
  misc_feature (2)..(50): Homolog of NCBI NO: 25354646 NR Description: probable calmodulin-binding protein [imported] -
  misc_feature (101)..(420): Homolog of NCBI NO: 7489107 NR Description: calmodulin-binding protein TCB60 - common tobacco
  misc_feature (425)..(603): Homolog of NCBI NO: 7489107 NR Description: calmodulin-binding protein TCB60 - common tobacco
  misc_feature (1)..(389): Homolog of NCBI NO: 22329041 NR Description: calmodulin-binding protein; protein id:
  misc_feature (508)..(601): Homolog of NCBI NO: 22329041 NR Description: calmodulin-binding protein; protein id:
  misc_feature (102)..(601): Homolog of NCBI NO: 15224117 NR Description: calmodulin-binding protein; protein id:
MKRNFERNDDDKPERKRPALASVIVEALKVDSLQKLCSSLEPILRRVYGIGAEQVSEEVERALAKLVPTRLTTSSVFSPKRIGGPDGRNLQLHFKSRLSLPLFTGGRVEGEQGATIHVVLIDANTGRPVTVGPEASLKLEVVVLGGDFNNEDDEDWTQEEFESHVVKEREGKRPLLTGDLFVVLKEGVGTLGEIVFTDNSSWIRSRKFRLGLRVPSGYCDGIRIREAKTEAFSVKDHRGELYKKHYPPALNDEVWRLEKIGKDGAFHKRLTAAGIVTVEGFLRQLVRDSTKLRAILGSGMSNKMWDLLVEHAKTCVLSGKLYIYYTEDSRSVGVVFNNIYELSGLITEDQYLSADSLSESQKVYVDGLVKKAYENWNQVVEYEGESLLNLNQPERLDISQTDPVTALASYSTVPLSQFPEFAIEGYNQTLTTALPHNPQAQFDFVPQQDQFIGIQQPQTQTNIENENVTRLVLGPPQSSTGGYQDIKSSADQENLNPFEDWTNLSENDFFSEEEIRQTSHDLLANEDMQQLLFSMGGGKGEDGFTFPSFMQNTPMMQGYDEEGRGRSGKAVVGWLKVKAAMRWGFFIRRKAAERRAQIVELHDNNDGK

SEQ ID NO: 83987 - DNA, 1624 bp, Arabidopsis thaliana
  misc_feature (1)..(1624): Ceres Seq. ID no. 12672776
  misc_feature: MA Experiment ID: 20000527 Result: Up-regulated in Transcription
  misc_feature: MA Experiment 20000527 PARAMETER Experiment Name: At_10percent_PEG_P Parameter: Age (day) Value: 20
  misc_feature: MA Experiment 20000527 PARAMETER Experiment Name: At_10percent_PEG_P Parameter: Organism Value: A. thaliana
  misc_feature: MA Experiment 20000527 PARAMETER Experiment Name: At_10percent_PEG_P Parameter: Plant Line Value: WS
  misc_feature: MA Experiment 20000527 PARAMETER Experiment Name: At_10percent_PEG_P Parameter: Timepoint (day) Value: 20
  misc_feature: MA Experiment 20000527 PARAMETER Experiment Name: At_10percent_PEG_P Parameter: Tissue Value: Whole Plant
  misc_feature: MA Experiment 20000527 PARAMETER Experiment Name: At_10percent_PEG_P Parameter: Treatment Value: 10percent PEG vs. No Treatment
  misc_feature: MA Experiment ID: 20001247 Result: Up-regulated in Transcription
  misc_feature: MA Experiment 20001247 PARAMETER Experiment Name: At_Far-red-induction_P Parameter: Age (day) Value: 7
  misc_feature: MA Experiment 20001247 PARAMETER Experiment Name: At_Far-red-induction_P Parameter: Light Value: Far-red vs. White
  misc_feature: MA Experiment 20001247 PARAMETER Experiment Name: At_Far-red-induction_P Parameter: Organism Value: A. thaliana
  misc_feature: MA Experiment 20001247 PARAMETER Experiment Name: At_Far-red-induction_P Parameter: Plant Line Value: Columbia
  misc_feature: MA Experiment 20001247 PARAMETER Experiment Name: At_Far-red-induction_P Parameter: Timepoint (hr) Value: 1
  misc_feature: MA Experiment 20001247 PARAMETER Experiment Name: At_Far-red-induction_P Parameter: Tissue Value: Whole Plant
  misc_feature: MA Experiment ID: 20001451 Result: Up-regulated in Transcription
  misc_feature: MA Experiment 20001451 PARAMETER Experiment Name: At_Far-red-induction_P Parameter: Age (day) Value: 7
  misc_feature: MA Experiment 20001451 PARAMETER Experiment Name: At_Far-red-induction_P Parameter: Light Value: Far-red vs. White
  misc_feature: MA Experiment 20001451 PARAMETER Experiment Name: At_Far-red-induction_P Parameter: Organism Value: A. thaliana
  misc_feature: MA Experiment 20001451 PARAMETER Experiment Name: At_Far-red-induction_P Parameter: Plant Line Value: Columbia
  misc_feature: MA Experiment 20001451 PARAMETER Experiment Name: At_Far-red-induction_P Parameter: Timepoint (hr) Value: 24
  misc_feature: MA Experiment 20001451 PARAMETER Experiment Name: At_Far-red-induction_P Parameter: Tissue Value: Whole Plant
  misc_feature: MA Experiment ID: 20001557 Result: Up-regulated in Transcription
  misc_feature: MA Experiment 20001557 PARAMETER Experiment Name: At_Drought_Soil_Dry_P Parameter: Age (day) Value: 27
  misc_feature: MA Experiment 20001557 PARAMETER Experiment Name: At_Drought_Soil_Dry_P Parameter: Organism Value: A. thaliana
  misc_feature: MA Experiment 20001557 PARAMETER Experiment Name: At_Drought_Soil_Dry_P Parameter: Plant Line Value: WS
  misc_feature: MA Experiment 20001557 PARAMETER Experiment Name: At_Drought_Soil_Dry_P Parameter: Post Timepoint (hr) Value: 3
  misc_feature: MA Experiment 20001557 PARAMETER Experiment Name: At_Drought_Soil_Dry_P Parameter: Post-Treatment Value: Re-Water vs. No Drought
  misc_feature: MA Experiment 20001557 PARAMETER Experiment Name: At_Drought_Soil_Dry_P Parameter: Timepoint (day) Value: 13
  misc_feature: MA Experiment 20001557 PARAMETER Experiment Name: At_Drought_Soil_Dry_P Parameter: Treatment Value: Drought vs. No Drought
  misc_feature: MA Experiment ID: 20001560 Result: Up-regulated in Transcription
  misc_feature: MA Experiment 20001560 PARAMETER Experiment Name: At_Drought_Soil_Dry_P Parameter: Age (day) Value: 28
  misc_feature: MA Experiment 20001560 PARAMETER Experiment Name: At_Drought_Soil_Dry_P Parameter: Organism Value: A. thaliana
  misc_feature: MA Experiment 20001560 PARAMETER Experiment Name: At_Drought_Soil_Dry_P Parameter: Plant Line Value: WS
  misc_feature: MA Experiment 20001560 PARAMETER Experiment Name: At_Drought_Soil_Dry_P Parameter: Post Timepoint (hr) Value: None
  misc_feature: MA Experiment 20001560 PARAMETER Experiment Name: At_Drought_Soil_Dry_P Parameter: Post-Treatment Value: None
  misc_feature: MA Experiment 20001560 PARAMETER Experiment Name: At_Drought_Soil_Dry_P Parameter: Timepoint (day) Value: 14
  misc_feature: MA Experiment 20001560 PARAMETER Experiment Name: At_Drought_Soil_Dry_P Parameter: Treatment Value: Drought vs. No Drought
ctctctgacgatgaaagagtattggacatctttggcttctctactcggcgttttagccttttgccaaagcctaatgaattctgtattcccaccagagctccgtttcgccatctcgaaactcttcaacaaattctttaaactcttctccaccttctgttacttcgacataacagagattgacggcgtcaacaccaacgagctttacaatgccgtccagctttacctcagctcctctgtctccatcgcaggtaaccgtctcagcctcacacgcgccgtcaactcctcctccgtcacattcggtctctccaacaacgactccatcgtcgacacgtttaactccgtcaccgtcgtctgggaacacatcgttacacagagacaaactcaaaccttcgcttggagaccaatgccggaagagaaacgtggcttcacgctccggatcaagaagaaagacaagaacttgatccttgattcttacttggattacatcatggagaaagctaacgagattcgtcggttgaatcaagatcggcttctttacacgaattcacgaggtgggtctcttgattctagaggtcttccttgggaatctgttccctttaagcatccgagtactttcgatactctcgctatggatccggttaagaagcaacagatcatggaggatcttaaagatttcgctgagtgtcaatctttttacgagagaactggtcgggcttggaaaagaggttacttgctctatggacctcccggaacagggaagtcgagcatgatcgccgccatggctaactatctccggtacgacatctacgatcttgagctcacggaggtcaaaagcaattctgaactgaggaagcttctgatgaagactagctccaagtcgataattgttatcgaggatattgattgttctatcaatttaacgaatcgtaacaagaaacagagcacagggagctataacgaaccggagatgttaaccgggtccggtttaggtgatgatttgggtgatgggaacactataacgctttcaggtttgttgaatttcactgatggactttggtcttgttgtggtagcgagaggatttttgtgttcacgacgaatcacattgagaagcttgatcctgcattgcttagaagtggaagaatggatatgcatatacacatgagttactgtacgttttcttcggtcaagattttattgaggaattacttggggtttgaggaaggtgatcttaacgacgttgttttgaaggagttagcggaagtggttgatagggctgagattacaccggctgacgtaagtgaggctttgattaagaatcggagggataaagagagagctgtgagggagcttttggttgatttgagaagtagagtggagagaaatgagaagaatgggaaatcgagggttcaaaatgtgagcttggaagagcaagagaatagagctttcgacagtctttacgcagaagagaatggaggagaagaagaagagattgaggataacatttgcaaaagtagtgatgattgttcttaattaggttttctaacgtttctatgttctacacaatgtgaaagttgtgtgacctttcttatgtttctccttttttgggtagttaactttttgaag

SEQ ID NO: 83988 - protein, 509 aa, Arabidopsis thaliana
  peptide (1)..(509): Ceres Seq. ID no. 12672777
  misc_feature (242)..(445): Pfam Name: ATPase family associated with various cellular Pfam Description: ATPase family associated with various cellular
  misc_feature (4)..(509): Homolog of NCBI NO: 18416629 NR Description: putative mitochondrial protein; protein id: supported by cDNA: gi_19715598 [Arabidopsis thaliana]
  misc_feature (20)..(509): Homolog of NCBI NO: 7485479 NR Description: hypothetical protein F14M19.110 - Arabidopsis >gi|4539301|emb|CAB39604.1| putative mitochondrial protein thaliana] >gi|7269434|emb|CAB79438.1| putative mitochondrial
  misc_feature (4)..(507): Homolog of NCBI NO: 15242143 NR Description: putative protein; protein id: At5g57480.1
  misc_feature (11)..(499): Homolog of NCBI NO: 15234674 NR Description: putative protein; protein id: At4g30250.1
  misc_feature (4)..(499): Homolog of NCBI NO: 15233037 NR Description: hypothetical protein; protein id: At3g28580.1, by cDNA: gi_18175626 [Arabidopsis thaliana]
  misc_feature (4)..(499): Homolog of NCBI NO: 15242536 NR Description: putative protein; protein id: At5g40010.1
  misc_feature (8)..(498): Homolog of NCBI NO: 15233010 NR Description: hypothetical protein; protein id: At3g28510.1, by cDNA: gi_20466451 [Arabidopsis thaliana]
  misc_feature (9)..(509): Homolog of NCBI NO: 15233016 NR Description: hypothetical protein; protein id: At3g28540.1
  misc_feature (3)..(489): Homolog of NCBI NO: 7485703 NR Description: hypothetical protein F18B3.210 - Arabidopsis >gi|4835244|emb|CAB42922.1| putative mitochondrial protein thaliana] >gi|13877697|gb|AAK43926.1|AF370607_1 putative
  misc_feature (3)..(489): Homolog of NCBI NO: 30693378 NR Description: AAA-type ATPase family [Arabidopsis thaliana] AT3g50930/F18B3_210 [Arabidopsis thaliana]
SLTMKEYWTSLASLLGVLAFCQSLMNSVFPPELRFAISKLFNKFFKLFSTFCYFDITEIDGVNTNELYNAVQLYLSSSVSIAGNRLSLTRAVNSSSVTFGLSNNDSIVDTFNSVTVVWEHIVTQRQTQTFAWRPMPEEKRGFTLRIKKKDKNLILDSYLDYIMEKANEIRRLNQDRLLYTNSRGGSLDSRGLPWESVPFKHPSTFDTLAMDPVKKQQIMEDLKDFAECQSFYERTGRAWKRGYLLYGPPGTGKSSMIAAMANYLRYDIYDLELTEVKSNSELRKLLMKTSSKSIIVIEDIDCSINLTNRNKKQSTGSYNEPEMLTGSGLGDDLGDGNTITLSGLLNFTDGLWSCCGSERIFVFTTNHIEKLDPALLRSGRMDMHIHMSYCTFSSVKILLRNYLGFEEGDLNDVVLKELAEVVDRAEITPADVSEALIKNRRDKERAVRELLVDLRSRVERNEKNGKSRVQNVSLEEQENRAFDSLYAEENGGEEEEIEDNICKSSDDCS

SEQ ID NO: 83989 - protein, 506 aa, Arabidopsis thaliana
  peptide (1)..(506): Ceres Seq. ID no. 12672778
  misc_feature (239)..(442): Pfam Name: ATPase family associated with various cellular Pfam Description: ATPase family associated with various cellular
  misc_feature (1)..(506): Homolog of NCBI NO: 18416629 NR Description: putative mitochondrial protein; protein id: supported by cDNA: gi_19715598 [Arabidopsis thaliana]
  misc_feature (17)..(506): Homolog of NCBI NO: 7485479 NR Description: hypothetical protein F14M19.110 - Arabidopsis >gi|4539301|emb|CAB39604.1| putative mitochondrial protein thaliana] >gi|7269434|emb|CAB79438.1| putative mitochondrial
  misc_feature (1)..(504): Homolog of NCBI NO: 15242143 NR Description: putative protein; protein id: At5g57480.1
  misc_feature (8)..(496): Homolog of NCBI NO: 15234674 NR Description: putative protein; protein id: At4g30250.1
  misc_feature (1)..(496): Homolog of NCBI NO: 15233037 NR Description: hypothetical protein; protein id: At3g28580.1, by cDNA: gi_18175626 [Arabidopsis thaliana]
  misc_feature (1)..(496): Homolog of NCBI NO: 15242536 NR Description: putative protein; protein id: At5g40010.1
  misc_feature (5)..(495): Homolog of NCBI NO: 15233010 NR Description: hypothetical protein; protein id: At3g28510.1, by cDNA: gi_20466451 [Arabidopsis thaliana]
  misc_feature (6)..(506): Homolog of NCBI NO: 15233016 NR Description: hypothetical protein; protein id: At3g28540.1
  misc_feature (1)..(486): Homolog of NCBI NO: 7485703 NR Description: hypothetical protein F18B3.210 - Arabidopsis >gi|4835244|emb|CAB42922.1| putative mitochondrial protein thaliana] >gi|13877697|gb|AAK43926.1|AF370607_1 putative
  misc_feature (1)..(486): Homolog of NCBI NO: 30693378 NR Description: AAA-type ATPase family [Arabidopsis thaliana] AT3g50930/F18B3_210 [Arabidopsis thaliana]
MKEYWTSLASLLGVLAFCQSLMNSVFPPELRFAISKLFNKFFKLFSTFCYFDITEIDGVNTNELYNAVQLYLSSSVSIAGNRLSLTRAVNSSSVTFGLSNNDSIVDTFNSVTVVWEHIVTQRQTQTFAWRPMPEEKRGFTLRIKKKDKNLILDSYLDYIMEKANEIRRLNQDRLLYTNSRGGSLDSRGLPWESVPFKHPSTFDTLAMDPVKKQQIMEDLKDFAECQSFYERTGRAWKRGYLLYGPPGTGKSSMIAAMANYLRYDIYDLELTEVKSNSELRKLLMKTSSKSIIVIEDIDCSINLTNRNKKQSTGSYNEPEMLTGSGLGDDLGDGNTITLSGLLNFTDGLWSCCGSERIFVFTTNHIEKLDPALLRSGRMDMHIHMSYCTFSSVKILLRNYLGFEEGDLNDVVLKELAEVVDRAEITPADVSEALIKNRRDKERAVRELLVDLRSRVERNEKNGKSRVQNVSLEEQENRAFDSLYAEENGGEEEEIEDNICKSSDDCS

SEQ ID NO: 83990 - protein, 485 aa, Arabidopsis thaliana
  peptide (1)..(485): Ceres Seq. ID no. 12672779
  misc_feature (218)..(421): Pfam Name: ATPase family associated with various cellular Pfam Description: ATPase family associated with various cellular
  misc_feature (1)..(485): Homolog of NCBI NO: 18416629 NR Description: putative mitochondrial protein; protein id: supported by cDNA: gi_19715598 [Arabidopsis thaliana]
  misc_feature (1)..(485): Homolog of NCBI NO: 7485479 NR Description: hypothetical protein F14M19.110 - Arabidopsis >gi|4539301|emb|CAB39604.1| putative mitochondrial protein thaliana] >gi|7269434|emb|CAB79438.1| putative mitochondrial
  misc_feature (1)..(483): Homolog of NCBI NO: 15242143 NR Description: putative protein; protein id: At5g57480.1
  misc_feature (1)..(475): Homolog of NCBI NO: 15234674 NR Description: putative protein; protein id: At4g30250.1
  misc_feature (1)..(475): Homolog of NCBI NO: 15233037 NR Description: hypothetical protein; protein id: At3g28580.1, by cDNA: gi_18175626 [Arabidopsis thaliana]
  misc_feature (1)..(475): Homolog of NCBI NO: 15242536 NR Description: putative protein; protein id: At5g40010.1
  misc_feature (1)..(474): Homolog of NCBI NO: 15233010 NR Description: hypothetical protein; protein id: At3g28510.1, by cDNA: gi_20466451 [Arabidopsis thaliana]
  misc_feature (1)..(485): Homolog of NCBI NO: 15233016 NR Description: hypothetical protein; protein id: At3g28540.1
  misc_feature (1)..(465): Homolog of NCBI NO: 7485703 NR Description: hypothetical protein F18B3.210 - Arabidopsis >gi|4835244|emb|CAB42922.1| putative mitochondrial protein thaliana] >gi|13877697|gb|AAK43926.1|AF370607_1 putative
  misc_feature (1)..(465): Homolog of NCBI NO: 30693378 NR Description: AAA-type ATPase family [Arabidopsis thaliana] AT3g50930/F18B3_210 [Arabidopsis thaliana]
MNSVFPPELRFAISKLFNKFFKLFSTFCYFDITEIDGVNTNELYNAVQLYLSSSVSIAGNRLSLTRAVNSSSVTFGLSNNDSIVDTFNSVTVVWEHIVTQRQTQTFAWRPMPEEKRGFTLRIKKKDKNLILDSYLDYIMEKANEIRRLNQDRLLYTNSRGGSLDSRGLPWESVPFKHPSTFDTLAMDPVKKQQIMEDLKDFAECQSFYERTGRAWKRGYLLYGPPGTGKSSMIAAMANYLRYDIYDLELTEVKSNSELRKLLMKTSSKSIIVIEDIDCSINLTNRNKKQSTGSYNEPEMLTGSGLGDDLGDGNTITLSGLLNFTDGLWSCCGSERIFVFTTNHIEKLDPALLRSGRMDMHIHMSYCTFSSVKILLRNYLGFEEGDLNDVVLKELAEVVDRAEITPADVSEALIKNRRDKERAVRELLVDLRSRVERNEKNGKSRVQNVSLEEQENRAFDSLYAEENGGEEEEIEDNICKSSDDCS

SEQ ID NO: 83991 - DNA, 3924 bp, Arabidopsis thaliana
  misc_feature (1)..(3924): Ceres Seq. ID no. 12672780
  misc_feature: MA Experiment ID: 20000314 Result: Down-regulated in Transcription
  misc_feature: MA Experiment 20000314 PARAMETER Experiment Name: At_14day_Shoots-Roots_Sub_P Parameter: Age (day) Value: 14
  misc_feature: MA Experiment 20000314 PARAMETER Experiment Name: At_14day_Shoots-Roots_Sub_P Parameter: Organism Value: A. thaliana
  misc_feature: MA Experiment 20000314 PARAMETER Experiment Name: At_14day_Shoots-Roots_Sub_P Parameter: Plant Line Value: WS
  misc_feature: MA Experiment 20000314 PARAMETER Experiment Name: At_14day_Shoots-Roots_Sub_P Parameter: Tissue Value: Roots vs. Whole Plant
  misc_feature: MA Experiment ID: 20000327 Result: Down-regulated in Transcription
  misc_feature: MA Experiment 20000327 PARAMETER Experiment Name: At_42deg_Heat_Sub_P Parameter: Age (day) Value: 14
  misc_feature: MA Experiment 20000327 PARAMETER Experiment Name: At_42deg_Heat_Sub_P Parameter: Organism Value: A. thaliana
  misc_feature: MA Experiment 20000327 PARAMETER Experiment Name: At_42deg_Heat_Sub_P Parameter: Plant Line Value: WS
  misc_feature: MA Experiment 20000327 PARAMETER Experiment Name: At_42deg_Heat_Sub_P Parameter: Temperature (deg C) Value: 42 vs. 22
  misc_feature: MA Experiment 20000327 PARAMETER Experiment Name: At_42deg_Heat_Sub_P Parameter: Timepoint (hr) Value: 1
  misc_feature: MA Experiment 20000327 PARAMETER Experiment Name: At_42deg_Heat_Sub_P Parameter: Tissue Value: Aerial
  misc_feature: MA Experiment ID: 20000328 Result: Down-regulated in Transcription
  misc_feature: MA Experiment 20000328 PARAMETER Experiment Name: At_42deg_Heat_Sub_P Parameter: Age (day) Value: 14
  misc_feature: MA Experiment 20000328 PARAMETER Experiment Name: At_42deg_Heat_Sub_P Parameter: Organism Value: A. thaliana
  misc_feature: MA Experiment 20000328 PARAMETER Experiment Name: At_42deg_Heat_Sub_P Parameter: Plant Line Value: WS
  misc_feature: MA Experiment 20000328 PARAMETER Experiment Name: At_42deg_Heat_Sub_P Parameter: Temperature (deg C) Value: 42 vs. 22
  misc_feature: MA Experiment 20000328 PARAMETER Experiment Name: At_42deg_Heat_Sub_P Parameter: Timepoint (hr) Value: 6
  misc_feature: MA Experiment 20000328 PARAMETER Experiment Name: At_42deg_Heat_Sub_P Parameter: Tissue Value: Aerial
  misc_feature: MA Experiment ID: 20000355 Result: Up-regulated in Transcription
  misc_feature: MA Experiment 20000355 PARAMETER Experiment Name: At_Siliques_Sub_P Parameter: Age (day) Value: 21
  misc_feature: MA Experiment 20000355 PARAMETER Experiment Name: At_Siliques_Sub_P Parameter: Organism Value: A. thaliana
  misc_feature: MA Experiment 20000355 PARAMETER Experiment Name: At_Siliques_Sub_P Parameter: Plant Line Value: WS
  misc_feature: MA Experiment 20000355 PARAMETER Experiment Name: At_Siliques_Sub_P Parameter: Tissue Value: Less Than 5mm Siliques vs. Whole Plant
ctaaccactttcctcccttaatttctatccctatatttattttcctttcattttcctctccaactaattacacacacttgaagctgaaaaaaatgcagccgtccggtgatccggcgccggaaaaggagaaagagatgacgcagccaaaagtgtcactgcttaagctcttctccttcgcagatttctatgattgtgttctaatgactcttggatccgtaggagcgtgcattcatggcgcctcggttccaatctttttcatcttctttggcaaactcatcaatattatcggtcttgcttatcttttcccaaaacaagcctctcacagagtcgccaagtactcgttggattttgtatacttgagtgtggctatactattttcatcatggttagaggttgcatgttggatgcatacgggagagaggcaagcggcgaagatgaggagagcttatctcaggtcaatgttaagccaagacataagcttattcgacaccgaagcttctacaggagaagtcatctccgccatcacctccgacatcctcgtcgtccaagatgctctctccgagaaggtagggaatttcttgcactacataagccggttcatagccggttttgcaattggattcactagtgtatggcaaataagtcttgtcactctatccatagtccccttaatcgctctagctggcggcatctatgcgttcgtcgccatcggacttattgctcgtgtccggaaatcatacatcaaggctggtgagattgcagaagaggtgatcgggaatgtgaggaccgtacaagcattcaccggtgaagaaagggcggtgagattataccgagaagcgctggagaatacgtataagtacgggagaaaagctggtttaaccaaaggattaggtcttggatcgatgcactgtgtcttgtttctatcttgggccttgctcgtatggttcacaagtgttgtggtccacaaggatatcgccgatggtggcaaatcattcactaccatgctcaacgttgtcatcgccggcctgtctcttggacaagcggcgcccgatatttctgcgtttgtacgggcaaaagccgctgcttatccaattttcaagatgattgaacggaacacggtgacaaaaacaagcgcaaaatctggccgtaaactagggaaagtagacgggcacattcaattcaaagacgcgactttcagttacccatctcgccctgatgtggtgatcttcgacaggttaaacctagctatccctgccgggaaaattgtggcacttgttggaggaagcggatcagggaagagcacggtcatatctttgatagagcggttctacgagcctatttctggagcagtgttgctagacgggaacaatatcagtgagctggatattaagtggttaagaggacagattggtttggttaaccaagaaccagctctgtttgcaacaacgattcgtgagaacattctgtatggcaaagacgacgcaactgctgaggagatcacccgtgccgcaaagctctcggaagccatttctttcatcaacaacctccctgaaggatttgagactcaggttggcgagagagggattcaactatctggcggacagaaacaaaggattgctatatcaagagcaattgtgaagaatccatcgatactcttactcgacgaagcaacaagtgctttagacgcagagtcggagaagagcgtgcaagaagcgctggatcgagtgatggttgggagaacaacggtggtggtggctcacagactctcaacggtaagaaatgctgacatcatagcagttgtacacgaaggtaaaatagttgagtttggaaaccacgagaatctcatatctaatcccgacggagcctactcttctcttcttcgtctccaagagactgcctcattgcagcgtaacccttccttgaatcgcacgctaagcagaccacatagtataaaatactcgcgggaactatcaagaacaagatccagcttctgttcagagagggaatcggtaactcgaccggatggggctgatccatccaaaaaagtgaaagtaacggtgggacgtctttactctatgatccgtccggactggatgtatggcgtgtgtggcacgatatgtgcctttatcgctggatctcaaatgccccttttcgcgcttggcgtctcgcaagccttagtttcctattacagtggttgggatgagactcaaaaagagatcaagaagatcgctatcctcttctgctgcgcgtccgttatcactctaattgtctacaccattgagcatatctgctttggcactatgggcgagcgtctcactctccgtgtccgcgaaaatatgttcagagcaatcttgaagaatgaaatcgggtggtttgatgaggtggacaacacaagctcaatgttggcatcgcggcttgagagcgatgcaactttgcttaaaaccatagtggtcgataggtcaacgattctactgcagaacttaggtctagttgtgacctcttttatcatagcatttatactcaactggcgtctcactcttgtcgtcttggccacatacccattggttataagcggacatatcagcgagaaacttttcatgcaaggatatggaggagacttgaacaaagcatacttaaaggccaacatgttggccggtgagtctgttagcaacatccgcacggtcgctgccttctgtgctgaggaaaagattctagaactttattcaagagagcttttagaaccttccaaaagttctttcaggcgtggacaaattgcaggacttttctacggtgtctctcagttcttcattttctcttcctatggcctcgccctctggtacggatcaactttgatggacaaaggattagcgggcttcaaatcagtgatgaaaacattcatggttttgattgtgacggcgttagcgatgggtgagacattggctctagctccggatctgctgaaaggaaaccagatggttgcgtccgtgtttgagatcttggaccggaaaactcagatcgttggagaaaccagcgaggagctgaacaatgtggaaggcacgattgagctcaaaggcgtccactttagctacccttcgagaccagatgttgtaattttccgggactttgatctgatagttcgtgccggaaagagcatggcgctcgttggacagagtggatctgggaaaagttctgttatttcactcattctccggttctatgacccgactgctggaaaagtcatgatagagggaaaagacatcaagaaactagatttgaaagcattgaggaaacacattggtcttgttcaacaagaaccagcacttttcgccacaacaatctacgagaacattttgtatggaaacgaaggagcatctcaatctgaagtcgtcgaatcagctatgctcgcaaatgctcacagcttcattacctctctcccagaaggttactctaccaaagtcggtgaacgtggagttcaaatgtcaggcgggcagagacagaggatcgctatcgctagagccattctcaagaatccagcaattctattacttgacgaagccacaagcgctttggacgttgaatctgagcgtgtggtacaacaagcattggatcggttaatggctaaccggacgactgtggtagttgctcacaggctatcgacgatcaagaacgctgacacgataagtgtattacacggaggtaagatcgtagagcaaggcagccaccgtaagctcgttctaaacaagagtggtccatattttaaacttatcagtcttcagcagcagcaacaaccttaaattaagtactatactttatttattgaaaaactctttttatttttatttttgtggaaaatattgatcatatactcatttgatgtgattatcttaatcttcttgatttaccgttggtaaaaaaaaagttacg

SEQ ID NO: 83992 - protein, 1263 aa, Arabidopsis thaliana
  peptide (1)..(1263): Ceres Seq. ID no. 12672781
  misc_feature (60)..(344): Pfam Name: ABC transporter transmembrane region Pfam Description: ABC transporter transmembrane region
  misc_feature (48)..(653): Homolog of NCBI NO: 28071306 NR Description: P0705A05.10 [Oryza sativa (japonica
  misc_feature (688)..(1259): Homolog of NCBI NO: 28071306 NR Description: P0705A05.10 [Oryza sativa (japonica
  misc_feature (41)..(1243): Homolog of NCBI NO: 22328760 NR Description: multidrug resistance P-glycoprotein, putative;
  misc_feature (41)..(669): Homolog of NCBI NO: 25407562 NR Description: hypothetical protein AT4g18050 [imported] -
  misc_feature (801)..(1243): Homolog of NCBI NO: 25407562 NR Description: hypothetical protein AT4g18050 [imported] -
  misc_feature (40)..(957): Homolog of NCBI NO: 18496818 NR Description: ABC transporter AbcB3 [Dictyostelium discoideum]
  misc_feature (957)..(1261): Homolog of NCBI NO: 18496818 NR Description: ABC transporter AbcB3 [Dictyostelium discoideum]
  misc_feature (447)..(1262): Homolog of NCBI NO: 24960750 NR Description: Hypothetical protein [Oryza sativa (japonica
  misc_feature (4)..(341): Homolog of NCBI NO: 24960750 NR Description: Hypothetical protein [Oryza sativa (japonica
  misc_feature (341)..(448): Homolog of NCBI NO: 24960750 NR Description: Hypothetical protein [Oryza sativa (japonica
NHFPPLISIPIFIFLSFSSPTNYTHLKLKKMQPSGDPAPEKEKEMTQPKVSLLKLFSFADFYDCVLMTLGSVGACIHGASVPIFFIFFGKLINIIGLAYLFPKQASHRVAKYSLDFVYLSVAILFSSWLEVACWMHTGERQAAKMRRAYLRSMLSQDISLFDTEASTGEVISAITSDILVVQDALSEKVGNFLHYISRFIAGFAIGFTSVWQISLVTLSIVPLIALAGGIYAFVAIGLIARVRKSYIKAGEIAEEVIGNVRTVQAFTGEERAVRLYREALENTYKYGRKAGLTKGLGLGSMHCVLFLSWALLVWFTSVVVHKDIADGGKSFTTMLNVVIAGLSLGQAAPDISAFVRAKAAAYPIFKMIERNTVTKTSAKSGRKLGKVDGHIQFKDATFSYPSRPDVVIFDRLNLAIPAGKIVALVGGSGSGKSTVISLIERFYEPISGAVLLDGNNISELDIKWLRGQIGLVNQEPALFATTIRENILYGKDDATAEEITRAAKLSEAISFINNLPEGFETQVGERGIQLSGGQKQRIAISRAIVKNPSILLLDEATSALDAESEKSVQEALDRVMVGRTTVVVAHRLSTVRNADIIAVVHEGKIVEFGNHENLISNPDGAYSSLLRLQETASLQRNPSLNRTLSRPHSIKYSRELSRTRSSFCSERESVTRPDGADPSKKVKVTVGRLYSMIRPDWMYGVCGTICAFIAGSQMPLFALGVSQALVSYYSGWDETQKEIKKIAILFCCASVITLIVYTIEHICFGTMGERLTLRVRENMFRAILKNEIGWFDEVDNTSSMLASRLESDATLLKTIVVDRSTILLQNLGLVVTSFIIAFILNWRLTLVVLATYPLVISGHISEKLFMQGYGGDLNKAYLKANMLAGESVSNIRTVAAFCAEEKILELYSRELLEPSKSSFRRGQIAGLFYGVSQFFIFSSYGLALWYGSTLMDKGLAGFKSVMKTFMVLIVTALAMGETLALAPDLLKGNQMVASVFEILDRKTQIVGETSEELNNVEGTIELKGVHFSYPSRPDVVIFRDFDLIVRAGKSMALVGQSGSGKSSVISLILRFYDPTAGKVMIEGKDIKKLDLKALRKHIGLVQQEPALFATTIYENILYGNEGASQSEVVESAMLANAHSFITSLPEGYSTKVGERGVQMSGGQRQRIAIARAILKNPAILLLDEATSALDVESERVVQQALDRLMANRTTVVVAHRLSTIKNADTISVLHGGKIVEQGSHRKLVLNKSGPYFKLISLQQQQQP

SEQ ID NO: 83993 - protein, 1233 aa, Arabidopsis thaliana
  peptide (1)..(1233): Ceres Seq. ID no. 12672782
  misc_feature (30)..(314): Pfam Name: ABC transporter transmembrane region Pfam Description: ABC transporter transmembrane region
  misc_feature (18)..(623): Homolog of NCBI NO: 28071306 NR Description: P0705A05.10 [Oryza sativa (japonica
  misc_feature (658)..(1229): Homolog of NCBI NO: 28071306 NR Description: P0705A05.10 [Oryza sativa (japonica
  misc_feature (11)..(1213): Homolog of NCBI NO: 22328760 NR Description: multidrug resistance P-glycoprotein, putative;
  misc_feature (11)..(639): Homolog of NCBI NO: 25407562 NR Description: hypothetical protein AT4g18050 [imported] -
  misc_feature (771)..(1213): Homolog of NCBI NO: 25407562 NR Description: hypothetical protein AT4g18050 [imported] -
  misc_feature (10)..(927): Homolog of NCBI NO: 18496818 NR Description: ABC transporter AbcB3 [Dictyostelium discoideum]
  misc_feature (927)..(1231): Homolog of NCBI NO: 18496818 NR Description: ABC transporter AbcB3 [Dictyostelium discoideum]
  misc_feature (417)..(1232): Homolog of NCBI NO: 24960750 NR Description: Hypothetical protein [Oryza sativa (japonica
  misc_feature (1)..(311): Homolog of NCBI NO: 24960750 NR Description: Hypothetical protein [Oryza sativa (japonica
  misc_feature (311)..(418): Homolog of NCBI NO: 24960750 NR Description: Hypothetical protein [Oryza sativa (japonica
MQPSGDPAPEKEKEMTQPKVSLLKLFSFADFYDCVLMTLGSVGACIHGASVPIFFIFFGKLINIIGLAYLFPKQASHRVAKYSLDFVYLSVAILFSSWLEVACWMHTGERQAAKMRRAYLRSMLSQDISLFDTEASTGEVISAITSDILVVQDALSEKVGNFLHYISRFIAGFAIGFTSVWQISLVTLSIVPLIALAGGIYAFVAIGLIARVRKSYIKAGEIAEEVIGNVRTVQAFTGEERAVRLYREALENTYKYGRKAGLTKGLGLGSMHCVLFLSWALLVWFTSVVVHKDIADGGKSFTTMLNVVIAGLSLGQAAPDISAFVRAKAAAYPIFKMIERNTVTKTSAKSGRKLGKVDGHIQFKDATFSYPSRPDVVIFDRLNLAIPAGKIVALVGGSGSGKSTVISLIERFYEPISGAVLLDGNNISELDIKWLRGQIGLVNQEPALFATTIRENILYGKDDATAEEITRAAKLSEAISFINNLPEGFETQVGERGIQLSGGQKQRIAISRAIVKNPSILLLDEATSALDAESEKSVQEALDRVMVGRTTVVVAHRLSTVRNADIIAVVHEGKIVEFGNHENLISNPDGAYSSLLRLQETASLQRNPSLNRTLSRPHSIKYSRELSRTRSSFCSERESVTRPDGADPSKKVKVTVGRLYSMIRPDWMYGVCGTICAFIAGSQMPLFALGVSQALVSYYSGWDETQKEIKKIAILFCCASVITLIVYTIEHICFGTMGERLTLRVRENMFRAILKNEIGWFDEVDNTSSMLASRLESDATLLKTIVVDRSTILLQNLGLVVTSFIIAFILNWRLTLVVLATYPLVISGHISEKLFMQGYGGDLNKAYLKANMLAGESVSNIRTVAAFCAEEKILELYSRELLEPSKSSFRRGQIAGLFYGVSQFFIFSSYGLALWYGSTLMDKGLAGFKSVMKTFMVLIVTALAMGETLALAPDLLKGNQMVASVFEILDRKTQIVGETSEELNNVEGTIELKGVHFSYPSRPDVVIFRDFDLIVRAGKSMALVGQSGSGKSSVISLILRFYDPTAGKVMIEGKDIKKLDLKALRKHIGLVQQEPALFATTIYENILYGNEGASQSEVVESAMLANAHSFITSLPEGYSTKVGERGVQMSGGQRQRIAIARAILKNPAILLLDEATSALDVESERVVQQALDRLMANRTTVVVAHRLSTIKNADTISVLHGGKIVEQGSHRKLVLNKSGPYFKLISLQQQQQP

SEQ ID NO: 83994 - protein, 1219 aa, Arabidopsis thaliana
  peptide (1)..(1219): Ceres Seq. ID no. 12672783
  misc_feature (16)..(300): Pfam Name: ABC transporter transmembrane region Pfam Description: ABC transporter transmembrane region
  misc_feature (4)..(609): Homolog of NCBI NO: 28071306 NR Description: P0705A05.10 [Oryza sativa (japonica
  misc_feature (644)..(1215): Homolog of NCBI NO: 28071306 NR Description: P0705A05.10 [Oryza sativa (japonica
  misc_feature (1)..(1199): Homolog of NCBI NO: 22328760 NR Description: multidrug resistance P-glycoprotein, putative;
  misc_feature (1)..(625): Homolog of NCBI NO: 25407562 NR Description: hypothetical protein AT4g18050 [imported] -
  misc_feature (757)..(1199): Homolog of NCBI NO: 25407562 NR Description: hypothetical protein AT4g18050 [imported] -
  misc_feature (1)..(913): Homolog of NCBI NO: 18496818 NR Description: ABC transporter AbcB3 [Dictyostelium discoideum]
  misc_feature (913)..(1217): Homolog of NCBI NO: 18496818 NR Description: ABC transporter AbcB3 [Dictyostelium discoideum]
  misc_feature (403)..(1218): Homolog of NCBI NO: 24960750 NR Description: Hypothetical protein [Oryza sativa (japonica
  misc_feature (1)..(297): Homolog of NCBI NO: 24960750 NR Description: Hypothetical protein [Oryza sativa (japonica
  misc_feature (297)..(404): Homolog of NCBI NO: 24960750 NR Description: Hypothetical protein [Oryza sativa (japonica
MTQPKVSLLKLFSFADFYDCVLMTLGSVGACIHGASVPIFFIFFGKLINIIGLAYLFPKQASHRVAKYSLDFVYLSVAILFSSWLEVACWMHTGERQAAKMRRAYLRSMLSQDISLFDTEASTGEVISAITSDILVVQDALSEKVGNFLHYISRFIAGFAIGFTSVWQISLVTLSIVPLIALAGGIYAFVAIGLIARVRKSYIKAGEIAEEVIGNVRTVQAFTGEERAVRLYREALENTYKYGRKAGLTKGLGLGSMHCVLFLSWALLVWFTSVVVHKDIADGGKSFTTMLNVVIAGLSLGQAAPDISAFVRAKAAAYPIFKMIERNTVTKTSAKSGRKLGKVDGHIQFKDATFSYPSRPDVVIFDRLNLAIPAGKIVALVGGSGSGKSTVISLIERFYEPISGAVLLDGNNISELDIKWLRGQIGLVNQEPALFATTIRENILYGKDDATAEEITRAAKLSEAISFINNLPEGFETQVGERGIQLSGGQKQRIAISRAIVKNPSILLLDEATSALDAESEKSVQEALDRVMVGRTTVVVAHRLSTVRNADIIAVVHEGKIVEFGNHENLISNPDGAYSSLLRLQETASLQRNPSLNRTLSRPHSIKYSRELSRTRSSFCSERESVTRPDGADPSKKVKVTVGRLYSMIRPDWMYGVCGTICAFIAGSQMPLFALGVSQALVSYYSGWDETQKEIKKIAILFCCASVITLIVYTIEHICFGTMGERLTLRVRENMFRAILKNEIGWFDEVDNTSSMLASRLESDATLLKTIVVDRSTILLQNLGLVVTSFIIAFILNWRLTLVVLATYPLVISGHISEKLFMQGYGGDLNKAYLKANMLAGESVSNIRTVAAFCAEEKILELYSRELLEPSKSSFRRGQIAGLFYGVSQFFIFSSYGLALWYGSTLMDKGLAGFKSVMKTFMVLIVTALAMGETLALAPDLLKGNQMVASVFEILDRKTQIVGETSEELNNVEGTIELKGVHFSYPSRPDVVIFRDFDLIVRAGKSMALVGQSGSGKSSVISLILRFYDPTAGKVMIEGKDIKKLDLKALRKHIGLVQQEPALFATTIYENILYGNEGASQSEVVESAMLANAHSFITSLPEGYSTKVGERGVQMSGGQRQRIAIARAILKNPAILLLDEATSALDVESERVVQQALDRLMANRTTVVVAHRLSTIKNADTISVLHGGKIVEQGSHRKLVLNKSGPYFKLISLQQQQQP

SEQ ID NO: 83995 - DNA, 1572 bp, Arabidopsis thaliana
  misc_feature (1)..(1572): Ceres Seq. ID no. 12672824
  misc_feature: MA Experiment ID: 20000227 Result: Down-regulated in Transcription
  misc_feature: MA Experiment 20000227 PARAMETER Experiment Name: At_Root-Tips-vs-Tops_P Parameter: Tissue Value: Root Tips vs. Root Tops
atggatacttccctcttttctttatttgttccaatccttgttttcgtttttattgctctttttaagaaatcaaagaaaccaaaacatgtaaaagctcctgcaccaagtggtgcgtggcccatcatcggtcatcttcaccttctcagtggcaaggaacagcttctttaccgaaccttaggaaaaatggctgaccagtacggtccagccatgtcgctacgacttgggagcagtgaaacatttgttgtgagcagttttgaggtggctaaagattgttttactgtgaacgacaaagccttggcttcacgtcctattactgcagccgcaaagcacatgggttacgattgtgctgttttcgggtttgcgccttatagcgctttctggcgtgagatgcgtaaaatcgcaaccctcgagctactttctaaccggcggcttcagatgctcaagcatgtccgtgtttctgagatctcaatggttatgcaagatttgtattccttgtgggtcaagaaaggtggttcagaaccagtaatggttgatctaaagagctggttagaggatatgagtctgaacatgatggtgagaatggtggccggaaagcgatactttggaggcggctcgttatcccctgaagatgccgaagaggcaaggcaatgcagaaagggcgtcgcaaatttctttcacctcgtcggtatattcaccgtgtccgatgcttttccgaaactagggtggtttgattttcaaggacatgagaaggagatgaagcaaacaggaagagaattagatgtgatccttgaaagatggattgaaaaccatcgacaacaacgaaaagtttcaggaacgaaacacaatgattcagacttcgtcgacgttatgctgtcgcttgcagaacaaggcaaattctcgcatcttcaacatgatgcaattactagcattaaatctacctgcctggcactgattcttggaggaagtgagacttcaccatcaacccttacatgggccatttctcttcttctaaacaataaggacatgttaaagaaagcacaagatgagatcgacatccacgtcggcagagacaggaacgtcgaggattcagacatagaaaatctggtgtatattcaagcgattatcaaagaaacattgagattgtatccagctggtcctctcttaggccatcgagaggcgatagaagattgcacggtcgctggttacaacgttcgtcgcggcacaagaatgttagtgaatgtatggaaaatccaaagagatccgagggtttatatggagccaaacgaatttcgaccagagaggtttatcacaggagaagcaaaagagttcgatgtaagaggacaaaactttgagctgatgccatttggttcgggaagaagatcatgcccaggctcttcattggccatgcaagtgcttcatttaggtcttgctcgtttccttcaatcatttgacgtgaaaactgttatggatatgcctgttgatatgactgagagccctggcttaaccattcctaaagccacgcctcttgagattctgatcagtccacgtcttaaggaagggctttatgtgtga

SEQ ID NO: 83996 - protein, 523 aa, Arabidopsis thaliana
  peptide (1)..(523): Ceres Seq. ID no. 12672825
  misc_feature (1)..(523): Homolog of NCBI NO: 15236615 NR Description: cytochrome p450 family; protein id: At4g31970.1
  misc_feature (1)..(523): Homolog of NCBI NO: 15236586 NR Description: cytochrome p450, putative; protein id: At4g31940.1
  misc_feature (1)..(523): Homolog of NCBI NO: 15236613 NR Description: cytochrome p450 family; protein id: At4g31950.1
  misc_feature (126)..(523): Homolog of NCBI NO: 7430660 NR Description: cytochrome P450 F10N7.240 - Arabidopsis thaliana
  misc_feature (1)..(145): Homolog of NCBI NO: 7430660 NR Description: cytochrome P450 F10N7.240 - Arabidopsis thaliana
MDTSLFSLFVPILVFVFIALFKKSKKPKHVKAPAPSGAWPIIGHLHLLSGKEQLLYRTLGKMADQYGPAMSLRLGSSETFVVSSFEVAKDCFTVNDKALASRPITAAAKHMGYDCAVFGFAPYSAFWREMRKIATLELLSNRRLQMLKHVRVSEISMVMQDLYSLWVKKGGSEPVMVDLKSWLEDMSLNMMVRMVAGKRYFGGGSLSPEDAEEARQCRKGVANFFHLVGIFTVSDAFPKLGWFDFQGHEKEMKQTGRELDVILERWIENHRQQRKVSGTKHNDSDFVDVMLSLAEQGKFSHLQHDAITSIKSTCLALILGGSETSPSTLTWAISLLLNNKDMLKKAQDEIDIHVGRDRNVEDSDIENLVYIQAIIKETLRLYPAGPLLGHREAIEDCTVAGYNVRRGTRMLVNVWKIQRDPRVYMEPNEFRPERFITGEAKEFDVRGQNFELMPFGSGRRSCPGSSLAMQVLHLGLARFLQSFDVKTVMDMPVDMTESPGLTIPKATPLEILISPRLKEGLYV

SEQ ID NO: 83997 - protein, 462 aa, Arabidopsis thaliana
  peptide (1)..(462): Ceres Seq. ID no. 12672826
  misc_feature (1)..(462): Homolog of NCBI NO: 15236615 NR Description: cytochrome p450 family; protein id: At4g31970.1
  misc_feature (1)..(462): Homolog of NCBI NO: 15236586 NR Description: cytochrome p450, putative; protein id: At4g31940.1
  misc_feature (1)..(462): Homolog of NCBI NO: 15236613 NR Description: cytochrome p450 family; protein id: At4g31950.1
  misc_feature (65)..(462): Homolog of NCBI NO: 7430660 NR Description: cytochrome P450 F10N7.240 - Arabidopsis thaliana
  misc_feature (1)..(84): Homolog of NCBI NO: 7430660 NR Description: cytochrome P450 F10N7.240 - Arabidopsis thaliana
MADQYGPAMSLRLGSSETFVVSSFEVAKDCFTVNDKALASRPITAAAKHMGYDCAVFGFAPYSAFWREMRKIATLELLSNRRLQMLKHVRVSEISMVMQDLYSLWVKKGGSEPVMVDLKSWLEDMSLNMMVRMVAGKRYFGGGSLSPEDAEEARQCRKGVANFFHLVGIFTVSDAFPKLGWFDFQGHEKEMKQTGRELDVILERWIENHRQQRKVSGTKHNDSDFVDVMLSLAEQGKFSHLQHDAITSIKSTCLALILGGSETSPSTLTWAISLLLNNKDMLKKAQDEIDIHVGRDRNVEDSDIENLVYIQAIIKETLRLYPAGPLLGHREAIEDCTVAGYNVRRGTRMLVNVWKIQRDPRVYMEPNEFRPERFITGEAKEFDVRGQNFELMPFGSGRRSCPGSSLAMQVLHLGLARFLQSFDVKTVMDMPVDMTESPGLTIPKATPLEILISPRLKEGLYV

SEQ ID NO: 83998 - protein, 454 aa, Arabidopsis thaliana
  peptide (1)..(454): Ceres Seq. ID no. 12672827
  misc_feature (1)..(454): Homolog of NCBI NO: 15236615 NR Description: cytochrome p450 family; protein id: At4g31970.1
  misc_feature (1)..(454): Homolog of NCBI NO: 15236586 NR Description: cytochrome p450, putative; protein id: At4g31940.1
  misc_feature (1)..(454): Homolog of NCBI NO: 15236613 NR Description: cytochrome p450 family; protein id: At4g31950.1
  misc_feature (57)..(454): Homolog of NCBI NO: 7430660 NR Description: cytochrome P450 F10N7.240 - Arabidopsis thaliana
  misc_feature (1)..(76): Homolog of NCBI NO: 7430660 NR Description: cytochrome P450 F10N7.240 - Arabidopsis thaliana
MSLRLGSSETFVVSSFEVAKDCFTVNDKALASRPITAAAKHMGYDCAVFGFAPYSAFWREMRKIATLELLSNRRLQMLKHVRVSEISMVMQDLYSLWVKKGGSEPVMVDLKSWLEDMSLNMMVRMVAGKRYFGGGSLSPEDAEEARQCRKGVANFFHLVGIFTVSDAFPKLGWFDFQGHEKEMKQTGRELDVILERWIENHRQQRKVSGTKHNDSDFVDVMLSLAEQGKFSHLQHDAITSIKSTCLALILGGSETSPSTLTWAISLLLNNKDMLKKAQDEIDIHVGRDRNVEDSDIENLVYIQAIIKETLRLYPAGPLLGHREAIEDCTVAGYNVRRGTRMLVNVWKIQRDPRVYMEPNEFRPERFITGEAKEFDVRGQNFELMPFGSGRRSCPGSSLAMQVLHLGLARFLQSFDVKTVMDMPVDMTESPGLTIPKATPLEILISPRLKEGLYV

SEQ ID NO: 83999 - DNA, 761 bp, Arabidopsis thaliana
  misc_feature (1)..(761): Ceres Seq. ID no. 12672828
  misc_feature: MA Experiment ID: 20000315 Result: Up-regulated in Transcription
  misc_feature: MA Experiment 20000315 PARAMETER Experiment Name: At_14day_Shoots-Roots_Sub_P Parameter: Age (day) Value: 14
  misc_feature: MA Experiment 20000315 PARAMETER Experiment Name: At_14day_Shoots-Roots_Sub_P Parameter: Organism Value: A. thaliana
  misc_feature: MA Experiment 20000315 PARAMETER Experiment Name: At_14day_Shoots-Roots_Sub_P Parameter: Plant Line Value: WS
  misc_feature: MA Experiment 20000315 PARAMETER Experiment Name: At_14day_Shoots-Roots_Sub_P Parameter: Tissue Value: Shoots vs. Whole Plant
aacacacaacatagaataaaagagcttacagacaactaagaaaaaaaataaaaatgaagatgtttatctctcctcaaaccctagtactattggcattagctcttgtcctagcttttgcagttccactgaaagcccaagaccggcgacaagactaccttgatgtacacaaccatgctcgagacgacgttagtgtgcctcatataaaatggcatgcgggagcagcccgatacgcctggaactatgctcaaagaagaaagcgggactgtcgtctcattcactcaaactcacgcggacgttacggtgaaaacttggcatggagcagtggtgatatgtccggagctgccgcagtgagattgtgggtcagggagaagtctgactacttccacaaatcgaacacatgccgtgctggaaaacaatgtggtcattatactcaagttgtgtggaaaaactcagagtgggttggatgtgccaaagtcaagtgtgacaatggtggaacctttgtgacttgcaactattctcatcctggtaatgttaggggacgtaggccttactaactatatgtgtacgcagacgaaagaaacttgtccatagaggacgtgtgtgttttctataatttggaataaatgatcaccatctatcaggatgtggtggttcctttgtacgtttatagtttgtataatattttgtcatggaataatacttttttcttgtgtgtgcttaaaactgtaattatcattagatgatgcataatgggagttatt

SEQ ID NO: 84000 - protein, 166 aa, Arabidopsis thaliana
  peptide (1)..(166): Ceres Seq. ID no. 12672829
  misc_feature (35)..(153): Pfam Name: SCP-like extracellular protein Pfam Description: SCP-like extracellular protein
  misc_feature (1)..(166): Homolog of NCBI NO: 15235052 NR Description: pathogenesis-related protein 1 precursor, 18.9K; id: At4g33710.1, supported by cDNA: gi_17979362, supported by gi_20465514 [Arabidopsis thaliana] >gi|2129663|pir||S71270
  misc_feature (3)..(166): Homolog of NCBI NO: 15239598 NR Description: pathogenesis-related protein - like; protein id: [Arabidopsis thaliana] >gi|5107808|gb|AAD40121.1|AF149413_2
  misc_feature (1)..(166): Homolog of NCBI NO: 15235056 NR Description: pathogenesis-related protein 1 precursor, 19.3K; id: At4g33720.1, supported by cDNA: 5743., supported by cDNA:
  misc_feature (1)..(166): Homolog of NCBI NO: 15225965 NR Description: putative pathogenesis related-1 (PR1) protein; id: At2g14580.1, supported by cDNA: gi_17529119 [Arabidopsis
  misc_feature (1)..(165): Homolog of NCBI NO: 1228950 NR Description: pathogenesis-related protein 1 [Arabidopsis
  misc_feature (7)..(166): Homolog of NCBI NO: 19944 NR Description: PR-1a protein (AA 1 - 168) [Nicotiana tabacum]
  misc_feature (1)..(166): Homolog of NCBI NO: 536788 NR Description: PR1c preprotein [Nicotiana tabacum]
  misc_feature (1)..(166): Homolog of NCBI NO: 536789 NR Description: PR-1c protein [Nicotiana tabacum]
  misc_feature (3)..(166): Homolog of NCBI NO: 130828 NR Description: Pathogenesis-related protein 1C precursor (PR-1C)
  misc_feature (7)..(166): Homolog of NCBI NO: 130826 NR Description: Pathogenesis-related protein 1A precursor (PR-1A)
MKMFISPQTLVLLALALVLAFAVPLKAQDRRQDYLDVHNHARDDVSVPHIKWHAGAARYAWNYAQRRKRDCRLIHSNSRGRYGENLAWSSGDMSGAAAVRLWVREKSDYFHKSNTCRAGKQCGHYTQVVWKNSEWVGCAKVKCDNGGTFVTCNYSHPGNVRGRRPY

SEQ ID NO: 84001 - protein, 164 aa, Arabidopsis thaliana
  peptide (1)..(164): Ceres Seq. ID no. 12672830
  misc_feature (33)..(151): Pfam Name: SCP-like extracellular protein Pfam Description: SCP-like extracellular protein
  misc_feature (1)..(164): Homolog of NCBI NO: 15235052 NR Description: pathogenesis-related protein 1 precursor, 18.9K; id: At4g33710.1, supported by cDNA: gi_17979362, supported by gi_20465514 [Arabidopsis thaliana] >gi|2129663|pir||S71270
  misc_feature (1)..(164): Homolog of NCBI NO: 15239598 NR Description: pathogenesis-related protein - like; protein id: [Arabidopsis thaliana] >gi|5107808|gb|AAD40121.1|AF149413_2
  misc_feature (1)..(164): Homolog of NCBI NO: 15235056 NR Description: pathogenesis-related protein 1 precursor, 19.3K; id: At4g33720.1, supported by cDNA: 5743., supported by cDNA:
  misc_feature (1)..(164): Homolog of NCBI NO: 15225965 NR Description: putative pathogenesis related-1 (PR1) protein; id: At2g14580.1, supported by cDNA: gi_17529119 [Arabidopsis
  misc_feature (1)..(163): Homolog of NCBI NO: 1228950 NR Description: pathogenesis-related protein 1 [Arabidopsis
  misc_feature (5)..(164): Homolog of NCBI NO: 19944 NR Description: PR-1a protein (AA 1 - 168) [Nicotiana tabacum]
  misc_feature (1)..(164): Homolog of NCBI NO: 536788 NR Description: PR1c preprotein [Nicotiana tabacum]
  misc_feature (1)..(164): Homolog of NCBI NO: 536789 NR Description: PR-1c protein [Nicotiana tabacum]
  misc_feature (1)..(164): Homolog of NCBI NO: 130828 NR Description: Pathogenesis-related protein 1C precursor (PR-1C)
  misc_feature (5)..(164): Homolog of NCBI NO: 130826 NR Description: Pathogenesis-related protein 1A precursor (PR-1A)
MFISPQTLVLLALALVLAFAVPLKAQDRRQDYLDVHNHARDDVSVPHIKWHAGAARYAWNYAQRRKRDCRLIHSNSRGRYGENLAWSSGDMSGAAAVRLWVREKSDYFHKSNTCRAGKQCGHYTQVVWKNSEWVGCAKVKCDNGGTFVTCNYSHPGNVRGRRPY

SEQ ID NO: 84002 - DNA, 1635 bp, Arabidopsis thaliana
  misc_feature (1)..(1635): Ceres Seq. ID no. 12672831
  misc_feature: MA Experiment ID: 20001910 Result: Up-regulated in Transcription
  misc_feature: MA Experiment 20001910 PARAMETER Experiment Name: At_Drought_Reproduction_P Parameter: Age (day) Value: 37
  misc_feature: MA Experiment 20001910 PARAMETER Experiment Name: At_Drought_Reproduction_P Parameter: Organism Value: A. thaliana
  misc_feature: MA Experiment 20001910 PARAMETER Experiment Name: At_Drought_Reproduction_P Parameter: Plant Line Value: WS
  misc_feature: MA Experiment 20001910 PARAMETER Experiment Name: At_Drought_Reproduction_P Parameter: Timepoint (day) Value: 7
  misc_feature: MA Experiment 20001910 PARAMETER Experiment Name: At_Drought_Reproduction_P Parameter: Tissue Value: Flowers
  misc_feature: MA Experiment 20001910 PARAMETER Experiment Name: At_Drought_Reproduction_P Parameter: Treatment Value: Drought vs. No Drought
atgtgtctagagattccttataaaccacagtacaatggagggatcatcgtgaatcctgatatgcaaaatggttcccaaggctggtcacagttcgaaaatgcaaaagtcaatttcagagaatttggaggcaataagtttgttgttgccacacagagaaatcaatcttctgacagcgtctcacagaaggtttacttggaaaaaggaattctctacacattctctgcttggttacaagtaagcacaggaaaagctcctgtgagtgccgttttcaagaagaatggtgaatataagcatgccggttcggttgttgctgaatccaaatgttggtccatgctgaaaggtggcctcactgttgatgaatctggtcctgctgaactcttcgtcgagagcgaggacacaacagttgagatttgggttgatagtgtctctttgcaaccattcacacaagacgaatggaacgctcaccaggagcagagcattgacaattcaagaaaaggtcctgtcagaatcagagtcgtcaataacaaaggcgagaagataccaaacgcatccattaccatagaacagaagcgactcggattcccattcgggagcgctgtagcacagaacatacttgggaatcaagcataccaaaactggttcactcaaagattcaccgtgactacattcgaaaacgagatgaaatggtacagcacagaatctgtaagaggcatagagaattacacagtcgcggacgcaatgttgagattcttcaaccagcatggcattgctgtacgtggacacaatgttgtatgggaccaccctaagtatcaatctaaatgggttacttctctgtcacgtaacgatctatacaatgcagtaaaacgaagggttttctcggtggtctcgcgatacaaaggccagcttgccggttgggatgttgtgaatgagaatctccatcactccttctttgagagcaagtttggtcctaacgcctctaataacatcttcgcgatggcacatgccattgatccaagcacaacaatgtttatgaatgaattctatacattagaggaccctacagatctgaaagcgagtccagcgaagtatttggagaagcttagggagcttcaatctattcgggttcgcggaaacattccattggggatcggtcttgagtctcatttcagcactcctaacattccgtatatgagatcagctcttgatactcttggtgccactggtttgcctatttggctcactgagatcgacgttaaagctccttccagtgatcaggccaagtattttgagcaagtcctaagagagggacatgcgcatccgcatgtgaaaggaatggtgacgtggacagcttatgcaccaaattgctaccacatgtgcctcaccgatggaaacttcaagaatctaccaactggagatgttgtggacaagcttatacgtgaatggggagggctacgcagccaaactactgaagtcaccgatgctgatggattctttgaagcttcactctttcatggtgactatgatctcaatatttctcatcctctcaccaattcaagcgtttcacacaactttacgttgacttctgatgactcctctttacatacccaaccatcaacttttgtctttcgtgtttga

SEQ ID NO: 84003 - protein, 544 aa, Arabidopsis thaliana
  peptide (1)..(544): Ceres Seq. ID no. 12672832
  misc_feature (184)..(478): Pfam Name: Glycosyl hydrolase family 10 Pfam Description: Glycosyl hydrolase family 10
  misc_feature (1)..(544): Homolog of NCBI NO: 15235131 NR Description: glycosyl hydrolase family 10; protein id:
  misc_feature (2)..(544): Homolog of NCBI NO: 7485619 NR Description: hypothetical protein F17I5.30 - Arabidopsis >gi|3297808|emb|CAA19866.1| putative protein [Arabidopsis >gi|7270333|emb|CAB80101.1| putative protein [Arabidopsis
  misc_feature (2)..(544): Homolog of NCBI NO: 30689830 NR Description: glycosyl hydrolase family 10 [Arabidopsis
  misc_feature (2)..(544): Homolog of NCBI NO: 15235134 NR Description: glycosyl hydrolase family 10; protein id:
  misc_feature (2)..(536): Homolog of NCBI NO: 23429644 NR Description: endoxylanase [Carica papaya]
  misc_feature (2)..(329): Homolog of NCBI NO: 7485620 NR Description: hypothetical protein F17I5.40 - Arabidopsis >gi|3297809|emb|CAA19867.1| putative protein [Arabidopsis >gi|7270334|emb|CAB80102.1| putative protein [Arabidopsis
  misc_feature (111)..(320): Homolog of NCBI NO: 22329142 NR Description: glycosyl hydrolase family 10; protein id:
  misc_feature (350)..(473): Homolog of NCBI NO: 22329142 NR Description: glycosyl hydrolase family 10; protein id:
  misc_feature (8)..(536): Homolog of NCBI NO: 37533262 NR Description: putative 1,4-beta-xylanase [Oryza sativa
  misc_feature (2)..(535): Homolog of NCBI NO: 40363757 NR Description: putative 1,4-beta-xylanase [Triticum aestivum]
MCLEIPYKPQYNGGIIVNPDMQNGSQGWSQFENAKVNFREFGGNKFVVATQRNQSSDSVSQKVYLEKGILYTFSAWLQVSTGKAPVSAVFKKNGEYKHAGSVVAESKCWSMLKGGLTVDESGPAELFVESEDTTVEIWVDSVSLQPFTQDEWNAHQEQSIDNSRKGPVRIRVVNNKGEKIPNASITIEQKRLGFPFGSAVAQNILGNQAYQNWFTQRFTVTTFENEMKWYSTESVRGIENYTVADAMLRFFNQHGIAVRGHNVVWDHPKYQSKWVTSLSRNDLYNAVKRRVFSVVSRYKGQLAGWDVVNENLHHSFFESKFGPNASNNIFAMAHAIDPSTTMFMNEFYTLEDPTDLKASPAKYLEKLRELQSIRVRGNIPLGIGLESHFSTPNIPYMRSALDTLGATGLPIWLTEIDVKAPSSDQAKYFEQVLREGHAHPHVKGMVTWTAYAPNCYHMCLTDGNFKNLPTGDVVDKLIREWGGLRSQTTEVTDADGFFEASLFHGDYDLNISHPLTNSSVSHNFTLTSDDSSLHTQPSTFVFRV

SEQ ID NO: 84004 - protein, 524 aa, Arabidopsis thaliana
  peptide (1)..(524): Ceres Seq. ID no. 12672833
  misc_feature (164)..(458): Pfam Name: Glycosyl hydrolase family 10 Pfam Description: Glycosyl hydrolase family 10
  misc_feature (1)..(524): Homolog of NCBI NO: 15235131 NR Description: glycosyl hydrolase family 10; protein id:
  misc_feature (1)..(524): Homolog of NCBI NO: 7485619 NR Description: hypothetical protein F17I5.30 - Arabidopsis >gi|3297808|emb|CAA19866.1| putative protein [Arabidopsis >gi|7270333|emb|CAB80101.1| putative protein [Arabidopsis
  misc_feature (1)..(524): Homolog of NCBI NO: 30689830 NR Description: glycosyl hydrolase family 10 [Arabidopsis
  misc_feature (1)..(524): Homolog of NCBI NO: 15235134 NR Description: glycosyl hydrolase family 10; protein id:
  misc_feature (1)..(516): Homolog of NCBI NO: 23429644 NR Description: endoxylanase [Carica papaya]
  misc_feature (1)..(309): Homolog of NCBI NO: 7485620 NR Description: hypothetical protein F17I5.40 - Arabidopsis >gi|3297809|emb|CAA19867.1| putative protein [Arabidopsis >gi|7270334|emb|CAB80102.1| putative protein [Arabidopsis
  misc_feature (91)..(300): Homolog of NCBI NO: 22329142 NR Description: glycosyl hydrolase family 10; protein id:
  misc_feature (330)..(453): Homolog of NCBI NO: 22329142 NR Description: glycosyl hydrolase family 10; protein id:
  misc_feature (1)..(516): Homolog of NCBI NO: 37533262 NR Description: putative 1,4-beta-xylanase [Oryza sativa
  misc_feature (1)..(515): Homolog of NCBI NO: 40363757 NR Description: putative 1,4-beta-xylanase [Triticum aestivum]
MQNGSQGWSQFENAKVNFREFGGNKFVVATQRNQSSDSVSQKVYLEKGILYTFSAWLQVSTGKAPVSAVFKKNGEYKHAGSVVAESKCWSMLKGGLTVDESGPAELFVESEDTTVEIWVDSVSLQPFTQDEWNAHQEQSIDNSRKGPVRIRVVNNKGEKIPNASITIEQKRLGFPFGSAVAQNILGNQAYQNWFTQRFTVTTFENEMKWYSTESVRGIENYTVADAMLRFFNQHGIAVRGHNVVWDHPKYQSKWVTSLSRNDLYNAVKRRVFSVVSRYKGQLAGWDVVNENLHHSFFESKFGPNASNNIFAMAHAIDPSTTMFMNEFYTLEDPTDLKASPAKYLEKLRELQSIRVRGNIPLGIGLESHFSTPNIPYMRSALDTLGATGLPIWLTEIDVKAPSSDQAKYFEQVLREGHAHPHVKGMVTWTAYAPNCYHMCLTDGNFKNLPTGDVVDKLIREWGGLRSQTTEVTDADGFFEASLFHGDYDLNISHPLTNSSVSHNFTLTSDDSSLHTQPSTFVFRV

SEQ ID NO: 84005 - protein, 434 aa, Arabidopsis thaliana
  peptide (1)..(434): Ceres Seq. ID no. 12672834
  misc_feature (74)..(368): Pfam Name: Glycosyl hydrolase family 10 Pfam Description: Glycosyl hydrolase family 10
  misc_feature (1)..(434): Homolog of NCBI NO: 15235131 NR Description: glycosyl hydrolase family 10; protein id:
  misc_feature (1)..(434): Homolog of NCBI NO: 7485619 NR Description: hypothetical protein F17I5.30 - Arabidopsis >gi|3297808|emb|CAA19866.1| putative protein [Arabidopsis >gi|7270333|emb|CAB80101.1| putative protein [Arabidopsis
  misc_feature (1)..(434): Homolog of NCBI NO: 30689830 NR Description: glycosyl hydrolase family 10 [Arabidopsis
  misc_feature (1)..(434): Homolog of NCBI NO: 15235134 NR Description: glycosyl hydrolase family 10; protein id:
  misc_feature (1)..(426): Homolog of NCBI NO: 23429644 NR Description: endoxylanase [Carica papaya]
  misc_feature (1)..(219): Homolog of NCBI NO: 7485620 NR Description: hypothetical protein F17I5.40 - Arabidopsis >gi|3297809|emb|CAA19867.1| putative protein [Arabidopsis >gi|7270334|emb|CAB80102.1| putative protein [Arabidopsis
  misc_feature (1)..(210): Homolog of NCBI NO: 22329142 NR Description: glycosyl hydrolase family 10; protein id:
  misc_feature (240)..(363): Homolog of NCBI NO: 22329142 NR Description: glycosyl hydrolase family 10; protein id:
  misc_feature (1)..(426): Homolog of NCBI NO: 37533262 NR Description: putative 1,4-beta-xylanase [Oryza sativa
  misc_feature (1)..(425): Homolog of NCBI NO: 40363757 NR Description: putative 1,4-beta-xylanase [Triticum aestivum]
MLKGGLTVDESGPAELFVESEDTTVEIWVDSVSLQPFTQDEWNAHQEQSIDNSRKGPVRIRVVNNKGEKIPNASITIEQKRLGFPFGSAVAQNILGNQAYQNWFTQRFTVTTFENEMKWYSTESVRGIENYTVADAMLRFFNQHGIAVRGHNVVWDHPKYQSKWVTSLSRNDLYNAVKRRVFSVVSRYKGQLAGWDVVNENLHHSFFESKFGPNASNNIFAMAHAIDPSTTMFMNEFYTLEDPTDLKASPAKYLEKLRELQSIRVRGNIPLGIGLESHFSTPNIPYMRSALDTLGATGLPIWLTEIDVKAPSSDQAKYFEQVLREGHAHPHVKGMVTWTAYAPNCYHMCLTDGNFKNLPTGDVVDKLIREWGGLRSQTTEVTDADGFFEASLFHGDYDLNISHPLTNSSVSHNFTLTSDDSSLHTQPSTFVFRV

SEQ ID NO: 84006 - DNA, 2472 bp, Arabidopsis thaliana
  misc_feature (1)..(2472): Ceres Seq. ID no. 12672842
  misc_feature: MA Experiment ID: 20001247 Result: Down-regulated in Transcription
  misc_feature: MA Experiment 20001247 PARAMETER Experiment Name: At_Far-red-induction_P Parameter: Age (day) Value: 7
  misc_feature: MA Experiment 20001247 PARAMETER Experiment Name: At_Far-red-induction_P Parameter: Light Value: Far-red vs. White
  misc_feature: MA Experiment 20001247 PARAMETER Experiment Name: At_Far-red-induction_P Parameter: Organism Value: A. thaliana
  misc_feature: MA Experiment 20001247 PARAMETER Experiment Name: At_Far-red-induction_P Parameter: Plant Line Value: Columbia
  misc_feature: MA Experiment 20001247 PARAMETER Experiment Name: At_Far-red-induction_P Parameter: Timepoint (hr) Value: 1
  misc_feature: MA Experiment 20001247 PARAMETER Experiment Name: At_Far-red-induction_P Parameter: Tissue Value: Whole Plant
atgaaatttggaaccttttcacttcccagacaaattccaacctgcaaaggtgggcgctttacacgagttttgcaatctatcggatcagttattagagaattttcagcatctgcaaatgctttgcaagactgttggaaaaatgggaatgaaagtaaagagattgatgatgttcacacacttttcagatattgcactaatttgcaatcagccaaatgtctccacgcacgtctcgttgtctccaaacaaatccaaaatgtttgtatctctgctaaacttgttaatctctattgttaccttggcaatgtcgcattggctaggcacacgtttgatcatatccagaacagagatgtatacgcttggaatttgatgatttctggttatggccgtgcgggaaattcttcagaagtgattaggtgttttagtctctttatgttgagttctggacttacacctgattacaggacttttccttcggttttgaaagcttgtaggactgtgattgatgggaataagattcattgcttggctttgaagtttgggtttatgtgggatgtctatgttgctgcctcgttgattcatttgtactctcgatataaagctgtggggaatgcacgtatactgtttgatgaaatgcctgtaagagatatgggttcttggaatgcaatgatttctgggtattgtcaaagcggaaatgctaaagaggcgttaactctgtctaatgggttgagagctatggattcagttaccgttgtgagtctcctttcggcttgcactgaagccggtgatttcaatagaggagttactattcattcatactcgataaaacatggtctggagtccgaattgtttgtttccaacaagctgattgatttgtatgctgaatttggtaggcttagggattgccagaaggtttttgataggatgtatgtgagggatttgatttcttggaattcgataattaaggcgtacgagctgaatgagcagccgcttagagcgatttcgttgtttcaggagatgcggttgagtagaattcaaccagattgccttactttgattagtttggcttctatactatcacagttaggggacattcgtgcttgtagatctgtgcagggtttcactttgaggaaaggctggttcttggaagatattaccatcgggaatgctgttgtggttatgtatgcaaaactaggccttgtagattcagcaagagcagtgtttaattggcttccgaatacagatgttatttcatggaataccataatctcgggttatgctcaaaacggttttgctagtgaagcaattgaaatgtataacataatggaggaagaaggtgaaatagccgctaaccaagggacttgggtgagtgttttgcccgcttgttcgcaggctggagcgttgcgtcaaggtatgaaactccatggccgtctcttgaagaacggtctttatttggatgtttttgttgttacaagccttgctgatatgtatggaaagtgtggacgactagaggatgccctctctttgttttatcaaatcccaagagtcaactctgtgccatggaacaccctaatagcgtgtcacgggtttcacgggcatggcgagaaagcagtgatgctgttcaaagaaatgctggatgaaggagtgaagccagatcacattacatttgtgactctgttatcggcttgtagccattctgggttagtagacgagggtcaatggtgctttgagatgatgcaaacggattatgggataacaccgagcttgaaacattacggttgtatggtagatatgtatggtcgagctggtcagttagaaaccgcgttgaagtttataaaaagtatgtcgcttcagcctgatgcatccatttggggagctcttctcagcgcttgtagagtccatgggaatgttgatcttggcaagatcgcatctgaacatttgttcgaggttgaacctgagcatgtcgggtatcatgttctattgtcaaacatgtatgctagtgctggaaaatgggaaggagttgatgaaatacgttcaatagcccatggcaaaggtttgaggaagacaccgggttggagctcaatggaagtagacaacaaagtcgaagtcttttacacgggaaaccaaacgcatccaatgtatgaagagatgtacagagaattaacggcattacaagcgaaactgaagatgattgggtatgtaccggaccatagatttgtgttgcaggatgttgaagacgacgagaaagagcatatcctcatgagtcatagtgaaagattagctattgcatttgcacttatcgccactcctgcaaagacaacgattcggatttttaagaatctaagggtatgcggcgattgccatagcgtaaccaagttcatatcgaaaatcactgagagagagatcattgtgagggattcaaaccggtttcatcatttcaagaatggagtctgctcttgcggtgattactggtga

SEQ ID NO: 84007 - protein, 823 aa, Arabidopsis thaliana
  peptide (1)..(823): Ceres Seq. ID no. 12672843
  misc_feature (518)..(552): Pfam Name: PPR repeat Pfam Description: PPR repeat
  misc_feature (60)..(823): Homolog of NCBI NO: 15220337 NR Description: hypothetical protein; protein id: At1g11290.1
  misc_feature (61)..(823): Homolog of NCBI NO: 15234831 NR Description: putative protein; protein id: At4g30700.1
  misc_feature (100)..(823): Homolog of NCBI NO: 18483237 NR Description: putative vegetative storage protein [Sorghum
  misc_feature (3)..(823): Homolog of NCBI NO: 15234006 NR Description: putative protein; protein id: At4g18750.1
  misc_feature (88)..(823): Homolog of NCBI NO: 34903762 NR Description: unnamed protein product [Oryza sativa (japonica group)] >gi|7340873|dbj|BAA92963.1| unnamed protein product
  misc_feature (29)..(823): Homolog of NCBI NO: 15228590 NR Description: hypothetical protein; protein id: At3g03580.1 thaliana] >gi|6091764|gb|AAF03474.1|AC009327_13 hypothetical [Arabidopsis thaliana] >gi|28393735|gb|AAO42278.1| unknown
  misc_feature (78)..(823): Homolog of NCBI NO: 25354624 NR Description: protein F3O9.28 [imported] - Arabidopsis thaliana
  misc_feature (95)..(821): Homolog of NCBI NO: 15218216 NR Description: hypothetical protein; protein id: At1g15510.1
  misc_feature (191)..(823): Homolog of NCBI NO: 15231617 NR Description: unknown protein; protein id: At3g26780.1
  misc_feature (84)..(823): Homolog of NCBI NO: 15232837 NR Description: hypothetical protein; protein id: At3g02010.1 thaliana] >gi|6091739|gb|AAF03451.1|AC010797_27 hypothetical [Arabidopsis thaliana] >gi|6513930|gb|AAF14834.1|AC011664_16
MKFGTFSLPRQIPTCKGGRFTRVLQSIGSVIREFSASANALQDCWKNGNESKEIDDVHTLFRYCTNLQSAKCLHARLVVSKQIQNVCISAKLVNLYCYLGNVALARHTFDHIQNRDVYAWNLMISGYGRAGNSSEVIRCFSLFMLSSGLTPDYRTFPSVLKACRTVIDGNKIHCLALKFGFMWDVYVAASLIHLYSRYKAVGNARILFDEMPVRDMGSWNAMISGYCQSGNAKEALTLSNGLRAMDSVTVVSLLSACTEAGDFNRGVTIHSYSIKHGLESELFVSNKLIDLYAEFGRLRDCQKVFDRMYVRDLISWNSIIKAYELNEQPLRAISLFQEMRLSRIQPDCLTLISLASILSQLGDIRACRSVQGFTLRKGWFLEDITIGNAVVVMYAKLGLVDSARAVFNWLPNTDVISWNTIISGYAQNGFASEAIEMYNIMEEEGEIAANQGTWVSVLPACSQAGALRQGMKLHGRLLKNGLYLDVFVVTSLADMYGKCGRLEDALSLFYQIPRVNSVPWNTLIACHGFHGHGEKAVMLFKEMLDEGVKPDHITFVTLLSACSHSGLVDEGQWCFEMMQTDYGITPSLKHYGCMVDMYGRAGQLETALKFIKSMSLQPDASIWGALLSACRVHGNVDLGKIASEHLFEVEPEHVGYHVLLSNMYASAGKWEGVDEIRSIAHGKGLRKTPGWSSMEVDNKVEVFYTGNQTHPMYEEMYRELTALQAKLKMIGYVPDHRFVLQDVEDDEKEHILMSHSERLAIAFALIATPAKTTIRIFKNLRVCGDCHSVTKFISKITEREIIVRDSNRFHHFKNGVCSCGDYW

SEQ ID NO: 84008 - protein, 701 aa, Arabidopsis thaliana
  peptide (1)..(701): Ceres Seq. ID no. 12672844
  misc_feature (396)..(430): Pfam Name: PPR repeat Pfam Description: PPR repeat
  misc_feature (1)..(701): Homolog of NCBI NO: 15220337 NR Description: hypothetical protein; protein id: At1g11290.1
  misc_feature (1)..(701): Homolog of NCBI NO: 15234831 NR Description: putative protein; protein id: At4g30700.1
  misc_feature (1)..(701): Homolog of NCBI NO: 18483237 NR Description: putative vegetative storage protein [Sorghum
  misc_feature (1)..(701): Homolog of NCBI NO: 15234006 NR Description: putative protein; protein id: At4g18750.1
  misc_feature (1)..(701): Homolog of NCBI NO: 34903762 NR Description: unnamed protein product [Oryza sativa (japonica group)] >gi|7340873|dbj|BAA92963.1| unnamed protein product
  misc_feature (1)..(701): Homolog of NCBI NO: 15228590 NR Description: hypothetical protein; protein id: At3g03580.1 thaliana] >gi|6091764|gb|AAF03474.1|AC009327_13 hypothetical [Arabidopsis thaliana] >gi|28393735|gb|AAO42278.1| unknown
  misc_feature (1)..(701): Homolog of NCBI NO: 25354624 NR Description: protein F3O9.28 [imported] - Arabidopsis thaliana
  misc_feature (1)..(699): Homolog of NCBI NO: 15218216 NR Description: hypothetical protein; protein id: At1g15510.1
  misc_feature (69)..(701): Homolog of NCBI NO: 15231617 NR Description: unknown protein; protein id: At3g26780.1
  misc_feature (1)..(701): Homolog of NCBI NO: 15232837 NR Description: hypothetical protein; protein id: At3g02010.1 thaliana] >gi|6091739|gb|AAF03451.1|AC010797_27 hypothetical [Arabidopsis thaliana] >gi|6513930|gb|AAF14834.1|AC011664_16
MISGYGRAGNSSEVIRCFSLFMLSSGLTPDYRTFPSVLKACRTVIDGNKIHCLALKFGFMWDVYVAASLIHLYSRYKAVGNARILFDEMPVRDMGSWNAMISGYCQSGNAKEALTLSNGLRAMDSVTVVSLLSACTEAGDFNRGVTIHSYSIKHGLESELFVSNKLIDLYAEFGRLRDCQKVFDRMYVRDLISWNSIIKAYELNEQPLRAISLFQEMRLSRIQPDCLTLISLASILSQLGDIRACRSVQGFTLRKGWFLEDITIGNAVVVMYAKLGLVDSARAVFNWLPNTDVISWNTIISGYAQNGFASEAIEMYNIMEEEGEIAANQGTWVSVLPACSQAGALRQGMKLHGRLLKNGLYLDVFVVTSLADMYGKCGRLEDALSLFYQIPRVNSVPWNTLIACHGFHGHGEKAVMLFKEMLDEGVKPDHITFVTLLSACSHSGLVDEGQWCFEMMQTDYGITPSLKHYGCMVDMYGRAGQLETALKFIKSMSLQPDASIWGALLSACRVHGNVDLGKIASEHLFEVEPEHVGYHVLLSNMYASAGKWEGVDEIRSIAHGKGLRKTPGWSSMEVDNKVEVFYTGNQTHPMYEEMYRELTALQAKLKMIGYVPDHRFVLQDVEDDEKEHILMSHSERLAIAFALIATPAKTTIRIFKNLRVCGDCHSVTKFISKITEREIIVRDSNRFHHFKNGVCSCGDYW

SEQ ID NO: 84009 - protein, 680 aa, Arabidopsis thaliana
  peptide (1)..(680): Ceres Seq. ID no. 12672845
  misc_feature (375)..(409): Pfam Name: PPR repeat Pfam Description: PPR repeat
  misc_feature (1)..(680): Homolog of NCBI NO: 15220337 NR Description: hypothetical protein; protein id: At1g11290.1
  misc_feature (1)..(680): Homolog of NCBI NO: 15234831 NR Description: putative protein; protein id: At4g30700.1
  misc_feature (1)..(680): Homolog of NCBI NO: 18483237 NR Description: putative vegetative storage protein [Sorghum
  misc_feature (1)..(680): Homolog of NCBI NO: 15234006 NR Description: putative protein; protein id: At4g18750.1
  misc_feature (1)..(680): Homolog of NCBI NO: 34903762 NR Description: unnamed protein product [Oryza sativa (japonica group)] >gi|7340873|dbj|BAA92963.1| unnamed protein product
  misc_feature (1)..(680): Homolog of NCBI NO: 15228590 NR Description: hypothetical protein; protein id: At3g03580.1 thaliana] >gi|6091764|gb|AAF03474.1|AC009327_13 hypothetical [Arabidopsis thaliana] >gi|28393735|gb|AAO42278.1| unknown
  misc_feature (1)..(680): Homolog of NCBI NO: 25354624 NR Description: protein F3O9.28 [imported] - Arabidopsis thaliana
  misc_feature (1)..(678): Homolog of NCBI NO: 15218216 NR Description: hypothetical protein; protein id: At1g15510.1
  misc_feature (48)..(680): Homolog of NCBI NO: 15231617 NR Description: unknown protein; protein id: At3g26780.1
  misc_feature (1)..(680): Homolog of NCBI NO: 15232837 NR Description: hypothetical protein; protein id: At3g02010.1 thaliana] >gi|6091739|gb|AAF03451.1|AC010797_27 hypothetical [Arabidopsis thaliana] >gi|6513930|gb|AAF14834.1|AC011664_16
MLSSGLTPDYRTFPSVLKACRTVIDGNKIHCLALKFGFMWDVYVAASLIHLYSRYKAVGNARILFDEMPVRDMGSWNAMISGYCQSGNAKEALTLSNGLRAMDSVTVVSLLSACTEAGDFNRGVTIHSYSIKHGLESELFVSNKLIDLYAEFGRLRDCQKVFDRMYVRDLISWNSIIKAYELNEQPLRAISLFQEMRLSRIQPDCLTLISLASILSQLGDIRACRSVQGFTLRKGWFLEDITIGNAVVVMYAKLGLVDSARAVFNWLPNTDVISWNTIISGYAQNGFASEAIEMYNIMEEEGEIAANQGTWVSVLPACSQAGALRQGMKLHGRLLKNGLYLDVFVVTSLADMYGKCGRLEDALSLFYQIPRVNSVPWNTLIACHGFHGHGEKAVMLFKEMLDEGVKPDHITFVTLLSACSHSGLVDEGQWCFEMMQTDYGITPSLKHYGCMVDMYGRAGQLETALKFIKSMSLQPDASIWGALLSACRVHGNVDLGKIASEHLFEVEPEHVGYHVLLSNMYASAGKWEGVDEIRSIAHGKGLRKTPGWSSMEVDNKVEVFYTGNQTHPMYEEMYRELTALQAKLKMIGYVPDHRFVLQDVEDDEKEHILMSHSERLAIAFALIATPAKTTIRIFKNLRVCGDCHSVTKFISKITEREIIVRDSNRFHHFKNGVCSCGDYW

SEQ ID NO: 84010 - DNA, 1703 bp, Arabidopsis thaliana
  misc_feature (1)..(1703): Ceres Seq. ID no. 12672846
  misc_feature: MA Experiment ID: 20000173 Result: Down-regulated in Transcription
  misc_feature: MA Experiment 20000173 PARAMETER Experiment Name: At_42deg_Heat_P Parameter: Age (day) Value: 14
  misc_feature: MA Experiment 20000173 PARAMETER Experiment Name: At_42deg_Heat_P Parameter: Organism Value: A. thaliana
  misc_feature: MA Experiment 20000173 PARAMETER Experiment Name: At_42deg_Heat_P Parameter: Plant Line Value: WS
  misc_feature: MA Experiment 20000173 PARAMETER Experiment Name: At_42deg_Heat_P Parameter: Temperature (deg C) Value: 42 vs. 22
  misc_feature: MA Experiment 20000173 PARAMETER Experiment Name: At_42deg_Heat_P Parameter: Timepoint (hr) Value: 6
  misc_feature: MA Experiment 20000173 PARAMETER Experiment Name: At_42deg_Heat_P Parameter: Tissue Value: Aerial
  misc_feature: MA Experiment ID: 20000179 Result: Up-regulated in Transcription
  misc_feature: MA Experiment 20000179 PARAMETER Experiment Name: At_Germinating_Seeds_P Parameter: Age (hr) Value: 6 vs. 0
  misc_feature: MA Experiment 20000179 PARAMETER Experiment Name: At_Germinating_Seeds_P Parameter: Tissue Value: Germinating Seeds
  misc_feature: MA Experiment ID: 20000180 Result: Up-regulated in Transcription
  misc_feature: MA Experiment 20000180 PARAMETER Experiment Name: At_Germinating_Seeds_P Parameter: Age (hr) Value: 24 vs. 0
  misc_feature: MA Experiment 20000180 PARAMETER Experiment Name: At_Germinating_Seeds_P Parameter: Tissue Value: Germinating Seeds
  misc_feature: MA Experiment ID: 20000213 Result: Down-regulated in Transcription
  misc_feature: MA Experiment 20000213 PARAMETER Experiment Name: At_4deg_Cold_P Parameter: Timepoint (hr) Value: 2
  misc_feature: MA Experiment ID: 20000308 Result: Down-regulated in Transcription
  misc_feature: MA Experiment 20000308 PARAMETER Experiment Name: At_100mM_NaCl__P Parameter: Age (day) Value: 17
  misc_feature: MA Experiment 20000308 PARAMETER Experiment Name: At_100mM_NaCl__P Parameter: Organism Value: A. thaliana
  misc_feature: MA Experiment 20000308 PARAMETER Experiment Name: At_100mM_NaCl__P Parameter: Plant Line Value: WS
  misc_feature: MA Experiment 20000308 PARAMETER Experiment Name: At_100mM_NaCl__P Parameter: Timepoint (hr) Value: 72
  misc_feature: MA Experiment 20000308 PARAMETER Experiment Name: At_100mM_NaCl__P Parameter: Tissue Value: Whole Plant
  misc_feature: MA Experiment 20000308 PARAMETER Experiment Name: At_100mM_NaCl__P Parameter: Treatment Value: 100mM NaCl vs. No Treatment
  misc_feature: MA Experiment ID: 20000436 Result: Down-regulated in Transcription
  misc_feature: MA Experiment 20000436 PARAMETER Experiment Name: At_Drought_P Parameter: Age (day) Value: 7
  misc_feature: MA Experiment 20000436 PARAMETER Experiment Name: At_Drought_P Parameter: Organism Value: A. thaliana
  misc_feature: MA Experiment 20000436 PARAMETER Experiment Name: At_Drought_P Parameter: Plant Line Value: WS
  misc_feature: MA Experiment 20000436 PARAMETER Experiment Name: At_Drought_P Parameter: Timepoint (hr) Value: 12
  misc_feature: MA Experiment 20000436 PARAMETER Experiment Name: At_Drought_P Parameter: Tissue Value: Whole Plant
  misc_feature: MA Experiment 20000436 PARAMETER Experiment Name: At_Drought_P Parameter: Treatment Value: Drought vs. No Drought
  misc_feature: MA Experiment ID: 20000437 Result: Down-regulated in Transcription
  misc_feature: MA Experiment 20000437 PARAMETER Experiment Name: At_Drought_P Parameter: Age (day) Value: 8
  misc_feature: MA Experiment 20000437 PARAMETER Experiment Name: At_Drought_P Parameter: Organism Value: A. thaliana
  misc_feature: MA Experiment 20000437 PARAMETER Experiment Name: At_Drought_P Parameter: Plant Line Value: WS
  misc_feature: MA Experiment 20000437 PARAMETER Experiment Name: At_Drought_P Parameter: Timepoint (hr) Value: 24
  misc_feature: MA Experiment 20000437 PARAMETER Experiment Name: At_Drought_P Parameter: Tissue Value: Whole Plant
  misc_feature: MA Experiment 20000437 PARAMETER Experiment Name: At_Drought_P Parameter: Treatment Value: Drought vs. No Drought
  misc_feature: MA Experiment ID: 20000451 Result: Down-regulated in Transcription
  misc_feature: MA Experiment 20000451 PARAMETER Experiment Name: At_CS6879_Shoots-Roots_P Parameter: Age (day) Value: 14
  misc_feature: MA Experiment 20000451 PARAMETER Experiment Name: At_CS6879_Shoots-Roots_P Parameter: Organism Value: A. thaliana
  misc_feature: MA Experiment 20000451 PARAMETER Experiment Name: At_CS6879_Shoots-Roots_P Parameter: Plant Line Value: CS6879 vs. WS
  misc_feature: MA Experiment 20000451 PARAMETER Experiment Name: At_CS6879_Shoots-Roots_P Parameter: Tissue Value: Roots
  misc_feature: MA Experiment ID: 20000709 Result: Up-regulated in Transcription
  misc_feature: MA Experiment 20000709 PARAMETER Experiment Name: At_15mM_NH4NO3_L-to-H_P Parameter: Age (hr) Value: 14
  misc_feature: MA Experiment 20000709 PARAMETER Experiment Name: At_15mM_NH4NO3_L-to-H_P Parameter: Organism Value: A. thaliana
  misc_feature: MA Experiment 20000709 PARAMETER Experiment Name: At_15mM_NH4NO3_L-to-H_P Parameter: Plant Line Value: WS
  misc_feature: MA Experiment 20000709 PARAMETER Experiment Name: At_15mM_NH4NO3_L-to-H_P Parameter: Timepoint (hr) Value: 4
  misc_feature: MA Experiment 20000709 PARAMETER Experiment Name: At_15mM_NH4NO3_L-to-H_P Parameter: Tissue Value: Aerial
  misc_feature: MA Experiment 20000709 PARAMETER Experiment Name: At_15mM_NH4NO3_L-to-H_P Parameter: Treatment Value: 15mM NH4NO3 vs. 30mM Mannitol
  misc_feature: MA Experiment ID: 20001248 Result: Up-regulated in Transcription
  misc_feature: MA Experiment 20001248 PARAMETER Experiment Name: At_Far-red-induction_P Parameter: Age (day) Value: 7
  misc_feature: MA Experiment 20001248 PARAMETER Experiment Name: At_Far-red-induction_P Parameter: Light Value: Far-red vs. White
  misc_feature: MA Experiment 20001248 PARAMETER Experiment Name: At_Far-red-induction_P Parameter: Organism Value: A. thaliana
  misc_feature: MA Experiment 20001248 PARAMETER Experiment Name: At_Far-red-induction_P Parameter: Plant Line Value: Columbia
  misc_feature: MA Experiment 20001248 PARAMETER Experiment Name: At_Far-red-induction_P Parameter: Timepoint (hr) Value: 4
  misc_feature: MA Experiment 20001248 PARAMETER Experiment Name: At_Far-red-induction_P Parameter: Tissue Value: Whole Plant
  misc_feature: MA Experiment ID: 20001450 Result: Up-regulated in Transcription
  misc_feature: MA Experiment 20001450 PARAMETER Experiment Name: At_Far-red-induction_P Parameter: Age (day) Value: 7
  misc_feature: MA Experiment 20001450 PARAMETER Experiment Name: At_Far-red-induction_P Parameter: Light Value: Far-red vs. White
  misc_feature: MA Experiment 20001450 PARAMETER Experiment Name: At_Far-red-induction_P Parameter: Organism Value: A. thaliana
  misc_feature: MA Experiment 20001450 PARAMETER Experiment Name: At_Far-red-induction_P Parameter: Plant Line Value: Columbia
  misc_feature: MA Experiment 20001450 PARAMETER Experiment Name: At_Far-red-induction_P Parameter: Timepoint (hr) Value: 8
  misc_feature: MA Experiment 20001450 PARAMETER Experiment Name: At_Far-red-induction_P Parameter: Tissue Value: Whole Plant
  misc_feature: MA Experiment ID: 20001451 Result: Up-regulated in Transcription
  misc_feature: MA Experiment 20001451 PARAMETER Experiment Name: At_Far-red-induction_P Parameter: Age (day) Value: 7
  misc_feature: MA Experiment 20001451 PARAMETER Experiment Name: At_Far-red-induction_P Parameter: Light Value: Far-red vs. White
  misc_feature: MA Experiment 20001451 PARAMETER Experiment Name: At_Far-red-induction_P Parameter: Organism Value: A. thaliana
  misc_feature: MA Experiment 20001451 PARAMETER Experiment Name: At_Far-red-induction_P Parameter: Plant Line Value: Columbia
  misc_feature: MA Experiment 20001451 PARAMETER Experiment Name: At_Far-red-induction_P Parameter: Timepoint (hr) Value: 24
  misc_feature: MA Experiment 20001451 PARAMETER Experiment Name: At_Far-red-induction_P Parameter: Tissue Value: Whole Plant
  misc_feature: MA Experiment ID: 20001554 Result: Down-regulated in Transcription
  misc_feature: MA Experiment 20001554 PARAMETER Experiment Name: At_Drought_Soil_Dry_P Parameter: Age (day) Value: 21
  misc_feature: MA Experiment 20001554 PARAMETER Experiment Name: At_Drought_Soil_Dry_P Parameter: Organism Value: A. thaliana
  misc_feature: MA Experiment 20001554 PARAMETER Experiment Name: At_Drought_Soil_Dry_P Parameter: Plant Line Value: WS
  misc_feature: MA Experiment 20001554 PARAMETER Experiment Name: At_Drought_Soil_Dry_P Parameter: Post Timepoint (hr) Value: None
  misc_feature: MA Experiment 20001554 PARAMETER Experiment Name: At_Drought_Soil_Dry_P Parameter: Post-Treatment Value: None
  misc_feature: MA Experiment 20001554 PARAMETER Experiment Name: At_Drought_Soil_Dry_P Parameter: Timepoint (day) Value: 7
  misc_feature: MA Experiment 20001554 PARAMETER Experiment Name: At_Drought_Soil_Dry_P Parameter: Treatment Value: Drought vs. No Drought
  misc_feature: MA Experiment ID: 20001555 Result: Down-regulated in Transcription
  misc_feature: MA Experiment 20001555 PARAMETER Experiment Name: At_Drought_Soil_Dry_P Parameter: Age (day) Value: 24
  misc_feature: MA Experiment 20001555 PARAMETER Experiment Name: At_Drought_Soil_Dry_P Parameter: Organism Value: A. thaliana
  misc_feature: MA Experiment 20001555 PARAMETER Experiment Name: At_Drought_Soil_Dry_P Parameter: Plant Line Value: WS
  misc_feature: MA Experiment 20001555 PARAMETER Experiment Name: At_Drought_Soil_Dry_P Parameter: Post Timepoint (hr) Value: None
  misc_feature: MA Experiment 20001555 PARAMETER Experiment Name: At_Drought_Soil_Dry_P Parameter: Post-Treatment Value: None
  misc_feature: MA Experiment 20001555 PARAMETER Experiment Name: At_Drought_Soil_Dry_P Parameter: Timepoint (day) Value: 10
  misc_feature: MA Experiment 20001555 PARAMETER Experiment Name: At_Drought_Soil_Dry_P Parameter: Treatment Value: Drought vs. No Drought
  misc_feature: MA Experiment ID: 20001556 Result: Down-regulated in Transcription
  misc_feature: MA Experiment 20001556 PARAMETER Experiment Name: At_Drought_Soil_Dry_P Parameter: Age (day) Value: 26
  misc_feature: MA Experiment 20001556 PARAMETER Experiment Name: At_Drought_Soil_Dry_P Parameter: Organism Value: A. thaliana
  misc_feature: MA Experiment 20001556 PARAMETER Experiment Name: At_Drought_Soil_Dry_P Parameter: Plant Line Value: WS
  misc_feature: MA Experiment 20001556 PARAMETER Experiment Name: At_Drought_Soil_Dry_P Parameter: Post Timepoint (hr) Value: None
  misc_feature: MA Experiment 20001556 PARAMETER Experiment Name: At_Drought_Soil_Dry_P Parameter: Post-Treatment Value: None
  misc_feature: MA Experiment 20001556 PARAMETER Experiment Name: At_Drought_Soil_Dry_P Parameter: Timepoint (day) Value: 12
  misc_feature: MA Experiment 20001556 PARAMETER Experiment Name: At_Drought_Soil_Dry_P Parameter: Treatment Value: Drought vs. No Drought
  misc_feature: MA Experiment ID: 20001757 Result: Up-regulated in Transcription
  misc_feature: MA Experiment 20001757 PARAMETER Experiment Name: At_50mM_NH4NO3_L-to-H_P Parameter: Timepoint (hr) Value: 6
  misc_feature: MA Experiment 20001757 PARAMETER Experiment Name: At_50mM_NH4NO3_L-to-H_P Parameter: Tissue Value: Leaf
  misc_feature: MA Experiment 20001757 PARAMETER Experiment Name: At_50mM_NH4NO3_L-to-H_P Parameter: Treatment Value: 50mM NH4NO3 vs 100mM Mannitol
  misc_feature: MA Experiment ID: 20001905 Result: Down-regulated in Transcription
  misc_feature: MA Experiment 20001905 PARAMETER Experiment Name: At_Drought_Reproduction_P Parameter: Age (day) Value: 40
  misc_feature: MA Experiment 20001905 PARAMETER Experiment Name: At_Drought_Reproduction_P Parameter: Organism Value: A. thaliana
  misc_feature: MA Experiment 20001905 PARAMETER Experiment Name: At_Drought_Reproduction_P Parameter: Plant Line Value: WS
  misc_feature: MA Experiment 20001905 PARAMETER Experiment Name: At_Drought_Reproduction_P Parameter: Timepoint (day) Value: 10
  misc_feature: MA Experiment 20001905 PARAMETER Experiment Name: At_Drought_Reproduction_P Parameter: Tissue Value: Rosettes
  misc_feature: MA Experiment 20001905 PARAMETER Experiment Name: At_Drought_Reproduction_P Parameter: Treatment Value: Drought vs. No Drought
actctcttaccttgcctcttgcttcaacctcctaagcacattcttatctctttctgaaacgagttcccaaattagctctacaaaaaccaggatcttgatttctcatcagttaaacatgggaactcctgtcgaagtctctaagctccatttcttgctcttccctttcatggctcatggccatatgataccaactctagacatggctaagctctttgccaccaaaggagctaaatccactatcctcactacacctctcaatgccaagctcttcttcgagaaacccatcaaatcattcaaccaagacaacccgggactcgaagacatcaccatccagatccttaatttcccttgcacagagcttggtttgcctgatggctgtgagaatactgatttcatcttctccacacctgacctaaacgtaggtgacttgagtcaaaagtttttactcgcaatgaaatatttcgaagagccactagaggagctcctcgtgacaatgagaccagactgtcttgtcggtaacatgttcttcccttggtccactaaagttgctgagaagttcggagtaccgagacttgtgttccacggcacaggctacttctctttatgtgcttctcattgcataaggctccctaagaatgtggcaacaagttctgagccctttgtgattcctgatctcccgggagacattttgattacagaggaacaggtcatggagacagaagaagagtctgtaatggggaggtttatgaaggcaataagagactcagagagagatagctttggcgtgttggtgaacagcttctacgagcttgaacaggcttactcagattatttcaagagctttgtggcgaaaagagcgtggcatatcggtccgctttccttaggaaatagaaagttcgaggagaaagcagaaagaggcaaaaaggcaagcattgatgagcatgaatgtttgaaatggctcgactccaagaaatgtgattcagtgatttacatggcctttggaaccatgtctagctttaaaaacgagcagctgatagagattgcagctggtttagatatgtcaggacatgattttgtctgggtggttaacagaaaaggcagccaagttgagaaggaagattggttaccagaggggtttgaagagaagaccaagggaaaaggattgataatccgagggtgggcgccacaagtgctgatacttgagcacaaagcaattggcggatttttgacgcattgtggatggaactcgttattagaaggggtggcagcgggcctgccaatggtgacatggcccgtgggagccgagcagttctacaacgagaaattggtgacacaagtgttgaaaacaggagtgagtgtgggagtgaagaagatgatgcaagtagttggagacttcattagcagagagaaagtggagggagcggtgagggaagtgatggttggagaagagaggaggaaacgggccaaggagttagcagaaatggcgaaaaatgcggtgaaagaaggaggatcttcagatctagaggtagataggttgatggaagagcttacgttagttaaactgcaaaaagagaaggtataaagaagttgaatgtattgcaagttatggaacaataatgtttttgtaattctgatggtttgagttacaacagtaaaagattgtatttgttcattcaaatttacaatggatgatcttttagttt

SEQ ID NO: 84011 - protein, 526 aa, Arabidopsis thaliana
  peptide (1)..(526): Ceres Seq. ID no. 12672847
  misc_feature (39)..(526): Homolog of NCBI NO: 18418382 NR Description: similar to glucosyltransferase -like protein; id: At4g34138.1, supported by cDNA: gi_18086384, supported by gi_19699135 [Arabidopsis thaliana] >gi|18086385|gb|AAL57652.1|
  misc_feature (39)..(517): Homolog of NCBI NO: 7433898 NR Description: probable glucosyltransferase F28A23.110 (EC
  misc_feature (39)..(517): Homolog of NCBI NO: 18418380 NR Description: glucosyltransferase -like protein; protein id: supported by cDNA: gi_14334981 [Arabidopsis thaliana] putative glucosyltransferase [Arabidopsis thaliana]
  misc_feature (47)..(517): Homolog of NCBI NO: 18418378 NR Description: similar to glucosyltransferase -like protein; id: At4g34131.1, supported by cDNA: gi_17065353 [Arabidopsis >gi|17065354|gb|AAL32831.1| putative protein [Arabidopsis
  misc_feature (44)..(516): Homolog of NCBI NO: 25286796 NR Description: probable glucosyltransferase [imported] - thaliana >gi|4335714|gb|AAD17392.1| putative glucosyltransferase
  misc_feature (47)..(516): Homolog of NCBI NO: 30725312 NR Description: At2g15490 [Arabidopsis thaliana]
  misc_feature (67)..(516): Homolog of NCBI NO: 15226537 NR Description: putative glucosyltransferase; protein id: [Arabidopsis thaliana] >gi|25286797|pir||F84529 probable
  misc_feature (45)..(517): Homolog of NCBI NO: 13492674 NR Description: phenylpropanoid:glucosyltransferase 1 [Nicotiana
  misc_feature (45)..(517): Homolog of NCBI NO: 7433906 NR Description: glucosyltransferase IS5a (EC 2.4.1.-),
  misc_feature (45)..(517): Homolog of NCBI NO: 7433905 NR Description: glucosyltransferase IS10a (EC 2.4.1.-),
LSYLASCFNLLSTFLSLSETSSQISSTKTRILISHQLNMGTPVEVSKLHFLLFPFMAHGHMIPTLDMAKLFATKGAKSTILTTPLNAKLFFEKPIKSFNQDNPGLEDITIQILNFPCTELGLPDGCENTDFIFSTPDLNVGDLSQKFLLAMKYFEEPLEELLVTMRPDCLVGNMFFPWSTKVAEKFGVPRLVFHGTGYFSLCASHCIRLPKNVATSSEPFVIPDLPGDILITEEQVMETEEESVMGRFMKAIRDSERDSFGVLVNSFYELEQAYSDYFKSFVAKRAWHIGPLSLGNRKFEEKAERGKKASIDEHECLKWLDSKKCDSVIYMAFGTMSSFKNEQLIEIAAGLDMSGHDFVWVVNRKGSQVEKEDWLPEGFEEKTKGKGLIIRGWAPQVLILEHKAIGGFLTHCGWNSLLEGVAAGLPMVTWPVGAEQFYNEKLVTQVLKTGVSVGVKKMMQVVGDFISREKVEGAVREVMVGEERRKRAKELAEMAKNAVKEGGSSDLEVDRLMEELTLVKLQKEKV

SEQ ID NO: 84012 - protein, 488 aa, Arabidopsis thaliana
  peptide (1)..(488): Ceres Seq. ID no. 12672848
  misc_feature (1)..(488): Homolog of NCBI NO: 18418382 NR Description: similar to glucosyltransferase -like protein; id: At4g34138.1, supported by cDNA: gi_18086384, supported by gi_19699135 [Arabidopsis thaliana] >gi|18086385|gb|AAL57652.1|
  misc_feature (1)..(479): Homolog of NCBI NO: 7433898 NR Description: probable glucosyltransferase F28A23.110 (EC
  misc_feature (1)..(479): Homolog of NCBI NO: 18418380 NR Description: glucosyltransferase -like protein; protein id: supported by cDNA: gi_14334981 [Arabidopsis thaliana] putative glucosyltransferase [Arabidopsis thaliana]
  misc_feature (9)..(479): Homolog of NCBI NO: 18418378 NR Description: similar to glucosyltransferase -like protein; id: At4g34131.1, supported by cDNA: gi_17065353 [Arabidopsis >gi|17065354|gb|AAL32831.1| putative protein [Arabidopsis
  misc_feature (6)..(478): Homolog of NCBI NO: 25286796 NR Description: probable glucosyltransferase [imported] - thaliana >gi|4335714|gb|AAD17392.1| putative glucosyltransferase
  misc_feature (9)..(478): Homolog of NCBI NO: 30725312 NR Description: At2g15490 [Arabidopsis thaliana]
  misc_feature (29)..(478): Homolog of NCBI NO: 15226537 NR Description: putative glucosyltransferase; protein id: [Arabidopsis thaliana] >gi|25286797|pir||F84529 probable
  misc_feature (7)..(479): Homolog of NCBI NO: 13492674 NR Description: phenylpropanoid:glucosyltransferase 1 [Nicotiana
  misc_feature (7)..(479): Homolog of NCBI NO: 7433906 NR Description: glucosyltransferase IS5a (EC 2.4.1.-),
  misc_feature (7)..(479): Homolog of NCBI NO: 7433905 NR Description: glucosyltransferase IS10a (EC 2.4.1.-),
MGTPVEVSKLHFLLFPFMAHGHMIPTLDMAKLFATKGAKSTILTTPLNAKLFFEKPIKSFNQDNPGLEDITIQILNFPCTELGLPDGCENTDFIFSTPDLNVGDLSQKFLLAMKYFEEPLEELLVTMRPDCLVGNMFFPWSTKVAEKFGVPRLVFHGTGYFSLCASHCIRLPKNVATSSEPFVIPDLPGDILITEEQVMETEEESVMGRFMKAIRDSERDSFGVLVNSFYELEQAYSDYFKSFVAKRAWHIGPLSLGNRKFEEKAERGKKASIDEHECLKWLDSKKCDSVIYMAFGTMSSFKNEQLIEIAAGLDMSGHDFVWVVNRKGSQVEKEDWLPEGFEEKTKGKGLIIRGWAPQVLILEHKAIGGFLTHCGWNSLLEGVAAGLPMVTWPVGAEQFYNEKLVTQVLKTGVSVGVKKMMQVVGDFISREKVEGAVREVMVGEERRKRAKELAEMAKNAVKEGGSSDLEVDRLMEELTLVKLQKEKV

SEQ ID NO: 84013 - protein, 471 aa, Arabidopsis thaliana
  peptide (1)..(471): Ceres Seq. ID no. 12672849
  misc_feature (1)..(471): Homolog of NCBI NO: 18418382 NR Description: similar to glucosyltransferase -like protein; id: At4g34138.1, supported by cDNA: gi_18086384, supported by gi_19699135 [Arabidopsis thaliana] >gi|18086385|gb|AAL57652.1|
  misc_feature (1)..(462): Homolog of NCBI NO: 7433898 NR Description: probable glucosyltransferase F28A23.110 (EC
  misc_feature (1)..(462): Homolog of NCBI NO: 18418380 NR Description: glucosyltransferase -like protein; protein id: supported by cDNA: gi_14334981 [Arabidopsis thaliana] putative glucosyltransferase [Arabidopsis thaliana]
  misc_feature (1)..(462): Homolog of NCBI NO: 18418378 NR Description: similar to glucosyltransferase -like protein; id: At4g34131.1, supported by cDNA: gi_17065353 [Arabidopsis >gi|17065354|gb|AAL32831.1| putative protein [Arabidopsis
  misc_feature (1)..(461): Homolog of NCBI NO: 25286796 NR Description: probable glucosyltransferase [imported] - thaliana >gi|4335714|gb|AAD17392.1| putative glucosyltransferase
  misc_feature (1)..(461): Homolog of NCBI NO: 30725312 NR Description: At2g15490 [Arabidopsis thaliana]
  misc_feature (12)..(461): Homolog of NCBI NO: 15226537 NR Description: putative glucosyltransferase; protein id: [Arabidopsis thaliana] >gi|25286797|pir||F84529 probable
  misc_feature (1)..(462): Homolog of NCBI NO: 13492674 NR Description: phenylpropanoid:glucosyltransferase 1 [Nicotiana
  misc_feature (1)..(462): Homolog of NCBI NO: 7433906 NR Description: glucosyltransferase IS5a (EC 2.4.1.-),
  misc_feature (1)..(462): Homolog of NCBI NO: 7433905 NR Description: glucosyltransferase IS10a (EC 2.4.1.-),
MAHGHMIPTLDMAKLFATKGAKSTILTTPLNAKLFFEKPIKSFNQDNPGLEDITIQILNFPCTELGLPDGCENTDFIFSTPDLNVGDLSQKFLLAMKYFEEPLEELLVTMRPDCLVGNMFFPWSTKVAEKFGVPRLVFHGTGYFSLCASHCIRLPKNVATSSEPFVIPDLPGDILITEEQVMETEEESVMGRFMKAIRDSERDSFGVLVNSFYELEQAYSDYFKSFVAKRAWHIGPLSLGNRKFEEKAERGKKASIDEHECLKWLDSKKCDSVIYMAFGTMSSFKNEQLIEIAAGLDMSGHDFVWVVNRKGSQVEKEDWLPEGFEEKTKGKGLIIRGWAPQVLILEHKAIGGFLTHCGWNSLLEGVAAGLPMVTWPVGAEQFYNEKLVTQVLKTGVSVGVKKMMQVVGDFISREKVEGAVREVMVGEERRKRAKELAEMAKNAVKEGGSSDLEVDRLMEELTLVKLQKEKV

SEQ ID NO: 84014 - DNA, 1323 bp, Arabidopsis thaliana
  misc_feature (1)..(1323): Ceres Seq. ID no. 12672859
  misc_feature: MA Experiment ID: 20000182 Result: Up-regulated in Transcription
  misc_feature: MA Experiment 20000182 PARAMETER Experiment Name: At_2mM_SA_P Parameter: Age (day) Value: 14
  misc_feature: MA Experiment 20000182 PARAMETER Experiment Name: At_2mM_SA_P Parameter: Organism Value: A. thaliana
  misc_feature: MA Experiment 20000182 PARAMETER Experiment Name: At_2mM_SA_P Parameter: Plant Line Value: WS
  misc_feature: MA Experiment 20000182 PARAMETER Experiment Name: At_2mM_SA_P Parameter: Timepoint (hr) Value: 6
  misc_feature: MA Experiment 20000182 PARAMETER Experiment Name: At_2mM_SA_P Parameter: Tissue Value: Aerial
  misc_feature: MA Experiment 20000182 PARAMETER Experiment Name: At_2mM_SA_P Parameter: Treatment Value: 2mM SA vs. No Treatment
  misc_feature: MA Experiment ID: 20000185 Result: Down-regulated in Transcription
  misc_feature: MA Experiment 20000185 PARAMETER Experiment Name: At_Roots__P Parameter: Age (day) Value: 7 vs. 21
  misc_feature: MA Experiment 20000185 PARAMETER Experiment Name: At_Roots__P Parameter: Organism Value: A. thaliana
  misc_feature: MA Experiment 20000185 PARAMETER Experiment Name: At_Roots__P Parameter: Tissue Value: Roots vs. Whole Plant
  misc_feature: MA Experiment ID: 20000211 Result: Up-regulated in Transcription
  misc_feature: MA Experiment 20000211 PARAMETER Experiment Name: At_0.001percent_MeJA__P Parameter: Age (day) Value: 14
  misc_feature: MA Experiment 20000211 PARAMETER Experiment Name: At_0.001percent_MeJA__P Parameter: Organism Value: A. thaliana
  misc_feature: MA Experiment 20000211 PARAMETER Experiment Name: At_0.001percent_MeJA__P Parameter: Plant Line Value: WS
  misc_feature: MA Experiment 20000211 PARAMETER Experiment Name: At_0.001percent_MeJA__P Parameter: Timepoint (hr) Value: 1
  misc_feature: MA Experiment 20000211 PARAMETER Experiment Name: At_0.001percent_MeJA__P Parameter: Tissue Value: Aerial
  misc_feature: MA Experiment 20000211 PARAMETER Experiment Name: At_0.001percent_MeJA__P Parameter: Treatment Value: 0.001percent MeJA vs. No Treatment
  misc_feature: MA Experiment ID: 20000234 Result: Down-regulated in Transcription
  misc_feature: MA Experiment 20000234 PARAMETER Experiment Name: At_Siliques_P Parameter: Age (day) Value: 21
  misc_feature: MA Experiment 20000234 PARAMETER Experiment Name: At_Siliques_P Parameter: Organism Value: A. thaliana
  misc_feature: MA Experiment 20000234 PARAMETER Experiment Name: At_Siliques_P Parameter: Plant Line Value: WS
  misc_feature: MA Experiment 20000234 PARAMETER Experiment Name: At_Siliques_P Parameter: Tissue Value: Less Than 5mm Siliques vs. Whole Plant
  misc_feature: MA Experiment ID: 20000264 Result: Down-regulated in Transcription
  misc_feature: MA Experiment 20000264 PARAMETER Experiment Name: At_Open_Flower_P Parameter: Age (day) Value: 21
  misc_feature: MA Experiment 20000264 PARAMETER Experiment Name: At_Open_Flower_P Parameter: Plant Line Value: WS
  misc_feature: MA Experiment 20000264 PARAMETER Experiment Name: At_Open_Flower_P Parameter: Tissue Value: Open Flower vs. Whole Plant
  misc_feature: MA Experiment ID: 20000286 Result: Down-regulated in Transcription
  misc_feature: MA Experiment 20000286 PARAMETER Experiment Name: At_Open_Flower_P Parameter: Age (day) Value: 21
  misc_feature: MA Experiment 20000286 PARAMETER Experiment Name: At_Open_Flower_P Parameter: Plant Line Value: WS
  misc_feature: MA Experiment 20000286 PARAMETER Experiment Name: At_Open_Flower_P Parameter: Tissue Value: Half Open vs. Whole Plant
  misc_feature: MA Experiment ID: 20000308 Result: Up-regulated in Transcription
  misc_feature: MA Experiment 20000308 PARAMETER Experiment Name: At_100mM_NaCl__P Parameter: Age (day) Value: 17
  misc_feature: MA Experiment 20000308 PARAMETER Experiment Name: At_100mM_NaCl__P Parameter: Organism Value: A. thaliana
  misc_feature: MA Experiment 20000308 PARAMETER Experiment Name: At_100mM_NaCl__P Parameter: Plant Line Value: WS
  misc_feature: MA Experiment 20000308 PARAMETER Experiment Name: At_100mM_NaCl__P Parameter: Timepoint (hr) Value: 72
  misc_feature: MA Experiment 20000308 PARAMETER Experiment Name: At_100mM_NaCl__P Parameter: Tissue Value: Whole Plant
  misc_feature: MA Experiment 20000308 PARAMETER Experiment Name: At_100mM_NaCl__P Parameter: Treatment Value: 100mM NaCl vs. No Treatment
  misc_feature: MA Experiment ID: 20000438 Result: Down-regulated in Transcription
  misc_feature: MA Experiment 20000438 PARAMETER Experiment Name: At_Shoots__P Parameter: Age (day) Value: 14
  misc_feature: MA Experiment 20000438 PARAMETER Experiment Name: At_Shoots__P Parameter: Tissue Value: Shoots vs. Whole Plant
  misc_feature: MA Experiment ID: 20000439 Result: Down-regulated in Transcription
  misc_feature: MA Experiment 20000439 PARAMETER Experiment Name: At_Roots__P Parameter: Age (day) Value: 14 vs. 21
  misc_feature: MA Experiment 20000439 PARAMETER Experiment Name: At_Roots__P Parameter: Organism Value: A. thaliana
  misc_feature: MA Experiment 20000439 PARAMETER Experiment Name: At_Roots__P Parameter: Tissue Value: Roots vs. Whole Plant
  misc_feature: MA Experiment ID: 20000453 Result: Up-regulated in Transcription
  misc_feature: MA Experiment 20000453 PARAMETER Experiment Name: At_100uM_ABA_P Parameter: Age (day) Value: 15
  misc_feature: MA Experiment 20000453 PARAMETER Experiment Name: At_100uM_ABA_P Parameter: Organism Value: A. thaliana
  misc_feature: MA Experiment 20000453 PARAMETER Experiment Name: At_100uM_ABA_P Parameter: Plant Line Value: WS
  misc_feature: MA Experiment 20000453 PARAMETER Experiment Name: At_100uM_ABA_P Parameter: Timepoint (hr) Value: 24
  misc_feature: MA Experiment 20000453 PARAMETER Experiment Name: At_100uM_ABA_P Parameter: Tissue Value: Aerial
  misc_feature: MA Experiment 20000453 PARAMETER Experiment Name: At_100uM_ABA_P Parameter: Treatment Value: 100uM ABA vs. No Treatment
  misc_feature: MA Experiment ID: 20000495 Result: Down-regulated in Transcription
  misc_feature: MA Experiment 20000495 PARAMETER Experiment Name: At_Guard_Cells_P Parameter: Harvest Date Value: 8/2/2002
  misc_feature: MA Experiment 20000495 PARAMETER Experiment Name: At_Guard_Cells_P Parameter: Organism Value: A. thaliana
  misc_feature: MA Experiment 20000495 PARAMETER Experiment Name: At_Guard_Cells_P Parameter: Tissue Value: Guard Cells vs. Leaves
  misc_feature: MA Experiment ID: 20000496 Result: Down-regulated in Transcription
  misc_feature: MA Experiment 20000496 PARAMETER Experiment Name: At_Guard_Cells_P Parameter: Harvest Date Value: 7/19/2002
  misc_feature: MA Experiment 20000496 PARAMETER Experiment Name: At_Guard_Cells_P Parameter: Organism Value: Canola
  misc_feature: MA Experiment 20000496 PARAMETER Experiment Name: At_Guard_Cells_P Parameter: Tissue Value: Guard Cells vs. Leaves
  misc_feature: MA Experiment ID: 20000794 Result: Down-regulated in Transcription
  misc_feature: MA Experiment 20000794 PARAMETER Experiment Name: At_Petals_P Parameter: Age (day) Value: 23-25 days
  misc_feature: MA Experiment 20000794 PARAMETER Experiment Name: At_Petals_P Parameter: Plant Line Value: WS
  misc_feature: MA Experiment 20000794 PARAMETER Experiment Name: At_Petals_P Parameter: Tissue Value: Petals vs. Whole plant
  misc_feature: MA Experiment ID: 20001905 Result: Up-regulated in Transcription
  misc_feature: MA Experiment 20001905 PARAMETER Experiment Name: At_Drought_Reproduction_P Parameter: Age (day) Value: 40
  misc_feature: MA Experiment 20001905 PARAMETER Experiment Name: At_Drought_Reproduction_P Parameter: Organism Value: A. thaliana
  misc_feature: MA Experiment 20001905 PARAMETER Experiment Name: At_Drought_Reproduction_P Parameter: Plant Line Value: WS
  misc_feature: MA Experiment 20001905 PARAMETER Experiment Name: At_Drought_Reproduction_P Parameter: Timepoint (day) Value: 10
  misc_feature: MA Experiment 20001905 PARAMETER Experiment Name: At_Drought_Reproduction_P Parameter: Tissue Value: Rosettes
  misc_feature: MA Experiment 20001905 PARAMETER Experiment Name: At_Drought_Reproduction_P Parameter: Treatment Value: Drought vs. No Drought
agagaaactgtttcataagacttttttttcttcttcttcttctctgttaaactaatggagtggattcgtagagaaacgattggtcacggaagcttctccaccgttagtttagcaactacctctggaagttcttctaaagcgtttccatcgttaatggctgtgaaatcttccggagttgtttgctccgccgcgttacgaaacgagagagatgttcttgatgatctcggtgactgttcggagatcgtgcggtgttttggtgaaggaaggacggtggagaacggagaagagatctataatctgtttcttgagtatgcttccggtggtagtttagctgatcggattaaaagctccggtgaagcgttgccggagtttgaagtgaggagattcacgagatcgattgttaaaggattgtgtcatattcatggtaatggtttcactcattgtgatataaagcttgagaatgttttggtttttggtgatggagatgtgaagatatctgatttcgggttagcgaaacggaggagtggtgaggtttgtgttgagattagaggaacaccgttgtatatggcaccggagtctgtgaatcacggcgagtttgaatctccggcggatatttgggctttgggatgctctgttgttgagatgtctagtggtaaaacggcatggtgtttggaggatggtgttatgaataatgttatgtctttattggttcgtattggttccggcgatgaagttccgaggattccggtggaattgtcggaggaaggtaaagatttcgtgagcaagtgttttgttaaaaacgccgcggagagatggacggctgagatgcttttggatcatccattcttagccgttgatgatgagagtggcgaagaagacgaagcttgttcggtttcaccgaggaatccatttgattttcccggttggaattcggttcaatctccggttaatgattcggttatgtttggttcattggtaggttcgccggaggaaaggattagtggtttggtgagtgagaaggtacctgattggtcggtgtcgtgtgattgggtcaacgtcaggtgaatagagtagtttttgttgttgttgtggagaaagaccgagtcattttgtgtggagattattatggagtcatttagaattgacggtcctgattttaatattttgtttaatttagctcgttgactttgtaaatattgaaaattaaaatattcttgtaagaaagaaactgagagttttttttgtgccatatgttacttattctctattcactttgtaacagagatactctcaatttgaaaaaaaaaacaatttggggcctgg

SEQ ID NO: 84015 - protein, 336 aa, Arabidopsis thaliana
  peptide (1)..(336): Ceres Seq. ID no. 12672860
  misc_feature (3)..(265): Pfam Name: Protein kinase domain Pfam Description: Protein kinase domain
  misc_feature (1)..(336): Homolog of NCBI NO: 17979279 NR Description: unknown protein [Arabidopsis thaliana]
  misc_feature (1)..(335): Homolog of NCBI NO: 25407778 NR Description: MAP3K-like protein kinase [imported] -
  misc_feature (1)..(336): Homolog of NCBI NO: 15240194 NR Description: protein kinase-like protein; protein id:
  misc_feature (1)..(336): Homolog of NCBI NO: 21554379 NR Description: protein kinase-like protein [Arabidopsis thaliana]
  misc_feature (1)..(336): Homolog of NCBI NO: 15229715 NR Description: protein kinase -like protein; protein id: supported by cDNA: 253633. [Arabidopsis thaliana]
  misc_feature (3)..(336): Homolog of NCBI NO: 15240456 NR Description: putative protein; protein id: At5g55090.1
  misc_feature (1)..(336): Homolog of NCBI NO: 15236903 NR Description: putative NPK1-related protein kinase; protein id:
  misc_feature (1)..(336): Homolog of NCBI NO: 19423926 NR Description: unknown protein [Arabidopsis thaliana]
  misc_feature (3)..(335): Homolog of NCBI NO: 34911466 NR Description: NPK1-related protein kinase-like protein [Oryza
  misc_feature (3)..(335): Homolog of NCBI NO: 34911472 NR Description: NPK1-related protein kinase-like protein [Oryza
MEWIRRETIGHGSFSTVSLATTSGSSSKAFPSLMAVKSSGVVCSAALRNERDVLDDLGDCSEIVRCFGEGRTVENGEEIYNLFLEYASGGSLADRIKSSGEALPEFEVRRFTRSIVKGLCHIHGNGFTHCDIKLENVLVFGDGDVKISDFGLAKRRSGEVCVEIRGTPLYMAPESVNHGEFESPADIWALGCSVVEMSSGKTAWCLEDGVMNNVMSLLVRIGSGDEVPRIPVELSEEGKDFVSKCFVKNAAERWTAEMLLDHPFLAVDDESGEEDEACSVSPRNPFDFPGWNSVQSPVNDSVMFGSLVGSPEERISGLVSEKVPDWSVSCDWVNVR

SEQ ID NO: 84016 - protein, 303 aa, Arabidopsis thaliana
  peptide (1)..(303): Ceres Seq. ID no. 12672861
  misc_feature (1)..(232): Pfam Name: Protein kinase domain Pfam Description: Protein kinase domain
  misc_feature (1)..(303): Homolog of NCBI NO: 17979279 NR Description: unknown protein [Arabidopsis thaliana]
  misc_feature (1)..(302): Homolog of NCBI NO: 25407778 NR Description: MAP3K-like protein kinase [imported] -
  misc_feature (1)..(303): Homolog of NCBI NO: 15240194 NR Description: protein kinase-like protein; protein id:
  misc_feature (1)..(303): Homolog of NCBI NO: 21554379 NR Description: protein kinase-like protein [Arabidopsis thaliana]
  misc_feature (1)..(303): Homolog of NCBI NO: 15229715 NR Description: protein kinase -like protein; protein id: supported by cDNA: 253633. [Arabidopsis thaliana]
  misc_feature (1)..(303): Homolog of NCBI NO: 15240456 NR Description: putative protein; protein id: At5g55090.1
  misc_feature (1)..(303): Homolog of NCBI NO: 15236903 NR Description: putative NPK1-related protein kinase; protein id:
  misc_feature (1)..(303): Homolog of NCBI NO: 19423926 NR Description: unknown protein [Arabidopsis thaliana]
  misc_feature (1)..(302): Homolog of NCBI NO: 34911466 NR Description: NPK1-related protein kinase-like protein [Oryza
  misc_feature (1)..(302): Homolog of NCBI NO: 34911472 NR Description: NPK1-related protein kinase-like protein [Oryza
MAVKSSGVVCSAALRNERDVLDDLGDCSEIVRCFGEGRTVENGEEIYNLFLEYASGGSLADRIKSSGEALPEFEVRRFTRSIVKGLCHIHGNGFTHCDIKLENVLVFGDGDVKISDFGLAKRRSGEVCVEIRGTPLYMAPESVNHGEFESPADIWALGCSVVEMSSGKTAWCLEDGVMNNVMSLLVRIGSGDEVPRIPVELSEEGKDFVSKCFVKNAAERWTAEMLLDHPFLAVDDESGEEDEACSVSPRNPFDFPGWNSVQSPVNDSVMFGSLVGSPEERISGLVSEKVPDWSVSCDWVNVR

SEQ ID NO: 84017 - DNA, 2744 bp, Arabidopsis thaliana
  misc_feature (1)..(2744): Ceres Seq. ID no. 12672882
  misc_feature: MA Experiment ID: 20000171 Result: Up-regulated in Transcription
  misc_feature: MA Experiment 20000171 PARAMETER Experiment Name: At_42deg_Heat_P Parameter: Age (day) Value: 14
  misc_feature: MA Experiment 20000171 PARAMETER Experiment Name: At_42deg_Heat_P Parameter: Organism Value: A. thaliana
  misc_feature: MA Experiment 20000171 PARAMETER Experiment Name: At_42deg_Heat_P Parameter: Plant Line Value: WS
  misc_feature: MA Experiment 20000171 PARAMETER Experiment Name: At_42deg_Heat_P Parameter: Temperature (deg C) Value: 42 vs. 22
  misc_feature: MA Experiment 20000171 PARAMETER Experiment Name: At_42deg_Heat_P Parameter: Timepoint (hr) Value: 1
  misc_feature: MA Experiment 20000171 PARAMETER Experiment Name: At_42deg_Heat_P Parameter: Tissue Value: Aerial
  misc_feature: MA Experiment ID: 20000495 Result: Up-regulated in Transcription
  misc_feature: MA Experiment 20000495 PARAMETER Experiment Name: At_Guard_Cells_P Parameter: Harvest Date Value: 8/2/2002
  misc_feature: MA Experiment 20000495 PARAMETER Experiment Name: At_Guard_Cells_P Parameter: Organism Value: A. thaliana
  misc_feature: MA Experiment 20000495 PARAMETER Experiment Name: At_Guard_Cells_P Parameter: Tissue Value: Guard Cells vs. Leaves
  misc_feature: MA Experiment ID: 20001248 Result: Up-regulated in Transcription
  misc_feature: MA Experiment 20001248 PARAMETER Experiment Name: At_Far-red-induction_P Parameter: Age (day) Value: 7
  misc_feature: MA Experiment 20001248 PARAMETER Experiment Name: At_Far-red-induction_P Parameter: Light Value: Far-red vs. White
  misc_feature: MA Experiment 20001248 PARAMETER Experiment Name: At_Far-red-induction_P Parameter: Organism Value: A. thaliana
  misc_feature: MA Experiment 20001248 PARAMETER Experiment Name: At_Far-red-induction_P Parameter: Plant Line Value: Columbia
  misc_feature: MA Experiment 20001248 PARAMETER Experiment Name: At_Far-red-induction_P Parameter: Timepoint (hr) Value: 4
  misc_feature: MA Experiment 20001248 PARAMETER Experiment Name: At_Far-red-induction_P Parameter: Tissue Value: Whole Plant
  misc_feature: MA Experiment ID: 20001451 Result: Up-regulated in Transcription
  misc_feature: MA Experiment 20001451 PARAMETER Experiment Name: At_Far-red-induction_P Parameter: Age (day) Value: 7
  misc_feature: MA Experiment 20001451 PARAMETER Experiment Name: At_Far-red-induction_P Parameter: Light Value: Far-red vs. White
  misc_feature: MA Experiment 20001451 PARAMETER Experiment Name: At_Far-red-induction_P Parameter: Organism Value: A. thaliana
  misc_feature: MA Experiment 20001451 PARAMETER Experiment Name: At_Far-red-induction_P Parameter: Plant Line Value: Columbia
  misc_feature: MA Experiment 20001451 PARAMETER Experiment Name: At_Far-red-induction_P Parameter: Timepoint (hr) Value: 24
  misc_feature: MA Experiment 20001451 PARAMETER Experiment Name: At_Far-red-induction_P Parameter: Tissue Value: Whole Plant
  misc_feature: MA Experiment ID: 20001905 Result: Down-regulated in Transcription
  misc_feature: MA Experiment 20001905 PARAMETER Experiment Name: At_Drought_Reproduction_P Parameter: Age (day) Value: 40
  misc_feature: MA Experiment 20001905 PARAMETER Experiment Name: At_Drought_Reproduction_P Parameter: Organism Value: A. thaliana
  misc_feature: MA Experiment 20001905 PARAMETER Experiment Name: At_Drought_Reproduction_P Parameter: Plant Line Value: WS
  misc_feature: MA Experiment 20001905 PARAMETER Experiment Name: At_Drought_Reproduction_P Parameter: Timepoint (day) Value: 10
  misc_feature: MA Experiment 20001905 PARAMETER Experiment Name: At_Drought_Reproduction_P Parameter: Tissue Value: Rosettes
  misc_feature: MA Experiment 20001905 PARAMETER Experiment Name: At_Drought_Reproduction_P Parameter: Treatment Value: Drought vs. No Drought
  misc_feature: MA Experiment ID: 20001911 Result: Down-regulated in Transcription
  misc_feature: MA Experiment 20001911 PARAMETER Experiment Name: At_Drought_Reproduction_P Parameter: Age (day) Value: 40
  misc_feature: MA Experiment 20001911 PARAMETER Experiment Name: At_Drought_Reproduction_P Parameter: Organism Value: A. thaliana
  misc_feature: MA Experiment 20001911 PARAMETER Experiment Name: At_Drought_Reproduction_P Parameter: Plant Line Value: WS
  misc_feature: MA Experiment 20001911 PARAMETER Experiment Name: At_Drought_Reproduction_P Parameter: Timepoint (day) Value: 10
  misc_feature: MA Experiment 20001911 PARAMETER Experiment Name: At_Drought_Reproduction_P Parameter: Tissue Value: Flowers
  misc_feature: MA Experiment 20001911 PARAMETER Experiment Name: At_Drought_Reproduction_P Parameter: Treatment Value: Drought vs. No Drought
atctactcgtttcttcggctcactaaagaaagagagagagagagagaaaaaaagaaagtacaatttcataataataaatgaagaagaccgtaacaagaagtgtgtagtcgtattgattatagaattaaagaaactctgcaatatttttgcagagagacagagacacaaagaaagagagagagagagcatttagggagcaggaagtggagtgtttggttacgtgagctgttttctctttctctatctttaactcccttcacacctctccctctctcttcttcatatctctctctgtcacaatagtgtgatgatgcaatgagaatggagttgatttcagtgattttcttcttcttttgctctgttttgagttcctctgctttaaactctgatgggttggttttgatgaagtttaaatcctctgttcttgttgatcctctgtctttattacagacatggaattacaaacacgaaagtccatgttcttggagaggaatctcttgtaataacgattctaaagtcttaactttgtctcttcccaattctcagcttcttggttcgattccttctgatttgggttctctcttaacacttcaaagtctcgatctttccaataattccttcaatgggccattaccggtttctttcttcaacgctagagagcttcgtttccttgatctctctagtaacatgatctccggcgaaatcccttccgcaattggtgatcttcacaatcttctaaccctaaatctctctgataatgccttggcgggaaagttacctacaaatttggcgtcgttgagaaacttaacggtggtttctttggagaataattacttttccggcgagattcccggcggttggagagttgttgagttcttagacctgtcgtcgaatctgatcaatggctcgcttcctccggattttggcggatatagtctccagtacttaaatgtctcgtttaaccaaatctccggcgaaattccaccggagatcggagtcaatttcccaagaaacgtcaccgttgatctctccttcaacaatttaaccggtccaatccctgattctccggttttcttaaaccaggaatcaaatttcttttcaggaaacccgggtctatgcggtgaaccgacccgaaacccgtgtcttatcccttcctcgccgtctatcgtctccgaagccgacgtaccgacgtctacaccagcaatcgccgcaataccgaacacaatcggttcaaacccggttaccgatccaaattcacaacaaaccgacccaaatccccgaaccgggttacgacccggagttataatagggatcgtagtcggagatatcgctggaatcggaatcctcgccgtgattttcctctacatctacagatgcaagaagaacaagatagtggataacaacaacaacgacaagcaaagaacagaaacagacacaattacgttatcaacattttcatcttcttcttcttcaccagaagagtcaagaagattcaggaaatggtcgtgtctacgaaaagatcctgaaacgacaccgtctgaagaagaagatgaagatgatgaagacgaagaaagcggttacaatgcaaatcaacggtcaggagataacaagttagtgaccgttgatggagagaaggagatggagattgagactctgcttaaggcttcagcttatattttaggagccacaggttcgagtataatgtataaagccgttcttgaagacggtagggttttcgcggttcgtcgactcggtgaaaacggtttatctcagcgccggtttaaggattttgagccgcacattcgagccattgggaaattggttcacccgaatttggttagactttgtgggttctattggggtaccgacgagaaactagtcatttacgattttgtccctaacggcagcctcgtcaacccccgttaccgaaaaggaggagggtcttcttcaccgtatcacctaccgtgggaaactcggctcaagatagcaaagggcattgcacgtgggctggcttatctccacgagaagaagcatgtgcatggaaacttgaagcctagcaacatacttttgggccatgacatggaacccaaaataggcgatttcggactcgaaaggcttcttacaggcgaaacaagctacattcgagctggtggatcttctaggattttcagtagtaagcgttacacaacttcctcgcgagaattctcgtctatcgggcctacaccaagcccgagtccgagctcggtgggggcgatgtcaccctactgcgcaccagagtctttccgaagcctaaaaccgagtccgaaatgggacgtttacggctttggagtgatccttctcgagcttctcacgggaaagattgtgtctgttgaagagattgtgctaggaaacggacttacggttgaggacgggcaccgcgcagtgagaatggctgatgtggcgatccgcggcgagttagatggcaaacaagagtttttactcgattgtttcaagttaggctatagctgtgcgtctcctgttcctcaaaagaggccaacgatgaaagaatctttggctgttcttgaaagattccatcctaactcctctgttattaagtcttcatcgttccattacggacattaatatcagtttgatacaactagagtgaactagttagtcaatttgatttcattgctaacttgttttgttgtaaaaaaaaaattgtgtttgctgtttttgtttacaaaactcgatttcccaacatt

SEQ ID NO: 84018 - protein, 768 aa, Arabidopsis thaliana
  peptide (1)..(768): Ceres Seq. ID no. 12672883
  misc_feature (10)..(768): Homolog of NCBI NO: 15227808 NR Description: leucine-rich repeat transmembrane protein kinase, protein id: At2g23300.1 [Arabidopsis thaliana]
  misc_feature (5)..(645): Homolog of NCBI NO: 15240265 NR Description: leucine-rich repeat transmembrane protein kinase, protein id: At5g67280.1, supported by cDNA: 110712., supported by
  misc_feature (5)..(645): Homolog of NCBI NO: 15809976 NR Description: AT5g67280/K3G17_4 [Arabidopsis thaliana]
  misc_feature (21)..(603): Homolog of NCBI NO: 15226084 NR Description: leucine-rich repeat transmembrane protein kinase, protein id: At2g15300.1 [Arabidopsis thaliana]
  misc_feature (653)..(751): Homolog of NCBI NO: 15226084 NR Description: leucine-rich repeat transmembrane protein kinase, protein id: At2g15300.1 [Arabidopsis thaliana]
  misc_feature (5)..(751): Homolog of NCBI NO: 18418404 NR Description: leucine-rich repeat transmembrane protein kinase, protein id: At4g34220.1, supported by cDNA: gi_14334871, by cDNA: gi_21281266 [Arabidopsis thaliana]
  misc_feature (95)..(757): Homolog of NCBI NO: 15240265 NR Description: leucine-rich repeat transmembrane protein kinase, protein id: At5g67280.1, supported by cDNA: 110712., supported by
  misc_feature (5)..(744): Homolog of NCBI NO: 7488258 NR Description: protein kinase homolog F28A23.20 - Arabidopsis
  misc_feature (95)..(757): Homolog of NCBI NO: 15809976 NR Description: AT5g67280/K3G17_4 [Arabidopsis thaliana]
  misc_feature (5)..(390): Homolog of NCBI NO: 15226197 NR Description: leucine-rich repeat transmembrane protein kinase, protein id: At2g01210.1 [Arabidopsis thaliana]
MRMELISVIFFFFCSVLSSSALNSDGLVLMKFKSSVLVDPLSLLQTWNYKHESPCSWRGISCNNDSKVLTLSLPNSQLLGSIPSDLGSLLTLQSLDLSNNSFNGPLPVSFFNARELRFLDLSSNMISGEIPSAIGDLHNLLTLNLSDNALAGKLPTNLASLRNLTVVSLENNYFSGEIPGGWRVVEFLDLSSNLINGSLPPDFGGYSLQYLNVSFNQISGEIPPEIGVNFPRNVTVDLSFNNLTGPIPDSPVFLNQESNFFSGNPGLCGEPTRNPCLIPSSPSIVSEADVPTSTPAIAAIPNTIGSNPVTDPNSQQTDPNPRTGLRPGVIIGIVVGDIAGIGILAVIFLYIYRCKKNKIVDNNNNDKQRTETDTITLSTFSSSSSSPEESRRFRKWSCLRKDPETTPSEEEDEDDEDEESGYNANQRSGDNKLVTVDGEKEMEIETLLKASAYILGATGSSIMYKAVLEDGRVFAVRRLGENGLSQRRFKDFEPHIRAIGKLVHPNLVRLCGFYWGTDEKLVIYDFVPNGSLVNPRYRKGGGSSSPYHLPWETRLKIAKGIARGLAYLHEKKHVHGNLKPSNILLGHDMEPKIGDFGLERLLTGETSYIRAGGSSRIFSSKRYTTSSREFSSIGPTPSPSPSSVGAMSPYCAPESFRSLKPSPKWDVYGFGVILLELLTGKIVSVEEIVLGNGLTVEDGHRAVRMADVAIRGELDGKQEFLLDCFKLGYSCASPVPQKRPTMKESLAVLERFHPNSSVIKSSSFHYGH

SEQ ID NO: 84019 - protein, 766 aa, Arabidopsis thaliana; identical to SEQ ID NO: 79346
  peptide (1)..(766): Ceres Seq. ID no. 12672884
  misc_feature (8)..(766): Homolog of NCBI NO: 15227808 NR Description: leucine-rich repeat transmembrane protein kinase, protein id: At2g23300.1 [Arabidopsis thaliana]
  misc_feature (3)..(643): Homolog of NCBI NO: 15240265 NR Description: leucine-rich repeat transmembrane protein kinase, protein id: At5g67280.1, supported by cDNA: 110712., supported by
  misc_feature (3)..(643): Homolog of NCBI NO: 15809976 NR Description: AT5g67280/K3G17_4 [Arabidopsis thaliana]
  misc_feature (19)..(601): Homolog of NCBI NO: 15226084 NR Description: leucine-rich repeat transmembrane protein kinase, protein id: At2g15300.1 [Arabidopsis thaliana]
  misc_feature (651)..(749): Homolog of NCBI NO: 15226084 NR Description: leucine-rich repeat transmembrane protein kinase, protein id: At2g15300.1 [Arabidopsis thaliana]
  misc_feature (3)..(749): Homolog of NCBI NO: 18418404 NR Description: leucine-rich repeat transmembrane protein kinase, protein id: At4g34220.1, supported by cDNA: gi_14334871, by cDNA: gi_21281266 [Arabidopsis thaliana]
  misc_feature (93)..(755): Homolog of NCBI NO: 15240265 NR Description: leucine-rich repeat transmembrane protein kinase, protein id: At5g67280.1, supported by cDNA: 110712., supported by
  misc_feature (3)..(742): Homolog of NCBI NO: 7488258 NR Description: protein kinase homolog F28A23.20 - Arabidopsis
  misc_feature (93)..(755): Homolog of NCBI NO: 15809976 NR Description: AT5g67280/K3G17_4 [Arabidopsis thaliana]
  misc_feature (3)..(388): Homolog of NCBI NO: 15226197 NR Description: leucine-rich repeat transmembrane protein kinase, protein id: At2g01210.1 [Arabidopsis thaliana]

SEQ ID NO: 84020 - protein, 739 aa, Arabidopsis thaliana; identical to SEQ ID NO: 79347
  peptide (1)..(739): Ceres Seq. ID no. 12672885
  misc_feature (1)..(739): Homolog of NCBI NO: 15227808 NR Description: leucine-rich repeat transmembrane protein kinase, protein id: At2g23300.1 [Arabidopsis thaliana]
  misc_feature (1)..(616): Homolog of NCBI NO: 15240265 NR Description: leucine-rich repeat transmembrane protein kinase, protein id: At5g67280.1, supported by cDNA: 110712., supported by
  misc_feature (1)..(616): Homolog of NCBI NO: 15809976 NR Description: AT5g67280/K3G17_4 [Arabidopsis thaliana]
  misc_feature (1)..(574): Homolog of NCBI NO: 15226084 NR Description: leucine-rich repeat transmembrane protein kinase, protein id: At2g15300.1 [Arabidopsis thaliana]
  misc_feature (624)..(722): Homolog of NCBI NO: 15226084 NR Description: leucine-rich repeat transmembrane protein kinase, protein id: At2g15300.1 [Arabidopsis thaliana]
  misc_feature (1)..(722): Homolog of NCBI NO: 18418404 NR Description: leucine-rich repeat transmembrane protein kinase, protein id: At4g34220.1, supported by cDNA: gi_14334871, by cDNA: gi_21281266 [Arabidopsis thaliana]
  misc_feature (66)..(728): Homolog of NCBI NO: 15240265 NR Description: leucine-rich repeat transmembrane protein kinase, protein id: At5g67280.1, supported by cDNA: 110712., supported by
  misc_feature (1)..(715): Homolog of NCBI NO: 7488258 NR Description: protein kinase homolog F28A23.20 - Arabidopsis
  misc_feature (66)..(728): Homolog of NCBI NO: 15809976 NR Description: AT5g67280/K3G17_4 [Arabidopsis thaliana]
  misc_feature (1)..(361): Homolog of NCBI NO: 15226197 NR Description: leucine-rich repeat transmembrane protein kinase, protein id: At2g01210.1 [Arabidopsis thaliana]

SEQ ID NO: 84021 - DNA, 1628 bp, Arabidopsis thaliana
  misc_feature (1)..(1628): Ceres Seq. ID no. 12672886
  misc_feature: MA Experiment ID: 20000171 Result: Down-regulated in Transcription
  misc_feature: MA Experiment 20000171 PARAMETER Experiment Name: At_42deg_Heat_P Parameter: Age (day) Value: 14
  misc_feature: MA Experiment 20000171 PARAMETER Experiment Name: At_42deg_Heat_P Parameter: Organism Value: A. thaliana
  misc_feature: MA Experiment 20000171 PARAMETER Experiment Name: At_42deg_Heat_P Parameter: Plant Line Value: WS
  misc_feature: MA Experiment 20000171 PARAMETER Experiment Name: At_42deg_Heat_P Parameter: Temperature (deg C) Value: 42 vs. 22
  misc_feature: MA Experiment 20000171 PARAMETER Experiment Name: At_42deg_Heat_P Parameter: Timepoint (hr) Value: 1
  misc_feature: MA Experiment 20000171 PARAMETER Experiment Name: At_42deg_Heat_P Parameter: Tissue Value: Aerial
  misc_feature: MA Experiment ID: 20000173 Result: Down-regulated in Transcription
  misc_feature: MA Experiment 20000173 PARAMETER Experiment Name: At_42deg_Heat_P Parameter: Age (day) Value: 14
  misc_feature: MA Experiment 20000173 PARAMETER Experiment Name: At_42deg_Heat_P Parameter: Organism Value: A. thaliana
  misc_feature: MA Experiment 20000173 PARAMETER Experiment Name: At_42deg_Heat_P Parameter: Plant Line Value: WS
  misc_feature: MA Experiment 20000173 PARAMETER Experiment Name: At_42deg_Heat_P Parameter: Temperature (deg C) Value: 42 vs. 22
  misc_feature: MA Experiment 20000173 PARAMETER Experiment Name: At_42deg_Heat_P Parameter: Timepoint (hr) Value: 6
  misc_feature: MA Experiment 20000173 PARAMETER Experiment Name: At_42deg_Heat_P Parameter: Tissue Value: Aerial
  misc_feature: MA Experiment ID: 20000180 Result: Up-regulated in Transcription
  misc_feature: MA Experiment 20000180 PARAMETER Experiment Name: At_Germinating_Seeds_P Parameter: Age (hr) Value: 24 vs. 0
  misc_feature: MA Experiment 20000180 PARAMETER Experiment Name: At_Germinating_Seeds_P Parameter: Tissue Value: Germinating Seeds
  misc_feature: MA Experiment ID: 20000185 Result: Down-regulated in Transcription
  misc_feature: MA Experiment 20000185 PARAMETER Experiment Name: At_Roots__P Parameter: Age (day) Value: 7 vs. 21
  misc_feature: MA Experiment 20000185 PARAMETER Experiment Name: At_Roots__P Parameter: Organism Value: A. thaliana
  misc_feature: MA Experiment 20000185 PARAMETER Experiment Name: At_Roots__P Parameter: Tissue Value: Roots vs. Whole Plant
  misc_feature: MA Experiment ID: 20000234 Result: Down-regulated in Transcription
  misc_feature: MA Experiment 20000234 PARAMETER Experiment Name: At_Siliques_P Parameter: Age (day) Value: 21
  misc_feature: MA Experiment 20000234 PARAMETER Experiment Name: At_Siliques_P Parameter: Organism Value: A. thaliana
  misc_feature: MA Experiment 20000234 PARAMETER Experiment Name: At_Siliques_P Parameter: Plant Line Value: WS
  misc_feature: MA Experiment 20000234 PARAMETER Experiment Name: At_Siliques_P Parameter: Tissue Value: Less Than 5mm Siliques vs. Whole Plant
  misc_feature: MA Experiment ID: 20000235 Result: Down-regulated in Transcription
  misc_feature: MA Experiment 20000235 PARAMETER Experiment Name: At_Siliques_P Parameter: Age (day) Value: 21
  misc_feature: MA Experiment 20000235 PARAMETER Experiment Name: At_Siliques_P Parameter: Organism Value: A. thaliana
  misc_feature: MA Experiment 20000235 PARAMETER Experiment Name: At_Siliques_P Parameter: Plant Line Value: WS
  misc_feature: MA Experiment 20000235 PARAMETER Experiment Name: At_Siliques_P Parameter: Tissue Value: 5-10mm Siliques vs. Whole Plant
  misc_feature: MA Experiment ID: 20000265 Result: Down-regulated in Transcription
  misc_feature: MA Experiment 20000265 PARAMETER Experiment Name: At_Open_Flower_P Parameter: Age (day) Value: 21
  misc_feature: MA Experiment 20000265 PARAMETER Experiment Name: At_Open_Flower_P Parameter: Plant Line Value: WS
  misc_feature: MA Experiment 20000265 PARAMETER Experiment Name: At_Open_Flower_P Parameter: Tissue Value: Closed Flower vs. Whole Plant
  misc_feature: MA Experiment ID: 20000286 Result: Down-regulated in Transcription
  misc_feature: MA Experiment 20000286 PARAMETER Experiment Name: At_Open_Flower_P Parameter: Age (day) Value: 21
  misc_feature: MA Experiment 20000286 PARAMETER Experiment Name: At_Open_Flower_P Parameter: Plant Line Value: WS
  misc_feature: MA Experiment 20000286 PARAMETER Experiment Name: At_Open_Flower_P Parameter: Tissue Value: Half Open vs. Whole Plant
  misc_feature: MA Experiment ID: 20000438 Result: Down-regulated in Transcription
  misc_feature: MA Experiment 20000438 PARAMETER Experiment Name: At_Shoots__P Parameter: Age (day) Value: 14
  misc_feature: MA Experiment 20000438 PARAMETER Experiment Name: At_Shoots__P Parameter: Tissue Value: Shoots vs. Whole Plant
  misc_feature: MA Experiment ID: 20000439 Result: Down-regulated in Transcription
  misc_feature: MA Experiment 20000439 PARAMETER Experiment Name: At_Roots__P Parameter: Age (day) Value: 14 vs. 21
  misc_feature: MA Experiment 20000439 PARAMETER Experiment Name: At_Roots__P Parameter: Organism Value: A. thaliana
  misc_feature: MA Experiment 20000439 PARAMETER Experiment Name: At_Roots__P Parameter: Tissue Value: Roots vs. Whole Plant
  misc_feature: MA Experiment ID: 20000452 Result: Up-regulated in Transcription
  misc_feature: MA Experiment 20000452 PARAMETER Experiment Name: At_CS6879_Shoots-Roots_P Parameter: Age (day) Value: 14
  misc_feature: MA Experiment 20000452 PARAMETER Experiment Name: At_CS6879_Shoots-Roots_P Parameter: Organism Value: A. thaliana
  misc_feature: MA Experiment 20000452 PARAMETER Experiment Name: At_CS6879_Shoots-Roots_P Parameter: Plant Line Value: CS6879 vs. WS
  misc_feature: MA Experiment 20000452 PARAMETER Experiment Name: At_CS6879_Shoots-Roots_P Parameter: Tissue Value: Shoots
  misc_feature: MA Experiment ID: 20001248 Result: Down-regulated in Transcription
  misc_feature: MA Experiment 20001248 PARAMETER Experiment Name: At_Far-red-induction_P Parameter: Age (day) Value: 7
  misc_feature: MA Experiment 20001248 PARAMETER Experiment Name: At_Far-red-induction_P Parameter: Light Value: Far-red vs. White
  misc_feature: MA Experiment 20001248 PARAMETER Experiment Name: At_Far-red-induction_P Parameter: Organism Value: A. thaliana
  misc_feature: MA Experiment 20001248 PARAMETER Experiment Name: At_Far-red-induction_P Parameter: Plant Line Value: Columbia
  misc_feature: MA Experiment 20001248 PARAMETER Experiment Name: At_Far-red-induction_P Parameter: Timepoint (hr) Value: 4
  misc_feature: MA Experiment 20001248 PARAMETER Experiment Name: At_Far-red-induction_P Parameter: Tissue Value: Whole Plant
  misc_feature: MA Experiment ID: 20001904 Result: Up-regulated in Transcription
  misc_feature: MA Experiment 20001904 PARAMETER Experiment Name: At_Drought_Reproduction_P Parameter: Age (day) Value: 37
  misc_feature: MA Experiment 20001904 PARAMETER Experiment Name: At_Drought_Reproduction_P Parameter: Organism Value: A. thaliana
  misc_feature: MA Experiment 20001904 PARAMETER Experiment Name: At_Drought_Reproduction_P Parameter: Plant Line Value: WS
  misc_feature: MA Experiment 20001904 PARAMETER Experiment Name: At_Drought_Reproduction_P Parameter: Timepoint (day) Value: 7
  misc_feature: MA Experiment 20001904 PARAMETER Experiment Name: At_Drought_Reproduction_P Parameter: Tissue Value: Rosettes
  misc_feature: MA Experiment 20001904 PARAMETER Experiment Name: At_Drought_Reproduction_P Parameter: Treatment Value: Drought vs. No Drought
  misc_feature: MA Experiment ID: 20001905 Result: Up-regulated in Transcription
  misc_feature: MA Experiment 20001905 PARAMETER Experiment Name: At_Drought_Reproduction_P Parameter: Age (day) Value: 40
  misc_feature: MA Experiment 20001905 PARAMETER Experiment Name: At_Drought_Reproduction_P Parameter: Organism Value: A. thaliana
  misc_feature: MA Experiment 20001905 PARAMETER Experiment Name: At_Drought_Reproduction_P Parameter: Plant Line Value: WS
  misc_feature: MA Experiment 20001905 PARAMETER Experiment Name: At_Drought_Reproduction_P Parameter: Timepoint (day) Value: 10
  misc_feature: MA Experiment 20001905 PARAMETER Experiment Name: At_Drought_Reproduction_P Parameter: Tissue Value: Rosettes
  misc_feature: MA Experiment 20001905 PARAMETER Experiment Name: At_Drought_Reproduction_P Parameter: Treatment Value: Drought vs. No Drought
atggattgtattttacttattctgactactcttgttgccattttcatcgtcaagattgttctcctagtcactaaacctaacaaaaaccttccaccgtcgccaaatatatgttttccgatcatcggacaccttcacctcctcaaaaagccactgctacaccggactctcagccatctctcccactccctcggccccgtcttttctctacgcctcggctctcgccttgccgttatcatctcatctccaacggcagccgaagaatgcttcttgacgaaaaacgacatcgttttagcaaatcggcctcgtttcatcatgggcaagtatgtggcttatgactacacctccatggttacggctccttacggtgaccactggcgaaacctccgtcgtatcaccgctttagaagtcttctccacaaatcgactcaacgcttcagcggaaatccgacatgacgaagttaagatgcttctccaaaagcttcacgatttatctgtcgaacgcccggctaaagtggagttacgacagttactaacgggtcttaccctaaatgtgataatgagaatgatgaccggaaagagattcttcgaggaagatgatggcggaaaggcggggataagtttggagttccgggaactagtggcggagattctagagctctctgcggcggacaatccagctgattttttgccggctctacggtggtttgactacaaaggtttggtcaagagagcaaagaggattggagaaaggatggatagtttattacaagggtttttggatgagcatagagctaacaaagacagattggagtttaagaacaccatgattgctcatttacttgattctcaagaaaaagagcctcataactacagtgatcaaaccatcaaaggtcttatactgatgatggtagtaggaggcacagatacatcggccttaaccgtggaatgggcaatgtcaaatttattgaatcatccacaaatactagagaccacgagacaaaacattgatactcaaatggaaacatcaagtagtcgtcgtttgttgaaagaagaagatttggtaaacatgaactacttgaaaaatgttgtgtcggagacactaagactttaccctgtggcaccacttatggttcctcatgtgccatcttctgactgtgtaatcggtggattcaacgttccacgtgatacgatcgtgttggttaacttgtgggctatacatcgagatccaagcgtgtgggatgatccaacgtcatttaagccggagagatttgaagggagtgatcagtttggacattacaatggtaaaatgatgccgtttgggttaggaagacgggcttgtcctgggttgagtttggctaaccgggttgttgggttattattgggttcgatgattcagtgctttgagtgggaaagcggctcaggaggtcaggttgatatgactgaaggtccaggacttagtttgcctaaggctgaaccattggttgtcacgtgcagaacacgtgagatggcttccgagttgttgttcttcggatcagagccaagcaataagaatgtctagatttgattttataaatttgtaagttaatacattattacatgcatatatgattcagtgatttattaagcagc

SEQ ID NO: 84022 - protein, 518 aa, Arabidopsis thaliana
  peptide (1)..(518): Ceres Seq. ID no. 12672887
  misc_feature (31)..(498): Pfam Name: Cytochrome P450 Pfam Description: Cytochrome P450
  misc_feature (1)..(518): Homolog of NCBI NO: 30690935 NR Description: cytochrome P450, putative [Arabidopsis thaliana]
  misc_feature (105)..(518): Homolog of NCBI NO: 15809893 NR Description: AT4g37310/C7A10_50 [Arabidopsis thaliana]
  misc_feature (8)..(506): Homolog of NCBI NO: 33521519 NR Description: isoflavone 3'-hydroxylase [Medicago truncatula]
  misc_feature (1)..(507): Homolog of NCBI NO: 15235517 NR Description: cytochrome p450 family; protein id: At4g37320.1
  misc_feature (1)..(500): Homolog of NCBI NO: 15235536 NR Description: cytochrome p450 family; protein id: At4g37370.1, by cDNA: 253698., supported by cDNA: gi_17473897 [Arabidopsis
  misc_feature (6)..(500): Homolog of NCBI NO: 33521521 NR Description: CYP81E8 [Medicago truncatula]
  misc_feature (1)..(507): Homolog of NCBI NO: 15235533 NR Description: cytochrome p450 family; protein id: At4g37330.1
  misc_feature (1)..(500): Homolog of NCBI NO: 21554381 NR Description: cytochrome P450-like protein [Arabidopsis
  misc_feature (1)..(506): Homolog of NCBI NO: 4894170 NR Description: cytochrome P450 [Cicer arietinum]
  misc_feature (1)..(507): Homolog of NCBI NO: 15235535 NR Description: cytochrome p450 family; protein id: At4g37360.1
MDCILLILTTLVAIFIVKIVLLVTKPNKNLPPSPNICFPIIGHLHLLKKPLLHRTLSHLSHSLGPVFSLRLGSRLAVIISSPTAAEECFLTKNDIVLANRPRFIMGKYVAYDYTSMVTAPYGDHWRNLRRITALEVFSTNRLNASAEIRHDEVKMLLQKLHDLSVERPAKVELRQLLTGLTLNVIMRMMTGKRFFEEDDGGKAGISLEFRELVAEILELSAADNPADFLPALRWFDYKGLVKRAKRIGERMDSLLQGFLDEHRANKDRLEFKNTMIAHLLDSQEKEPHNYSDQTIKGLILMMVVGGTDTSALTVEWAMSNLLNHPQILETTRQNIDTQMETSSSRRLLKEEDLVNMNYLKNVVSETLRLYPVAPLMVPHVPSSDCVIGGFNVPRDTIVLVNLWAIHRDPSVWDDPTSFKPERFEGSDQFGHYNGKMMPFGLGRRACPGLSLANRVVGLLLGSMIQCFEWESGSGGQVDMTEGPGLSLPKAEPLVVTCRTREMASELLFFGSEPSNKNV

SEQ ID NO: 84023 - protein, 414 aa, Arabidopsis thaliana; identical to SEQ ID NO: 79358
  peptide (1)..(414): Ceres Seq. ID no. 12672888
  misc_feature (1)..(394): Pfam Name: Cytochrome P450 Pfam Description: Cytochrome P450
  misc_feature (1)..(414): Homolog of NCBI NO: 30690935 NR Description: cytochrome P450, putative [Arabidopsis thaliana]
  misc_feature (1)..(414): Homolog of NCBI NO: 15809893 NR Description: AT4g37310/C7A10_50 [Arabidopsis thaliana]
  misc_feature (1)..(402): Homolog of NCBI NO: 33521519 NR Description: isoflavone 3'-hydroxylase [Medicago truncatula]
  misc_feature (1)..(403): Homolog of NCBI NO: 15235517 NR Description: cytochrome p450 family; protein id: At4g37320.1
  misc_feature (1)..(396): Homolog of NCBI NO: 15235536 NR Description: cytochrome p450 family; protein id: At4g37370.1, by cDNA: 253698., supported by cDNA: gi_17473897 [Arabidopsis
  misc_feature (1)..(396): Homolog of NCBI NO: 33521521 NR Description: CYP81E8 [Medicago truncatula]
  misc_feature (1)..(403): Homolog of NCBI NO: 15235533 NR Description: cytochrome p450 family; protein id: At4g37330.1
  misc_feature (1)..(396): Homolog of NCBI NO: 21554381 NR Description: cytochrome P450-like protein [Arabidopsis
  misc_feature (1)..(402): Homolog of NCBI NO: 4894170 NR Description: cytochrome P450 [Cicer arietinum]
  misc_feature (1)..(403): Homolog of NCBI NO: 15235535 NR Description: cytochrome p450 family; protein id: At4g37360.1

SEQ ID NO: 84024 - protein, 403 aa, Arabidopsis thaliana; identical to SEQ ID NO: 79359
  peptide (1)..(403): Ceres Seq. ID no. 12672889
  misc_feature (1)..(383): Pfam Name: Cytochrome P450 Pfam Description: Cytochrome P450
  misc_feature (1)..(403): Homolog of NCBI NO: 30690935 NR Description: cytochrome P450, putative [Arabidopsis thaliana]
  misc_feature (1)..(403): Homolog of NCBI NO: 15809893 NR Description: AT4g37310/C7A10_50 [Arabidopsis thaliana]
  misc_feature (1)..(391): Homolog of NCBI NO: 33521519 NR Description: isoflavone 3'-hydroxylase [Medicago truncatula]
  misc_feature (1)..(392): Homolog of NCBI NO: 15235517 NR Description: cytochrome p450 family; protein id: At4g37320.1
  misc_feature (1)..(385): Homolog of NCBI NO: 15235536 NR Description: cytochrome p450 family; protein id: At4g37370.1, by cDNA: 253698., supported by cDNA: gi_17473897 [Arabidopsis
  misc_feature (1)..(385): Homolog of NCBI NO: 33521521 NR Description: CYP81E8 [Medicago truncatula]
  misc_feature (1)..(392): Homolog of NCBI NO: 15235533 NR Description: cytochrome p450 family; protein id: At4g37330.1
  misc_feature (1)..(385): Homolog of NCBI NO: 21554381 NR Description: cytochrome P450-like protein [Arabidopsis
  misc_feature (1)..(391): Homolog of NCBI NO: 4894170 NR Description: cytochrome P450 [Cicer arietinum]
  misc_feature (1)..(392): Homolog of NCBI NO: 15235535 NR Description: cytochrome p450 family; protein id: At4g37360.1

SEQ ID NO: 84025 - DNA, 2067 bp, Arabidopsis thaliana
  misc_feature (1)..(2067): Ceres Seq. ID no. 12672890
  misc_feature: MA Experiment ID: 20000171 Result: Down-regulated in Transcription
  misc_feature: MA Experiment 20000171 PARAMETER Experiment Name: At_42deg_Heat_P Parameter: Age (day) Value: 14
  misc_feature: MA Experiment 20000171 PARAMETER Experiment Name: At_42deg_Heat_P Parameter: Organism Value: A. thaliana
  misc_feature: MA Experiment 20000171 PARAMETER Experiment Name: At_42deg_Heat_P Parameter: Plant Line Value: WS
  misc_feature: MA Experiment 20000171 PARAMETER Experiment Name: At_42deg_Heat_P Parameter: Temperature (deg C) Value: 42 vs. 22
  misc_feature: MA Experiment 20000171 PARAMETER Experiment Name: At_42deg_Heat_P Parameter: Timepoint (hr) Value: 1
  misc_feature: MA Experiment 20000171 PARAMETER Experiment Name: At_42deg_Heat_P Parameter: Tissue Value: Aerial
  misc_feature: MA Experiment ID: 20000173 Result: Down-regulated in Transcription
  misc_feature: MA Experiment 20000173 PARAMETER Experiment Name: At_42deg_Heat_P Parameter: Age (day) Value: 14
  misc_feature: MA Experiment 20000173 PARAMETER Experiment Name: At_42deg_Heat_P Parameter: Organism Value: A. thaliana
  misc_feature: MA Experiment 20000173 PARAMETER Experiment Name: At_42deg_Heat_P Parameter: Plant Line Value: WS
  misc_feature: MA Experiment 20000173 PARAMETER Experiment Name: At_42deg_Heat_P Parameter: Temperature (deg C) Value: 42 vs. 22
  misc_feature: MA Experiment 20000173 PARAMETER Experiment Name: At_42deg_Heat_P Parameter: Timepoint (hr) Value: 6
  misc_feature: MA Experiment 20000173 PARAMETER Experiment Name: At_42deg_Heat_P Parameter: Tissue Value: Aerial
  misc_feature: MA Experiment ID: 20000182 Result: Down-regulated in Transcription
  misc_feature: MA Experiment 20000182 PARAMETER Experiment Name: At_2mM_SA_P Parameter: Age (day) Value: 14
  misc_feature: MA Experiment 20000182 PARAMETER Experiment Name: At_2mM_SA_P Parameter: Organism Value: A. thaliana
  misc_feature: MA Experiment 20000182 PARAMETER Experiment Name: At_2mM_SA_P Parameter: Plant Line Value: WS
  misc_feature: MA Experiment 20000182 PARAMETER Experiment Name: At_2mM_SA_P Parameter: Timepoint (hr) Value: 6
  misc_feature: MA Experiment 20000182 PARAMETER Experiment Name: At_2mM_SA_P Parameter: Tissue Value: Aerial
  misc_feature: MA Experiment 20000182 PARAMETER Experiment Name: At_2mM_SA_P Parameter: Treatment Value: 2mM SA vs. No Treatment
  misc_feature: MA Experiment ID: 20000265 Result: Up-regulated in Transcription
  misc_feature: MA Experiment 20000265 PARAMETER Experiment Name: At_Open_Flower_P Parameter: Age (day) Value: 21
  misc_feature: MA Experiment 20000265 PARAMETER Experiment Name: At_Open_Flower_P Parameter: Plant Line Value: WS
  misc_feature: MA Experiment 20000265 PARAMETER Experiment Name: At_Open_Flower_P Parameter: Tissue Value: Closed Flower vs. Whole Plant
  misc_feature: MA Experiment ID: 20000286 Result: Up-regulated in Transcription
  misc_feature: MA Experiment 20000286 PARAMETER Experiment Name: At_Open_Flower_P Parameter: Age (day) Value: 21
  misc_feature: MA Experiment 20000286 PARAMETER Experiment Name: At_Open_Flower_P Parameter: Plant Line Value: WS
  misc_feature: MA Experiment 20000286 PARAMETER Experiment Name: At_Open_Flower_P Parameter: Tissue Value: Half Open vs. Whole Plant
  misc_feature: MA Experiment ID: 20000436 Result: Down-regulated in Transcription
  misc_feature: MA Experiment 20000436 PARAMETER Experiment Name: At_Drought_P Parameter: Age (day) Value: 7
  misc_feature: MA Experiment 20000436 PARAMETER Experiment Name: At_Drought_P Parameter: Organism Value: A. thaliana
  misc_feature: MA Experiment 20000436 PARAMETER Experiment Name: At_Drought_P Parameter: Plant Line Value: WS
  misc_feature: MA Experiment 20000436 PARAMETER Experiment Name: At_Drought_P Parameter: Timepoint (hr) Value: 12
  misc_feature: MA Experiment 20000436 PARAMETER Experiment Name: At_Drought_P Parameter: Tissue Value: Whole Plant
  misc_feature: MA Experiment 20000436 PARAMETER Experiment Name: At_Drought_P Parameter: Treatment Value: Drought vs. No Drought
  misc_feature: MA Experiment ID: 20000437 Result: Down-regulated in Transcription
  misc_feature: MA Experiment 20000437 PARAMETER Experiment Name: At_Drought_P Parameter: Age (day) Value: 8
  misc_feature: MA Experiment 20000437 PARAMETER Experiment Name: At_Drought_P Parameter: Organism Value: A. thaliana
  misc_feature: MA Experiment 20000437 PARAMETER Experiment Name: At_Drought_P Parameter: Plant Line Value: WS
  misc_feature: MA Experiment 20000437 PARAMETER Experiment Name: At_Drought_P Parameter: Timepoint (hr) Value: 24
  misc_feature: MA Experiment 20000437 PARAMETER Experiment Name: At_Drought_P Parameter: Tissue Value: Whole Plant
  misc_feature: MA Experiment 20000437 PARAMETER Experiment Name: At_Drought_P Parameter: Treatment Value: Drought vs. No Drought
  misc_feature: MA Experiment ID: 20000794 Result: Up-regulated in Transcription
  misc_feature: MA Experiment 20000794 PARAMETER Experiment Name: At_Petals_P Parameter: Age (day) Value: 23-25 days
  misc_feature: MA Experiment 20000794 PARAMETER Experiment Name: At_Petals_P Parameter: Plant Line Value: WS
  misc_feature: MA Experiment 20000794 PARAMETER Experiment Name: At_Petals_P Parameter: Tissue Value: Petals vs. Whole plant
  misc_feature: MA Experiment ID: 20001248 Result: Down-regulated in Transcription
  misc_feature: MA Experiment 20001248 PARAMETER Experiment Name: At_Far-red-induction_P Parameter: Age (day) Value: 7
  misc_feature: MA Experiment 20001248 PARAMETER Experiment Name: At_Far-red-induction_P Parameter: Light Value: Far-red vs. White
  misc_feature: MA Experiment 20001248 PARAMETER Experiment Name: At_Far-red-induction_P Parameter: Organism Value: A. thaliana
  misc_feature: MA Experiment 20001248 PARAMETER Experiment Name: At_Far-red-induction_P Parameter: Plant Line Value: Columbia
  misc_feature: MA Experiment 20001248 PARAMETER Experiment Name: At_Far-red-induction_P Parameter: Timepoint (hr) Value: 4
  misc_feature: MA Experiment 20001248 PARAMETER Experiment Name: At_Far-red-induction_P Parameter: Tissue Value: Whole Plant
  misc_feature: MA Experiment ID: 20001450 Result: Down-regulated in Transcription
  misc_feature: MA Experiment 20001450 PARAMETER Experiment Name: At_Far-red-induction_P Parameter: Age (day) Value: 7
  misc_feature: MA Experiment 20001450 PARAMETER Experiment Name: At_Far-red-induction_P Parameter: Light Value: Far-red vs. White
  misc_feature: MA Experiment 20001450 PARAMETER Experiment Name: At_Far-red-induction_P Parameter: Organism Value: A. thaliana
  misc_feature: MA Experiment 20001450 PARAMETER Experiment Name: At_Far-red-induction_P Parameter: Plant Line Value: Columbia
  misc_feature: MA Experiment 20001450 PARAMETER Experiment Name: At_Far-red-induction_P Parameter: Timepoint (hr) Value: 8
  misc_feature: MA Experiment 20001450 PARAMETER Experiment Name: At_Far-red-induction_P Parameter: Tissue Value: Whole Plant
  misc_feature: MA Experiment ID: 20001451 Result: Down-regulated in Transcription
  misc_feature: MA Experiment 20001451 PARAMETER Experiment Name: At_Far-red-induction_P Parameter: Age (day) Value: 7
  misc_feature: MA Experiment 20001451 PARAMETER Experiment Name: At_Far-red-induction_P Parameter: Light Value: Far-red vs. White
  misc_feature: MA Experiment 20001451 PARAMETER Experiment Name: At_Far-red-induction_P Parameter: Organism Value: A. thaliana
  misc_feature: MA Experiment 20001451 PARAMETER Experiment Name: At_Far-red-induction_P Parameter: Plant Line Value: Columbia
  misc_feature: MA Experiment 20001451 PARAMETER Experiment Name: At_Far-red-induction_P Parameter: Timepoint (hr) Value: 24
  misc_feature: MA Experiment 20001451 PARAMETER Experiment Name: At_Far-red-induction_P Parameter: Tissue Value: Whole Plant
  misc_feature: MA Experiment ID: 20001558 Result: Up-regulated in Transcription
  misc_feature: MA Experiment 20001558 PARAMETER Experiment Name: At_Drought_Soil_Dry_P Parameter: Age (day) Value: 27
  misc_feature: MA Experiment 20001558 PARAMETER Experiment Name: At_Drought_Soil_Dry_P Parameter: Organism Value: A. thaliana
  misc_feature: MA Experiment 20001558 PARAMETER Experiment Name: At_Drought_Soil_Dry_P Parameter: Plant Line Value: WS
  misc_feature: MA Experiment 20001558 PARAMETER Experiment Name: At_Drought_Soil_Dry_P Parameter: Post Timepoint (hr) Value: 6
  misc_feature: MA Experiment 20001558 PARAMETER Experiment Name: At_Drought_Soil_Dry_P Parameter: Post-Treatment Value: Re-Water vs. No Drought
  misc_feature: MA Experiment 20001558 PARAMETER Experiment Name: At_Drought_Soil_Dry_P Parameter: Timepoint (day) Value: 13
  misc_feature: MA Experiment 20001558 PARAMETER Experiment Name: At_Drought_Soil_Dry_P Parameter: Treatment Value: Drought vs. No Drought
  misc_feature: MA Experiment ID: 20001906 Result: Down-regulated in Transcription
  misc_feature: MA Experiment 20001906 PARAMETER Experiment Name: At_Drought_Reproduction_P Parameter: Age (day) Value: 35
  misc_feature: MA Experiment 20001906 PARAMETER Experiment Name: At_Drought_Reproduction_P Parameter: Organism Value: A. thaliana
  misc_feature: MA Experiment 20001906 PARAMETER Experiment Name: At_Drought_Reproduction_P Parameter: Plant Line Value: WS
  misc_feature: MA Experiment 20001906 PARAMETER Experiment Name: At_Drought_Reproduction_P Parameter: Timepoint (day) Value: 5
  misc_feature: MA Experiment 20001906 PARAMETER Experiment Name: At_Drought_Reproduction_P Parameter: Tissue Value: Siliques
  misc_feature: MA Experiment 20001906 PARAMETER Experiment Name: At_Drought_Reproduction_P Parameter: Treatment Value: Drought vs. No Drought
  misc_feature: MA Experiment ID: 20001911 Result: Down-regulated in Transcription
  misc_feature: MA Experiment 20001911 PARAMETER Experiment Name: At_Drought_Reproduction_P Parameter: Age (day) Value: 40
  misc_feature: MA Experiment 20001911 PARAMETER Experiment Name: At_Drought_Reproduction_P Parameter: Organism Value: A. thaliana
  misc_feature: MA Experiment 20001911 PARAMETER Experiment Name: At_Drought_Reproduction_P Parameter: Plant Line Value: WS
  misc_feature: MA Experiment 20001911 PARAMETER Experiment Name: At_Drought_Reproduction_P Parameter: Timepoint (day) Value: 10
  misc_feature: MA Experiment 20001911 PARAMETER Experiment Name: At_Drought_Reproduction_P Parameter: Tissue Value: Flowers
  misc_feature: MA Experiment 20001911 PARAMETER Experiment Name: At_Drought_Reproduction_P Parameter: Treatment Value: Drought vs. No Drought
attctgtttgtgagtgtgtttttttggtctatatgagtaatgatgtttcgtggtattctgaaatctgcaaaggatgagaagaagaagatggagtctcaaggcaatggagctgttgctaattcaggaaaatctctggttaatcgccgacgagctaacaaagaaaagaaaatggatttgctacaagatgttgataagcttaagaggaagctgagacaggaggagaatgttcatagagcattggagagagcttttactagacctttaggagctttacctcgtcttccgtcttacctccctcgacatacattggagcttcttgctgaagtagctgttcttgaagaggaagtggttcggttagaggagcaagttgtaaactttagacaaggtttataccaagaagctgtttacatatcttcaaagaggaatctggagagtcctaataacaacagtttgaatgagaattcgcccgttagaagcactaaacaccagagatcgaaatcaatgtcgcaacacgagttcaattctatgatcactcccactaaaaagcatcaacagtctcttagcagaagcatctcaagtaggaaactcttctcctctgatcaaacagttaatgaccgaagtggtcagagagtggtaagtggcaaacaagcgtcgcctaaatcaaatctaagcagtgttactaatactaagccagtagatgtgagagggaaagagaatcagacctctagtaatgcttcaaaagacaagaaaaataaagaatcacctgagaagaagcttggcagattcttgacatctgtgaagaagaagaaacctttgattaagccggaggctgcagcggataaacactcagaatcaaccaaattgcagctagatgatagattagcagatcaggacaaagctcaagagagtgtgtcaggatcatcttcggaagacaagacactgcaaagtggaaatgtagcaaacagagtttcagaggatttactgaaatgtcttgtgactattatcttgaggattagctcgtccaaggacattgtgttggatccatataataactgctcagagtggagaacaagagaacttggtgcatacaagcatttttcgtcggtcgatacatcttcagttgatcttggacgaagaatcaatgcttcatttctgatccatcgtctcaagttcctgcttaataagctttctgttgtcaatctagacggtcttagccaccagcagaagcttgcattctggataaatacttataattcctgcgttatgaatgcattcttggagcacgggatcccggcgactcctgaaatggttgtagcgctgatgcagaaggcaacaataattgtgggaggacactcgctaaatgcaatcacaatcgaacatttcatcttgagacttccataccacttgaaattcacttgtcccaaaactgcaacacatgaagaaatgagagctcatagcacatttggattggaatggtcagagcccttggtcacattcgctctcgcctgtggaagctggtcctctcctgctgtaagggtctacacagcagctaatgtagaggaagagctagaagctgcaaagagagattatctgcaagcatcagttgggatatcaaagaacaacaaactaatgcttccaaaggtattagattggtacttactcgactttgccaaggatttggaatcgttactggattgggtttgccttcagttacctgataaactaagagaagaagcaactaagtgtatggagagaaagaacaaagaatcactaatggaattggttcaagtagtaccatatgacttcagtttcagattgcttttgcatcaatgaataaaaaaatgttaaacactgtatagatttgggttggggagagagtaaagtagagcgcatgagttcaatttgttattgttttttttggttggctgagagtatatatagattatatggttgtgttcttttactataaagtgatgtaaaattcattcaattgatttttatttgtaatgctatatatgtatatgtctacaccattttttttttgtctgatttgttttttcttgtctc

SEQ ID NO: 84026 - protein, 597 aa, Arabidopsis thaliana
  peptide (1)..(597): Ceres Seq. ID no. 12672891
  misc_feature (377)..(518): Pfam Name: Protein of unknown function, DUF547 Pfam Description: Protein of unknown function, DUF547
  misc_feature (1)..(597): Homolog of NCBI NO: 30690854 NR Description: expressed protein [Arabidopsis thaliana] AT4g37080/C7A10_280 [Arabidopsis thaliana]
  misc_feature (2)..(597): Homolog of NCBI NO: 25407787 NR Description: hypothetical protein AT4g37080 [imported] - thaliana >gi|4006868|emb|CAB16786.1| putative protein thaliana] >gi|7270657|emb|CAB80374.1| putative protein
  misc_feature (214)..(594): Homolog of NCBI NO: 15239037 NR Description: putative protein; protein id: At5g42690.1 thaliana] >gi|10177272|dbj|BAB10625.1|
  misc_feature (333)..(595): Homolog of NCBI NO: 15225527 NR Description: hypothetical protein; protein id: At2g39690.1
  misc_feature (333)..(595): Homolog of NCBI NO: 9294368 NR Description: gb|AAB97123.1~gene_id:T16H11.2~similar to unknown
  misc_feature (345)..(595): Homolog of NCBI NO: 34895788 NR Description: P0434B04.9 [Oryza sativa (japonica
  misc_feature (32)..(120): Homolog of NCBI NO: 34895788 NR Description: P0434B04.9 [Oryza sativa (japonica
  misc_feature (291)..(595): Homolog of NCBI NO: 15983811 NR Description: AT5g60720/mup24_130 [Arabidopsis thaliana]
  misc_feature (291)..(595): Homolog of NCBI NO: 30697420 NR Description: expressed protein [Arabidopsis thaliana]
  misc_feature (161)..(594): Homolog of NCBI NO: 25518300 NR Description: hypothetical protein F17F16.4 - Arabidopsis >gi|9954731|gb|AAG09084.1|AC026237_5 Unknown Protein [Arabidopsis
MMFRGILKSAKDEKKKMESQGNGAVANSGKSLVNRRRANKEKKMDLLQDVDKLKRKLRQEENVHRALERAFTRPLGALPRLPSYLPRHTLELLAEVAVLEEEVVRLEEQVVNFRQGLYQEAVYISSKRNLESPNNNSLNENSPVRSTKHQRSKSMSQHEFNSMITPTKKHQQSLSRSISSRKLFSSDQTVNDRSGQRVVSGKQASPKSNLSSVTNTKPVDVRGKENQTSSNASKDKKNKESPEKKLGRFLTSVKKKKPLIKPEAAADKHSESTKLQLDDRLADQDKAQESVSGSSSEDKTLQSGNVANRVSEDLLKCLVTIILRISSSKDIVLDPYNNCSEWRTRELGAYKHFSSVDTSSVDLGRRINASFLIHRLKFLLNKLSVVNLDGLSHQQKLAFWINTYNSCVMNAFLEHGIPATPEMVVALMQKATIIVGGHSLNAITIEHFILRLPYHLKFTCPKTATHEEMRAHSTFGLEWSEPLVTFALACGSWSSPAVRVYTAANVEEELEAAKRDYLQASVGISKNNKLMLPKVLDWYLLDFAKDLESLLDWVCLQLPDKLREEATKCMERKNKESLMELVQVVPYDFSFRLLLHQ

SEQ ID NO: 84027 - protein, 596 aa, Arabidopsis thaliana; identical to SEQ ID NO: 72146
  peptide (1)..(596): Ceres Seq. ID no. 12672892
  misc_feature (376)..(517): Pfam Name: Protein of unknown function, DUF547 Pfam Description: Protein of unknown function, DUF547
  misc_feature (1)..(596): Homolog of NCBI NO: 30690854 NR Description: expressed protein [Arabidopsis thaliana] AT4g37080/C7A10_280 [Arabidopsis thaliana]
  misc_feature (1)..(596): Homolog of NCBI NO: 25407787 NR Description: hypothetical protein AT4g37080 [imported] - thaliana >gi|4006868|emb|CAB16786.1| putative protein thaliana] >gi|7270657|emb|CAB80374.1| putative protein
  misc_feature (213)..(593): Homolog of NCBI NO: 15239037 NR Description: putative protein; protein id: At5g42690.1 thaliana] >gi|10177272|dbj|BAB10625.1|
  misc_feature (332)..(594): Homolog of NCBI NO: 15225527 NR Description: hypothetical protein; protein id: At2g39690.1
  misc_feature (332)..(594): Homolog of NCBI NO: 9294368 NR Description: gb|AAB97123.1~gene_id:T16H11.2~similar to unknown
  misc_feature (344)..(594): Homolog of NCBI NO: 34895788 NR Description: P0434B04.9 [Oryza sativa (japonica
  misc_feature (31)..(119): Homolog of NCBI NO: 34895788 NR Description: P0434B04.9 [Oryza sativa (japonica
  misc_feature (290)..(594): Homolog of NCBI NO: 15983811 NR Description: AT5g60720/mup24_130 [Arabidopsis thaliana]
  misc_feature (290)..(594): Homolog of NCBI NO: 30697420 NR Description: expressed protein [Arabidopsis thaliana]
  misc_feature (160)..(593): Homolog of NCBI NO: 25518300 NR Description: hypothetical protein F17F16.4 - Arabidopsis >gi|9954731|gb|AAG09084.1|AC026237_5 Unknown Protein [Arabidopsis

SEQ ID NO: 84028 - protein, 581 aa, Arabidopsis thaliana; identical to SEQ ID NO: 72147
  peptide (1)..(581): Ceres Seq. ID no. 12672893
  misc_feature (361)..(502): Pfam Name: Protein of unknown function, DUF547 Pfam Description: Protein of unknown function, DUF547
  misc_feature (1)..(581): Homolog of NCBI NO: 30690854 NR Description: expressed protein [Arabidopsis thaliana] AT4g37080/C7A10_280 [Arabidopsis thaliana]
  misc_feature (1)..(581): Homolog of NCBI NO: 25407787 NR Description: hypothetical protein AT4g37080 [imported] - thaliana >gi|4006868|emb|CAB16786.1| putative protein thaliana] >gi|7270657|emb|CAB80374.1| putative protein
  misc_feature (198)..(578): Homolog of NCBI NO: 15239037 NR Description: putative protein; protein id: At5g42690.1 thaliana] >gi|10177272|dbj|BAB10625.1|
  misc_feature (317)..(579): Homolog of NCBI NO: 15225527 NR Description: hypothetical protein; protein id: At2g39690.1
  misc_feature (317)..(579): Homolog of NCBI NO: 9294368 NR Description: gb|AAB97123.1~gene_id:T16H11.2~similar to unknown
  misc_feature (329)..(579): Homolog of NCBI NO: 34895788 NR Description: P0434B04.9 [Oryza sativa (japonica
  misc_feature (16)..(104): Homolog of NCBI NO: 34895788 NR Description: P0434B04.9 [Oryza sativa (japonica
  misc_feature (275)..(579): Homolog of NCBI NO: 15983811 NR Description: AT5g60720/mup24_130 [Arabidopsis thaliana]
  misc_feature (275)..(579): Homolog of NCBI NO: 30697420 NR Description: expressed protein [Arabidopsis thaliana]
  misc_feature (145)..(578): Homolog of NCBI NO: 25518300 NR Description: hypothetical protein F17F16.4 - Arabidopsis >gi|9954731|gb|AAG09084.1|AC026237_5 Unknown Protein [Arabidopsis

SEQ ID NO: 84029 - DNA, 1656 bp, Arabidopsis thaliana
  misc_feature (1)..(1656): Ceres Seq. ID no. 12672914
  misc_feature: MA Experiment ID: 108434 Result: Down-regulated in Transcription
  misc_feature: MA Experiment 108434 PARAMETER Experiment Name: At_Root_Tips_cDNA_P Parameter: Tissue Value: Root Tips
  misc_feature: MA Experiment ID: 108461 Result: Down-regulated in Transcription
  misc_feature: MA Experiment 108461 PARAMETER Experiment Name: At_Germinating_Seeds_cDNA_P Parameter: Age (day) Value: 1 vs. 0
  misc_feature: MA Experiment 108461 PARAMETER Experiment Name: At_Germinating_Seeds_cDNA_P Parameter: Tissue Value: Germinating Seeds
  misc_feature: MA Experiment ID: 108464 Result: Up-regulated in Transcription
  misc_feature: MA Experiment 108464 PARAMETER Experiment Name: At_Germinating_Seeds_cDNA_P Parameter: Age (day) Value: 4 vs. 0
  misc_feature: MA Experiment 108464 PARAMETER Experiment Name: At_Germinating_Seeds_cDNA_P Parameter: Tissue Value: Germinating Seeds
  misc_feature: MA Experiment ID: 108489 Result: Up-regulated in Transcription
  misc_feature: MA Experiment ID: 108501 Result: Down-regulated in Transcription
  misc_feature: MA Experiment 108501 PARAMETER Experiment Name: At_ap2_floral_buds_cDNA_P Parameter: Plant Line Value: ap2 (Ler.)
  misc_feature: MA Experiment 108501 PARAMETER Experiment Name: At_ap2_floral_buds_cDNA_P Parameter: Tissue Value: Closed Flower
  misc_feature: MA Experiment ID: 108573 Result: Up-regulated in Transcription
  misc_feature: MA Experiment 108573 PARAMETER Experiment Name: At_Drought_cDNA_P Parameter: Timepoint (hr) Value: 6
  misc_feature: MA Experiment 108573 PARAMETER Experiment Name: At_Drought_cDNA_P Parameter: Tissue Value: Aerial
  misc_feature: MA Experiment 108573 PARAMETER Experiment Name: At_Drought_cDNA_P Parameter: Treatment Value: Drought vs. No Drought
  misc_feature: MA Experiment ID: 108585 Result: Up-regulated in Transcription
  misc_feature: MA Experiment 108585 PARAMETER Experiment Name: At_5mM_NaNP_cDNA_P Parameter: Timepoint (hr) Value: 6
  misc_feature: MA Experiment 108585 PARAMETER Experiment Name: At_5mM_NaNP_cDNA_P Parameter: Tissue Value: Aerial
  misc_feature: MA Experiment 108585 PARAMETER Experiment Name: At_5mM_NaNP_cDNA_P Parameter: Treatment Value: null
  misc_feature: MA Experiment ID: 108594 Result: Down-regulated in Transcription
  misc_feature: MA Experiment 108594 PARAMETER Experiment Name: At_Ler-rhl_Root_cDNA_P Parameter: Plant Line Value: null
  misc_feature: MA Experiment ID: 108595 Result: Up-regulated in Transcription
  misc_feature: MA Experiment 108595 PARAMETER Experiment Name: At_Ler-pi_Ovule_cDNA_P Parameter: Plant Line Value: null
  misc_feature: MA Experiment ID: 108608 Result: Up-regulated in Transcription
  misc_feature: MA Experiment 108608 PARAMETER Experiment Name: At_100uM_ABA_cDNA_P Parameter: Timepoint (hr) Value: 1
  misc_feature: MA Experiment 108608 PARAMETER Experiment Name: At_100uM_ABA_cDNA_P Parameter: Tissue Value: Aerial
  misc_feature: MA Experiment 108608 PARAMETER Experiment Name: At_100uM_ABA_cDNA_P Parameter: Treatment Value: 100uM ABA vs. No Treatment
  misc_feature: MA Experiment ID: 108609 Result: Up-regulated in Transcription
  misc_feature: MA Experiment 108609 PARAMETER Experiment Name: At_100uM_ABA_cDNA_P Parameter: Timepoint (hr) Value: 24
  misc_feature: MA Experiment 108609 PARAMETER Experiment Name: At_100uM_ABA_cDNA_P Parameter: Tissue Value: Aerial
  misc_feature: MA Experiment 108609 PARAMETER Experiment Name: At_100uM_ABA_cDNA_P Parameter: Treatment Value: 100uM ABA vs. No Treatment
  misc_feature: MA Experiment ID: 108668 Result: Up-regulated in Transcription
  misc_feature: MA Experiment 108668 PARAMETER Experiment Name: At_2mM_SA_cDNA_P Parameter: Plant Line Value: WS
  misc_feature: MA Experiment 108668 PARAMETER Experiment Name: At_2mM_SA_cDNA_P Parameter: Timepoint (hr) Value: 6
  misc_feature: MA Experiment 108668 PARAMETER Experiment Name: At_2mM_SA_cDNA_P Parameter: Treatment Value: 2mM SA vs. No Treatment
  misc_feature: MA Experiment ID: 20000069 Result: Up-regulated in Transcription
  misc_feature: MA Experiment 20000069 PARAMETER Experiment Name: At_100uM_ABA_Mutants_cDNA_P Parameter: Plant Line Value: CS23
  misc_feature: MA Experiment 20000069 PARAMETER Experiment Name: At_100uM_ABA_Mutants_cDNA_P Parameter: Timepoint (hr) Value: 6
  misc_feature: MA Experiment 20000069 PARAMETER Experiment Name: At_100uM_ABA_Mutants_cDNA_P Parameter: Tissue Value: Aerial
  misc_feature: MA Experiment 20000069 PARAMETER Experiment Name: At_100uM_ABA_Mutants_cDNA_P Parameter: Treatment Value: 100uM ABA vs. No Treatment
  misc_feature: MA Experiment ID: 20000071 Result: Up-regulated in Transcription
  misc_feature: MA Experiment 20000071 PARAMETER Experiment Name: At_100uM_ABA_Mutants_cDNA_P Parameter: Plant Line Value: CS8104
  misc_feature: MA Experiment 20000071 PARAMETER Experiment Name: At_100uM_ABA_Mutants_cDNA_P Parameter: Timepoint (hr) Value: 6
  misc_feature: MA Experiment 20000071 PARAMETER Experiment Name: At_100uM_ABA_Mutants_cDNA_P Parameter: Tissue Value: Aerial
  misc_feature: MA Experiment 20000071 PARAMETER Experiment Name: At_100uM_ABA_Mutants_cDNA_P Parameter: Treatment Value: 100uM ABA vs. No Treatment
  misc_feature: MA Experiment ID: 20000072 Result: Up-regulated in Transcription
  misc_feature: MA Experiment 20000072 PARAMETER Experiment Name: At_100uM_ABA_Mutants_cDNA_P Parameter: Plant Line Value: CS8105
  misc_feature: MA Experiment 20000072 PARAMETER Experiment Name: At_100uM_ABA_Mutants_cDNA_P Parameter: Timepoint (hr) Value: 6
  misc_feature: MA Experiment 20000072 PARAMETER Experiment Name: At_100uM_ABA_Mutants_cDNA_P Parameter: Tissue Value: Aerial
  misc_feature: MA Experiment 20000072 PARAMETER Experiment Name: At_100uM_ABA_Mutants_cDNA_P Parameter: Treatment Value: 100uM ABA vs. No Treatment
  misc_feature: MA Experiment ID: 20000086 Result: Up-regulated in Transcription
  misc_feature: MA Experiment 20000086 PARAMETER Experiment Name: At_100uM_ABA_Mutants_cDNA_P Parameter: Plant Line Value: CS22
  misc_feature: MA Experiment 20000086 PARAMETER Experiment Name: At_100uM_ABA_Mutants_cDNA_P Parameter: Timepoint (hr) Value: 6
  misc_feature: MA Experiment 20000086 PARAMETER Experiment Name: At_100uM_ABA_Mutants_cDNA_P Parameter: Tissue Value: Aerial
  misc_feature: MA Experiment 20000086 PARAMETER Experiment Name: At_100uM_ABA_Mutants_cDNA_P Parameter: Treatment Value: 100uM ABA vs. No Treatment
  misc_feature: MA Experiment ID: 20000087 Result: Up-regulated in Transcription
  misc_feature: MA Experiment 20000087 PARAMETER Experiment Name: At_100uM_ABA_Mutants_cDNA_P Parameter: Plant Line Value: WS
  misc_feature: MA Experiment 20000087 PARAMETER Experiment Name: At_100uM_ABA_Mutants_cDNA_P Parameter: Timepoint (hr) Value: 6
  misc_feature: MA Experiment 20000087 PARAMETER Experiment Name: At_100uM_ABA_Mutants_cDNA_P Parameter: Tissue Value: Aerial
  misc_feature: MA Experiment 20000087 PARAMETER Experiment Name: At_100uM_ABA_Mutants_cDNA_P Parameter: Treatment Value: 100uM ABA vs. No Treatment
  misc_feature: MA Experiment ID: 20000088 Result: Up-regulated in Transcription
  misc_feature: MA Experiment 20000088 PARAMETER Experiment Name: At_100uM_ABA_Mutants_cDNA_P Parameter: Plant Line Value: Landsberg
  misc_feature: MA Experiment 20000088 PARAMETER Experiment Name: At_100uM_ABA_Mutants_cDNA_P Parameter: Timepoint (hr) Value: 6
  misc_feature: MA Experiment 20000088 PARAMETER Experiment Name: At_100uM_ABA_Mutants_cDNA_P Parameter: Tissue Value: Aerial
  misc_feature: MA Experiment 20000088 PARAMETER Experiment Name: At_100uM_ABA_Mutants_cDNA_P Parameter: Treatment Value: 100uM ABA vs. No Treatment
  misc_feature: MA Experiment ID: 20000117 Result: Up-regulated in Transcription
  misc_feature: MA Experiment 20000117 PARAMETER Experiment Name: At_100uM_ABA_Mutants_cDNA_P Parameter: Plant Line Value: Columbia
  misc_feature: MA Experiment 20000117 PARAMETER Experiment Name: At_100uM_ABA_Mutants_cDNA_P Parameter: Timepoint (hr) Value: 6
  misc_feature: MA Experiment 20000117 PARAMETER Experiment Name: At_100uM_ABA_Mutants_cDNA_P Parameter: Tissue Value: Aerial
  misc_feature: MA Experiment 20000117 PARAMETER Experiment Name: At_100uM_ABA_Mutants_cDNA_P Parameter: Treatment Value: 100uM ABA vs. No Treatment
  misc_feature: MA Experiment ID: 20000166 Result: Up-regulated in Transcription
  misc_feature: MA Experiment 20000166 PARAMETER Experiment Name: At_100uM_ABA_P Parameter: Age (day) Value: 14
  misc_feature: MA Experiment 20000166 PARAMETER Experiment Name: At_100uM_ABA_P Parameter: Organism Value: A. thaliana
  misc_feature: MA Experiment 20000166 PARAMETER Experiment Name: At_100uM_ABA_P Parameter: Plant Line Value: WS
  misc_feature: MA Experiment 20000166 PARAMETER Experiment Name: At_100uM_ABA_P Parameter: Timepoint (hr) Value: 1
  misc_feature: MA Experiment 20000166 PARAMETER Experiment Name: At_100uM_ABA_P Parameter: Tissue Value: Aerial
  misc_feature: MA Experiment 20000166 PARAMETER Experiment Name: At_100uM_ABA_P Parameter: Treatment Value: 100uM ABA vs. No Treatment
  misc_feature: MA Experiment ID: 20000180 Result: Down-regulated in Transcription
  misc_feature: MA Experiment 20000180 PARAMETER Experiment Name: At_Germinating_Seeds_P Parameter: Age (hr) Value: 24 vs. 0
  misc_feature: MA Experiment 20000180 PARAMETER Experiment Name: At_Germinating_Seeds_P Parameter: Tissue Value: Germinating Seeds
  misc_feature: MA Experiment ID: 20000182 Result: Up-regulated in Transcription
  misc_feature: MA Experiment 20000182 PARAMETER Experiment Name: At_2mM_SA_P Parameter: Age (day) Value: 14
  misc_feature: MA Experiment 20000182 PARAMETER Experiment Name: At_2mM_SA_P Parameter: Organism Value: A. thaliana
  misc_feature: MA Experiment 20000182 PARAMETER Experiment Name: At_2mM_SA_P Parameter: Plant Line Value: WS
  misc_feature: MA Experiment 20000182 PARAMETER Experiment Name: At_2mM_SA_P Parameter: Timepoint (hr) Value: 6
  misc_feature: MA Experiment 20000182 PARAMETER Experiment Name: At_2mM_SA_P Parameter: Tissue Value: Aerial
  misc_feature: MA Experiment 20000182 PARAMETER Experiment Name: At_2mM_SA_P Parameter: Treatment Value: 2mM SA vs. No Treatment
  misc_feature: MA Experiment ID: 20000184 Result: Down-regulated in Transcription
  misc_feature: MA Experiment 20000184 PARAMETER Experiment Name: At_Shoots__P Parameter: Age (day) Value: 7
  misc_feature: MA Experiment 20000184 PARAMETER Experiment Name: At_Shoots__P Parameter: Tissue Value: Shoots vs. Whole Plant
  misc_feature: MA Experiment ID: 20000185 Result: Down-regulated in Transcription
  misc_feature: MA Experiment 20000185 PARAMETER Experiment Name: At_Roots__P Parameter: Age (day) Value: 7 vs. 21
  misc_feature: MA Experiment 20000185 PARAMETER Experiment Name: At_Roots__P Parameter: Organism Value: A. thaliana
  misc_feature: MA Experiment 20000185 PARAMETER Experiment Name: At_Roots__P Parameter: Tissue Value: Roots vs. Whole Plant
  misc_feature: MA Experiment ID: 20000234 Result: Down-regulated in Transcription
  misc_feature: MA Experiment 20000234 PARAMETER Experiment Name: At_Siliques_P Parameter: Age (day) Value: 21
  misc_feature: MA Experiment 20000234 PARAMETER Experiment Name: At_Siliques_P Parameter: Organism Value: A. thaliana
  misc_feature: MA Experiment 20000234 PARAMETER Experiment Name: At_Siliques_P Parameter: Plant Line Value: WS
  misc_feature: MA Experiment 20000234 PARAMETER Experiment Name: At_Siliques_P Parameter: Tissue Value: Less Than 5mm Siliques vs. Whole Plant
  misc_feature: MA Experiment ID: 20000235 Result: Down-regulated in Transcription
  misc_feature: MA Experiment 20000235 PARAMETER Experiment Name: At_Siliques_P Parameter: Age (day) Value: 21
  misc_feature: MA Experiment 20000235 PARAMETER Experiment Name: At_Siliques_P Parameter: Organism Value: A. thaliana
  misc_feature: MA Experiment 20000235 PARAMETER Experiment Name: At_Siliques_P Parameter: Plant Line Value: WS
  misc_feature: MA Experiment 20000235 PARAMETER Experiment Name: At_Siliques_P Parameter: Tissue Value: 5-10mm Siliques vs. Whole Plant
  misc_feature: MA Experiment ID: 20000264 Result: Down-regulated in Transcription
  misc_feature: MA Experiment 20000264 PARAMETER Experiment Name: At_Open_Flower_P Parameter: Age (day) Value: 21
  misc_feature: MA Experiment 20000264 PARAMETER Experiment Name: At_Open_Flower_P Parameter: Plant Line Value: WS
  misc_feature: MA Experiment 20000264 PARAMETER Experiment Name: At_Open_Flower_P Parameter: Tissue Value: Open Flower vs. Whole Plant
  misc_feature: MA Experiment ID: 20000265 Result: Down-regulated in Transcription
  misc_feature: MA Experiment 20000265 PARAMETER Experiment Name: At_Open_Flower_P Parameter: Age (day) Value: 21
  misc_feature: MA Experiment 20000265 PARAMETER Experiment Name: At_Open_Flower_P Parameter: Plant Line Value: WS
  misc_feature: MA Experiment 20000265 PARAMETER Experiment Name: At_Open_Flower_P Parameter: Tissue Value: Closed Flower vs. Whole Plant
  misc_feature: MA Experiment ID: 20000286 Result: Down-regulated in Transcription
  misc_feature: MA Experiment 20000286 PARAMETER Experiment Name: At_Open_Flower_P Parameter: Age (day) Value: 21
  misc_feature: MA Experiment 20000286 PARAMETER Experiment Name: At_Open_Flower_P Parameter: Plant Line Value: WS
  misc_feature: MA Experiment 20000286 PARAMETER Experiment Name: At_Open_Flower_P Parameter: Tissue Value: Half Open vs. Whole Plant
  misc_feature: MA Experiment ID: 20000288 Result: Up-regulated in Transcription
  misc_feature: MA Experiment 20000288 PARAMETER Experiment Name: At_Drought_P Parameter: Age (day) Value: 7
  misc_feature: MA Experiment 20000288 PARAMETER Experiment Name: At_Drought_P Parameter: Organism Value: A. thaliana
  misc_feature: MA Experiment 20000288 PARAMETER Experiment Name: At_Drought_P Parameter: Plant Line Value: WS
  misc_feature: MA Experiment 20000288 PARAMETER Experiment Name: At_Drought_P Parameter: Timepoint (hr) Value: 1
  misc_feature: MA Experiment 20000288 PARAMETER Experiment Name: At_Drought_P Parameter: Tissue Value: Whole Plant
  misc_feature: MA Experiment 20000288 PARAMETER Experiment Name: At_Drought_P Parameter: Treatment Value: Drought vs. No Drought
  misc_feature: MA Experiment ID: 20000308 Result: Up-regulated in Transcription
  misc_feature: MA Experiment 20000308 PARAMETER Experiment Name: At_100mM_NaCl__P Parameter: Age (day) Value: 17
  misc_feature: MA Experiment 20000308 PARAMETER Experiment Name: At_100mM_NaCl__P Parameter: Organism Value: A. thaliana
  misc_feature: MA Experiment 20000308 PARAMETER Experiment Name: At_100mM_NaCl__P Parameter: Plant Line Value: WS
  misc_feature: MA Experiment 20000308 PARAMETER Experiment Name: At_100mM_NaCl__P Parameter: Timepoint (hr) Value: 72
  misc_feature: MA Experiment 20000308 PARAMETER Experiment Name: At_100mM_NaCl__P Parameter: Tissue Value: Whole Plant
  misc_feature: MA Experiment 20000308 PARAMETER Experiment Name: At_100mM_NaCl__P Parameter: Treatment Value: 100mM NaCl vs. No Treatment
  misc_feature: MA Experiment ID: 20000436 Result: Up-regulated in Transcription
  misc_feature: MA Experiment 20000436 PARAMETER Experiment Name: At_Drought_P Parameter: Age (day) Value: 7
  misc_feature: MA Experiment 20000436 PARAMETER Experiment Name: At_Drought_P Parameter: Organism Value: A. thaliana
  misc_feature: MA Experiment 20000436 PARAMETER Experiment Name: At_Drought_P Parameter: Plant Line Value: WS
  misc_feature: MA Experiment 20000436 PARAMETER Experiment Name: At_Drought_P Parameter: Timepoint (hr) Value: 12
  misc_feature: MA Experiment 20000436 PARAMETER Experiment Name: At_Drought_P Parameter: Tissue Value: Whole Plant
  misc_feature: MA Experiment 20000436 PARAMETER Experiment Name: At_Drought_P Parameter: Treatment Value: Drought vs. No Drought
  misc_feature: MA Experiment ID: 20000437 Result: Up-regulated in Transcription
  misc_feature: MA Experiment 20000437 PARAMETER Experiment Name: At_Drought_P Parameter: Age (day) Value: 8
  misc_feature: MA Experiment 20000437 PARAMETER Experiment Name: At_Drought_P Parameter: Organism Value: A. thaliana
  misc_feature: MA Experiment 20000437 PARAMETER Experiment Name: At_Drought_P Parameter: Plant Line Value: WS
  misc_feature: MA Experiment 20000437 PARAMETER Experiment Name: At_Drought_P Parameter: Timepoint (hr) Value: 24
  misc_feature: MA Experiment 20000437 PARAMETER Experiment Name: At_Drought_P Parameter: Tissue Value: Whole Plant
  misc_feature: MA Experiment 20000437 PARAMETER Experiment Name: At_Drought_P Parameter: Treatment Value: Drought vs. No Drought
  misc_feature: MA Experiment ID: 20000438 Result: Down-regulated in Transcription
  misc_feature: MA Experiment 20000438 PARAMETER Experiment Name: At_Shoots__P Parameter: Age (day) Value: 14
  misc_feature: MA Experiment 20000438 PARAMETER Experiment Name: At_Shoots__P Parameter: Tissue Value: Shoots vs. Whole Plant
  misc_feature: MA Experiment ID: 20000439 Result: Down-regulated in Transcription
  misc_feature: MA Experiment 20000439 PARAMETER Experiment Name: At_Roots__P Parameter: Age (day) Value: 14 vs. 21
  misc_feature: MA Experiment 20000439 PARAMETER Experiment Name: At_Roots__P Parameter: Organism Value: A. thaliana
  misc_feature: MA Experiment 20000439 PARAMETER Experiment Name: At_Roots__P Parameter: Tissue Value: Roots vs. Whole Plant
  misc_feature: MA Experiment ID: 20000445 Result: Up-regulated in Transcription
  misc_feature: MA Experiment 20000445 PARAMETER Experiment Name: At_100uM_NAA__P Parameter: Age (day) Value: 14
  misc_feature: MA Experiment 20000445 PARAMETER Experiment Name: At_100uM_NAA__P Parameter: Organism Value: A. thaliana
  misc_feature: MA Experiment 20000445 PARAMETER Experiment Name: At_100uM_NAA__P Parameter: Plant Line Value: WS
  misc_feature: MA Experiment 20000445 PARAMETER Experiment Name: At_100uM_NAA__P Parameter: Timepoint (hr) Value: 6
  misc_feature: MA Experiment 20000445 PARAMETER Experiment Name: At_100uM_NAA__P Parameter: Tissue Value: Aerial
  misc_feature: MA Experiment 20000445 PARAMETER Experiment Name: At_100uM_NAA__P Parameter: Treatment Value: 100uM NAA vs. No Treatment
  misc_feature: MA Experiment ID: 20000451 Result: Up-regulated in Transcription
  misc_feature: MA Experiment 20000451 PARAMETER Experiment Name: At_CS6879_Shoots-Roots_P Parameter: Age (day) Value: 14
  misc_feature: MA Experiment 20000451 PARAMETER Experiment Name: At_CS6879_Shoots-Roots_P Parameter: Organism Value: A. thaliana
  misc_feature: MA Experiment 20000451 PARAMETER Experiment Name: At_CS6879_Shoots-Roots_P Parameter: Plant Line Value: CS6879 vs. WS
  misc_feature: MA Experiment 20000451 PARAMETER Experiment Name: At_CS6879_Shoots-Roots_P Parameter: Tissue Value: Roots
  misc_feature: MA Experiment ID: 20000453 Result: Up-regulated in Transcription
  misc_feature: MA Experiment 20000453 PARAMETER Experiment Name: At_100uM_ABA_P Parameter: Age (day) Value: 15
  misc_feature: MA Experiment 20000453 PARAMETER Experiment Name: At_100uM_ABA_P Parameter: Organism Value: A. thaliana
  misc_feature: MA Experiment 20000453 PARAMETER Experiment Name: At_100uM_ABA_P Parameter: Plant Line Value: WS
  misc_feature: MA Experiment 20000453 PARAMETER Experiment Name: At_100uM_ABA_P Parameter: Timepoint (hr) Value: 24
  misc_feature: MA Experiment 20000453 PARAMETER Experiment Name: At_100uM_ABA_P Parameter: Tissue Value: Aerial
  misc_feature: MA Experiment 20000453 PARAMETER Experiment Name: At_100uM_ABA_P Parameter: Treatment Value: 100uM ABA vs. No Treatment
  misc_feature: MA Experiment ID: 20000456 Result: Up-regulated in Transcription
  misc_feature: MA Experiment 20000456 PARAMETER Experiment Name: At_100uM_BA_P Parameter: Age (day) Value: 14
  misc_feature: MA Experiment 20000456 PARAMETER Experiment Name: At_100uM_BA_P Parameter: Organism Value: A. thaliana
  misc_feature: MA Experiment 20000456 PARAMETER Experiment Name: At_100uM_BA_P Parameter: Plant Line Value: WS
  misc_feature: MA Experiment 20000456 PARAMETER Experiment Name: At_100uM_BA_P Parameter: Timepoint (hr) Value: 6
  misc_feature: MA Experiment 20000456 PARAMETER Experiment Name: At_100uM_BA_P Parameter: Tissue Value: Aerial
  misc_feature: MA Experiment 20000456 PARAMETER Experiment Name: At_100uM_BA_P Parameter: Treatment Value: 100uM BA vs. No Treatment
  misc_feature: MA Experiment ID: 20000573 Result: Up-regulated in Transcription
  misc_feature: MA Experiment 20000573 PARAMETER Experiment Name: At_100uM_ABA_Mutants__P Parameter: Organism Value: A. thaliana
  misc_feature: MA Experiment 20000573 PARAMETER Experiment Name: At_100uM_ABA_Mutants__P Parameter: Plant Line Value: CS22 vs. Ler wt
  misc_feature: MA Experiment 20000573 PARAMETER Experiment Name: At_100uM_ABA_Mutants__P Parameter: Timepoint (hr) Value: N/A
  misc_feature: MA Experiment 20000573 PARAMETER Experiment Name: At_100uM_ABA_Mutants__P Parameter: Tissue Value: Whole Plant
  misc_feature: MA Experiment 20000573 PARAMETER Experiment Name: At_100uM_ABA_Mutants__P Parameter: Treatment Value: None
  misc_feature: MA Experiment ID: 20000574 Result: Up-regulated in Transcription
  misc_feature: MA Experiment 20000574 PARAMETER Experiment Name: At_100uM_ABA_Mutants__P Parameter: Organism Value: A. thaliana
  misc_feature: MA Experiment 20000574 PARAMETER Experiment Name: At_100uM_ABA_Mutants__P Parameter: Plant Line Value: CS23 vs. Ler wt
  misc_feature: MA Experiment 20000574 PARAMETER Experiment Name: At_100uM_ABA_Mutants__P Parameter: Timepoint (hr) Value: N/A
  misc_feature: MA Experiment 20000574 PARAMETER Experiment Name: At_100uM_ABA_Mutants__P Parameter: Tissue Value: Whole Plant
  misc_feature: MA Experiment 20000574 PARAMETER Experiment Name: At_100uM_ABA_Mutants__P Parameter: Treatment Value: None
  misc_feature: MA Experiment ID: 20000709 Result: Up-regulated in Transcription
  misc_feature: MA Experiment 20000709 PARAMETER Experiment Name: At_15mM_NH4NO3_L-to-H_P Parameter: Age (hr) Value: 14
  misc_feature: MA Experiment 20000709 PARAMETER Experiment Name: At_15mM_NH4NO3_L-to-H_P Parameter: Organism Value: A. thaliana
  misc_feature: MA Experiment 20000709 PARAMETER Experiment Name: At_15mM_NH4NO3_L-to-H_P Parameter: Plant Line Value: WS
  misc_feature: MA Experiment 20000709 PARAMETER Experiment Name: At_15mM_NH4NO3_L-to-H_P Parameter: Timepoint (hr) Value: 4
  misc_feature: MA Experiment 20000709 PARAMETER Experiment Name: At_15mM_NH4NO3_L-to-H_P Parameter: Tissue Value: Aerial
  misc_feature: MA Experiment 20000709 PARAMETER Experiment Name: At_15mM_NH4NO3_L-to-H_P Parameter: Treatment Value: 15mM NH4NO3 vs. 30mM Mannitol
  misc_feature: MA Experiment ID: 20000794 Result: Down-regulated in Transcription
  misc_feature: MA Experiment 20000794 PARAMETER Experiment Name: At_Petals_P Parameter: Age (day) Value: 23-25 days
  misc_feature: MA Experiment 20000794 PARAMETER Experiment Name: At_Petals_P Parameter: Plant Line Value: WS
  misc_feature: MA Experiment 20000794 PARAMETER Experiment Name: At_Petals_P Parameter: Tissue Value: Petals vs. Whole plant
  misc_feature: MA Experiment ID: 20001248 Result: Up-regulated in Transcription
  misc_feature: MA Experiment 20001248 PARAMETER Experiment Name: At_Far-red-induction_P Parameter: Age (day) Value: 7
  misc_feature: MA Experiment 20001248 PARAMETER Experiment Name: At_Far-red-induction_P Parameter: Light Value: Far-red vs. White
  misc_feature: MA Experiment 20001248 PARAMETER Experiment Name: At_Far-red-induction_P Parameter: Organism Value: A. thaliana
  misc_feature: MA Experiment 20001248 PARAMETER Experiment Name: At_Far-red-induction_P Parameter: Plant Line Value: Columbia
  misc_feature: MA Experiment 20001248 PARAMETER Experiment Name: At_Far-red-induction_P Parameter: Timepoint (hr) Value: 4
  misc_feature: MA Experiment 20001248 PARAMETER Experiment Name: At_Far-red-induction_P Parameter: Tissue Value: Whole Plant
  misc_feature: MA Experiment ID: 20001557 Result: Up-regulated in Transcription
  misc_feature: MA Experiment 20001557 PARAMETER Experiment Name: At_Drought_Soil_Dry_P Parameter: Age (day) Value: 27
  misc_feature: MA Experiment 20001557 PARAMETER Experiment Name: At_Drought_Soil_Dry_P Parameter: Organism Value: A. thaliana
  misc_feature: MA Experiment 20001557 PARAMETER Experiment Name: At_Drought_Soil_Dry_P Parameter: Plant Line Value: WS
  misc_feature: MA Experiment 20001557 PARAMETER Experiment Name: At_Drought_Soil_Dry_P Parameter: Post Timepoint (hr) Value: 3
  misc_feature: MA Experiment 20001557 PARAMETER Experiment Name: At_Drought_Soil_Dry_P Parameter: Post-Treatment Value: Re-Water vs. No Drought
  misc_feature: MA Experiment 20001557 PARAMETER Experiment Name: At_Drought_Soil_Dry_P Parameter: Timepoint (day) Value: 13
  misc_feature: MA Experiment 20001557 PARAMETER Experiment Name: At_Drought_Soil_Dry_P Parameter: Treatment Value: Drought vs. No Drought
  misc_feature: MA Experiment ID: 20001772 Result: Down-regulated in Transcription
  misc_feature: MA Experiment 20001772 PARAMETER Experiment Name: At_Far-red-enriched-adult_P Parameter: Age (day) Value: 29
  misc_feature: MA Experiment 20001772 PARAMETER Experiment Name: At_Far-red-enriched-adult_P Parameter: Light Value: Far-red enriched vs. White
  misc_feature: MA Experiment 20001772 PARAMETER Experiment Name: At_Far-red-enriched-adult_P Parameter: Organism Value: A. thaliana
  misc_feature: MA Experiment 20001772 PARAMETER Experiment Name: At_Far-red-enriched-adult_P Parameter: Plant Line Value: Columbia
  misc_feature: MA Experiment 20001772 PARAMETER Experiment Name: At_Far-red-enriched-adult_P Parameter: Timepoint (hr) Value: 24
  misc_feature: MA Experiment 20001772 PARAMETER Experiment Name: At_Far-red-enriched-adult_P Parameter: Tissue Value: Aerial
  misc_feature: MA Experiment ID: 20001773 Result: Down-regulated in Transcription
  misc_feature: MA Experiment 20001773 PARAMETER Experiment Name: At_Far-red-enriched-adult_P Parameter: Age (day) Value: 30
  misc_feature: MA Experiment 20001773 PARAMETER Experiment Name: At_Far-red-enriched-adult_P Parameter: Light Value: Far-red enriched vs. White
  misc_feature: MA Experiment 20001773 PARAMETER Experiment Name: At_Far-red-enriched-adult_P Parameter: Organism Value: A. thaliana
  misc_feature: MA Experiment 20001773 PARAMETER Experiment Name: At_Far-red-enriched-adult_P Parameter: Plant Line Value: Columbia
  misc_feature: MA Experiment 20001773 PARAMETER Experiment Name: At_Far-red-enriched-adult_P Parameter: Timepoint (hr) Value: 48
  misc_feature: MA Experiment 20001773 PARAMETER Experiment Name: At_Far-red-enriched-adult_P Parameter: Tissue Value: Aerial
accaaaatagatctaaaacatggaaaccaaaaccctaattttctcaattctcttcgttgttctctctctcatttacttaattggaaaactcaagcgaaagccaaatctacctccgagtccggcatggtcattaccggtgattggtcatctccgccttctcaaaccaccgattcatcgcacattcctctccctctctcaatccctaaacaatgctccgatcttctccctccgactcggtaaccgactcgttttcgtgaactcgtcacactcgatcgccgaggaatgtttcaccaaaaacgacgtcgtactggcgaacagaccaaacttcatcctcgctaaacacgttgcgtacgattacacaaccatgatcgcagcttcctacggtgaccactggcgtaacctccgccgcatcggctccgtcgagatattctccaatcaccgtctcaatagctttttgtctattcgtaaagacgagatccgacgacttgtgtttcgtctttctcggaacttttcacaagagtttgtgaaagtggatatgaaatcaatgttatctgacttaacattcaacaacattttaagaatggtggccggaaaacgttactacggagacggtgttgaggatgatccggaggctaaacgtgtccggcagcttatagcggatgtggtggcttgtgctggtgctggaaacgctgttgattacttaccggttttgcggttggtttcagattacgagacacgggttaagaagttggcgggtaggctcgacgagttcttgcaaggattggttgatgagaaacgagaagctaaggagaaaggaaacactatgatcgatcacttgcttactctgcaagaatcccaaccggattacttcacggatcgtatcattaaaggaaacatgctcgctttgatactagcagggaccgacacatcagcggttacgttagaatgggcattgtcgaacgtgttgaaccatccggatgtattgaacaaggcgagagatgaaatcgatagaaagataggtttagacaggcttatggatgaatcagatatctcaaacctgccttatctccaaaacattgtgtctgaaacgttgcgcctttatcctgcggctcccatgcttcttcctcacgttgcctcggaagattgtaaagttgcaggatacgatatgccgcgtggcacgatactattgaccaatgtgtgggctatacacagagatcctcagctatgggatgatccaatgagcttcaagccagagaggtttgagaaagaaggagaagctcagaagctaatgccgtttgggttaggaagaagggcgtgtcctggttctggactggctcatcggcttataaacctgactcttggatcattgattcagtgtttggaatgggagaagattggagaagaagtggatatgagtgaaggcaaaggtgttacaatgcctaaagccaagcctttggaagccatgtgcagagcacgtccctctgttgttaaaatcttcaacgagtccgtttgacgtttagacttttggtaatggctatgtatacattagataactagttatgtttgtatgttttctttttttttggtgaaaatattatgtttgtatgttaatgtatatgtgaatatttaacctatattcctagatgatattttggg

SEQ ID NO: 84030 - protein, 497 aa, Arabidopsis thaliana; identical to SEQ ID NO: 36691
  peptide (1)..(497): Ceres Seq. ID no. 12672915
  misc_feature (1)..(497): Homolog of NCBI NO: 15235536 NR Description: cytochrome p450 family; protein id: At4g37370.1, by cDNA: 253698., supported by cDNA: gi_17473897 [Arabidopsis
  misc_feature (1)..(494): Homolog of NCBI NO: 21554381 NR Description: cytochrome P450-like protein [Arabidopsis
  misc_feature (1)..(496): Homolog of NCBI NO: 15235535 NR Description: cytochrome p450 family; protein id: At4g37360.1
  misc_feature (1)..(496): Homolog of NCBI NO: 15235534 NR Description: cytochrome P450 monooxygenase, putative; protein
  misc_feature (97)..(496): Homolog of NCBI NO: 25282574 NR Description: probable cytochrome P450 F28G11.4 [imported] - thaliana >gi|12322266|gb|AAG51161.1|AC074025_11 cytochrome P450,
  misc_feature (2)..(101): Homolog of NCBI NO: 25282574 NR Description: probable cytochrome P450 F28G11.4 [imported] - thaliana >gi|12322266|gb|AAG51161.1|AC074025_11 cytochrome P450,
  misc_feature (3)..(491): Homolog of NCBI NO: 15235517 NR Description: cytochrome p450 family; protein id: At4g37320.1
  misc_feature (1)..(496): Homolog of NCBI NO: 15228472 NR Description: cytochrome p450 family; protein id: At3g28740.1, by cDNA: gi_15292830, supported by cDNA: gi_21280798 [Arabidopsis >gi|11994781|dbj|BAB03171.1| cytochrome P450 [Arabidopsis
  misc_feature (6)..(492): Homolog of NCBI NO: 15235533 NR Description: cytochrome p450 family; protein id: At4g37330.1
  misc_feature (7)..(494): Homolog of NCBI NO: 25282604 NR Description: cytochrome P450 monooxygenase [imported] - thaliana (fragment) >gi|3164142|dbj|BAA28538.1| cytochrome P450

SEQ ID NO: 84031 - protein, 382 aa, Arabidopsis thaliana; identical to SEQ ID NO: 36692
  peptide (1)..(382): Ceres Seq. ID no. 12672916
  misc_feature (1)..(382): Homolog of NCBI NO: 15235536 NR Description: cytochrome p450 family; protein id: At4g37370.1, by cDNA: 253698., supported by cDNA: gi_17473897 [Arabidopsis
  misc_feature (1)..(379): Homolog of NCBI NO: 21554381 NR Description: cytochrome P450-like protein [Arabidopsis
  misc_feature (1)..(381): Homolog of NCBI NO: 15235535 NR Description: cytochrome p450 family; protein id: At4g37360.1
  misc_feature (1)..(381): Homolog of NCBI NO: 15235534 NR Description: cytochrome P450 monooxygenase, putative; protein
  misc_feature (1)..(381): Homolog of NCBI NO: 25282574 NR Description: probable cytochrome P450 F28G11.4 [imported] - thaliana >gi|12322266|gb|AAG51161.1|AC074025_11 cytochrome P450,
  misc_feature (1)..(376): Homolog of NCBI NO: 15235517 NR Description: cytochrome p450 family; protein id: At4g37320.1
  misc_feature (1)..(381): Homolog of NCBI NO: 15228472 NR Description: cytochrome p450 family; protein id: At3g28740.1, by cDNA: gi_15292830, supported by cDNA: gi_21280798 [Arabidopsis >gi|11994781|dbj|BAB03171.1| cytochrome P450 [Arabidopsis
  misc_feature (1)..(377): Homolog of NCBI NO: 15235533 NR Description: cytochrome p450 family; protein id: At4g37330.1
  misc_feature (1)..(379): Homolog of NCBI NO: 25282604 NR Description: cytochrome P450 monooxygenase [imported] - thaliana (fragment) >gi|3164142|dbj|BAA28538.1| cytochrome P450
  misc_feature (1)..(379): Homolog of NCBI NO: 15227792 NR Description: cytochrome p450, putative; protein id: [Arabidopsis thaliana] >gi|7430669|pir||T00510 probable

SEQ ID NO: 84032 - protein, 325 aa, Arabidopsis thaliana; identical to SEQ ID NO: 36693
  peptide (1)..(325): Ceres Seq. ID no. 12672917
  misc_feature (1)..(325): Homolog of NCBI NO: 15235536 NR Description: cytochrome p450 family; protein id: At4g37370.1, by cDNA: 253698., supported by cDNA: gi_17473897 [Arabidopsis
  misc_feature (1)..(322): Homolog of NCBI NO: 21554381 NR Description: cytochrome P450-like protein [Arabidopsis
  misc_feature (1)..(324): Homolog of NCBI NO: 15235535 NR Description: cytochrome p450 family; protein id: At4g37360.1
  misc_feature (1)..(324): Homolog of NCBI NO: 15235534 NR Description: cytochrome P450 monooxygenase, putative; protein
  misc_feature (1)..(324): Homolog of NCBI NO: 25282574 NR Description: probable cytochrome P450 F28G11.4 [imported] - thaliana >gi|12322266|gb|AAG51161.1|AC074025_11 cytochrome P450,
  misc_feature (1)..(319): Homolog of NCBI NO: 15235517 NR Description: cytochrome p450 family; protein id: At4g37320.1
  misc_feature (1)..(324): Homolog of NCBI NO: 15228472 NR Description: cytochrome p450 family; protein id: At3g28740.1, by cDNA: gi_15292830, supported by cDNA: gi_21280798 [Arabidopsis >gi|11994781|dbj|BAB03171.1| cytochrome P450 [Arabidopsis
  misc_feature (1)..(320): Homolog of NCBI NO: 15235533 NR Description: cytochrome p450 family; protein id: At4g37330.1
  misc_feature (1)..(322): Homolog of NCBI NO: 25282604 NR Description: cytochrome P450 monooxygenase [imported] - thaliana (fragment) >gi|3164142|dbj|BAA28538.1| cytochrome P450
  misc_feature (1)..(322): Homolog of NCBI NO: 15227792 NR Description: cytochrome p450, putative; protein id: [Arabidopsis thaliana] >gi|7430669|pir||T00510 probable

SEQ ID NO: 84033 - DNA, 1596 bp, Arabidopsis thaliana
  misc_feature (1)..(1596): Ceres Seq. ID no. 12672918
  misc_feature: MA Experiment ID: 20000307 Result: Up-regulated in Transcription
  misc_feature: MA Experiment 20000307 PARAMETER Experiment Name: At_Germinating_Seeds_Sub_P Parameter: Age (hr) Value: 24 vs. 0
  misc_feature: MA Experiment 20000307 PARAMETER Experiment Name: At_Germinating_Seeds_Sub_P Parameter: Organism Value: A. thaliana
  misc_feature: MA Experiment 20000307 PARAMETER Experiment Name: At_Germinating_Seeds_Sub_P Parameter: Plant Line Value: WS
  misc_feature: MA Experiment 20000307 PARAMETER Experiment Name: At_Germinating_Seeds_Sub_P Parameter: Tissue Value: Germinating Seeds
  misc_feature: MA Experiment ID: 20000314 Result: Down-regulated in Transcription
  misc_feature: MA Experiment 20000314 PARAMETER Experiment Name: At_14day_Shoots-Roots_Sub_P Parameter: Age (day) Value: 14
  misc_feature: MA Experiment 20000314 PARAMETER Experiment Name: At_14day_Shoots-Roots_Sub_P Parameter: Organism Value: A. thaliana
  misc_feature: MA Experiment 20000314 PARAMETER Experiment Name: At_14day_Shoots-Roots_Sub_P Parameter: Plant Line Value: WS
  misc_feature: MA Experiment 20000314 PARAMETER Experiment Name: At_14day_Shoots-Roots_Sub_P Parameter: Tissue Value: Roots vs. Whole Plant
  misc_feature: MA Experiment ID: 20000329 Result: Down-regulated in Transcription
  misc_feature: MA Experiment 20000329 PARAMETER Experiment Name: At_4deg_Cold_Sub_P Parameter: Age (day) Value: 14
  misc_feature: MA Experiment 20000329 PARAMETER Experiment Name: At_4deg_Cold_Sub_P Parameter: Organism Value: A. thaliana
  misc_feature: MA Experiment 20000329 PARAMETER Experiment Name: At_4deg_Cold_Sub_P Parameter: Plant Line Value: WS
  misc_feature: MA Experiment 20000329 PARAMETER Experiment Name: At_4deg_Cold_Sub_P Parameter: Temperature (deg C) Value: 4 vs. 22
  misc_feature: MA Experiment 20000329 PARAMETER Experiment Name: At_4deg_Cold_Sub_P Parameter: Timepoint (hr) Value: 6
  misc_feature: MA Experiment 20000329 PARAMETER Experiment Name: At_4deg_Cold_Sub_P Parameter: Tissue Value: Aerial
  misc_feature: MA Experiment ID: 20001807 Result: Up-regulated in Transcription
  misc_feature: MA Experiment 20001807 PARAMETER Experiment Name: At_50mM_NH4NO3_L-to-H_Sub_P Parameter: Timepoint (hr) Value: 6
  misc_feature: MA Experiment 20001807 PARAMETER Experiment Name: At_50mM_NH4NO3_L-to-H_Sub_P Parameter: Tissue Value: Leaf
  misc_feature: MA Experiment 20001807 PARAMETER Experiment Name: At_50mM_NH4NO3_L-to-H_Sub_P Parameter: Treatment Value: 50mM NH4NO3 vs 100mM Mannitol
actgtacttattgggttttgatctttgatggctccactgagtccaagagtagtggtgaaggtggatttgaagaagaagccatggcagcaggaccagccattgcacaatagatggcatccggagataccaccagtagcagaggtcaaggctggtgagtttttccgggtagaaatgattgatgcaatgggaggtgttatcaaagacaatgactctgcaagcgatatcaagaacctagtcctaactactactcatcacctaagtgggccgattagggttgtagatgaggaaggtgttgcagctaaagcaggtgatcttcttgctgttgagatatgcaacttgggtcctcttccaggagatgaatggggattcactggttcgtttgatagagagaatggtggcggtttcttgactgaccatttcccttgtgcgaccaaagctatttggtactttgaagggatctatgcctactctcctcagattcctggagtacgatttccgggtttgacacacccaggagtcattggcactgcaccatcgaatgaactcttgagaatatggaatgatagggaaagacaattagaagaaagtggtgttgagtccctaacactatgtgaggtagtgcatcagcggccattagcatgcctaccaacaactaaaggatgtctcctcgggaatattgaagaaggaacaccagaatgggaaaggattgcaaacgaggctgcgaggacaataccaggaagagaaaacggaggaaactgtgacattaaaaacctaagcagaggctctaaaatatatcttccagtatttgttgaaggggctaatctaagcacaggagacatgcatttctcacaaggtgatggtgagatctcgttctgcggagccatcgagatgagtggatttctagaactcaagtgtgaaatcataagaaatgggatgcaagagtaccttacgccaatgggacctacccctctccatgtaaacccaatctttgagataggaccagtggaaccgaggttctcagagtggcttgtcttcgaaggtatcagtgtcgatgagagcggaaaacagcattacctagatgcaacagttgcttacaaacgggcagttctcaacgccatagactatcttttcaaatttggttactcaaaagaacaggtacttgtctttgcagcttgatgtttcttccagaatctagttgatcacacaccaaacatccataaattaaaactacaaagacagaagtgatcaagagaatatggtgtgaacaggtgtacctcttactctcatgttgtccatgtgaaggaagactatctgggatagttgattctccgaatgccgttgctacactagcaatacctacagccatctttgatcaggatattaggccaaagaatcggaaggttccagtaggacctcgggttgtgaggaaaccagatgtactgaagagcacatatgatggaaagcttccaattacaaagaatccaagttcttcctcttagcttctacaaaaaaattaaaattaaaatttagaagctaataccaagattgtataatcaagcatatgttccaataataaagcaataacttggtgttttc

SEQ ID NO: 84034 - protein, 382 aa, Arabidopsis thaliana
  peptide (1)..(382): Ceres Seq. ID no. 12672919
  misc_feature (8)..(202): Pfam Name: Acetamidase/Formamidase family Pfam Description: Acetamidase/Formamidase family
  misc_feature (1)..(382): Homolog of NCBI NO: 18420069 NR Description: formamidase - like protein; protein id:
  misc_feature (1)..(382): Homolog of NCBI NO: 21592429 NR Description: formamidase-like protein [Arabidopsis thaliana]
  misc_feature (1)..(202): Homolog of NCBI NO: 7488106 NR Description: probable formamidase (EC 3.5.1.49) F19F18.40 -
  misc_feature (214)..(382): Homolog of NCBI NO: 7488106 NR Description: probable formamidase (EC 3.5.1.49) F19F18.40 -
  misc_feature (1)..(382): Homolog of NCBI NO: 18420071 NR Description: formamidase - like protein; protein id: supported by cDNA: gi_14334653 [Arabidopsis thaliana]
  misc_feature (1)..(382): Homolog of NCBI NO: 14334654 NR Description: putative formamidase [Arabidopsis thaliana]
  misc_feature (1)..(382): Homolog of NCBI NO: 34909818 NR Description: putative formamidase [Oryza sativa (japonica group)] >gi|15289900|dbj|BAB63595.1| putative formamidase [Oryza
  misc_feature (7)..(378): Homolog of NCBI NO: 3913682 NR Description: Formamidase (Formamide amidohydrolase)
  misc_feature (6)..(376): Homolog of NCBI NO: 23009240 NR Description: hypothetical protein [Magnetospirillum
  misc_feature (6)..(382): Homolog of NCBI NO: 27376083 NR Description: amidase [Bradyrhizobium japonicum]
MAPLSPRVVVKVDLKKKPWQQDQPLHNRWHPEIPPVAEVKAGEFFRVEMIDAMGGVIKDNDSASDIKNLVLTTTHHLSGPIRVVDEEGVAAKAGDLLAVEICNLGPLPGDEWGFTGSFDRENGGGFLTDHFPCATKAIWYFEGIYAYSPQIPGVRFPGLTHPGVIGTAPSNELLRIWNDRERQLEESGVESLTLCEVVHQRPLACLPTTKGCLLGNIEEGTPEWERIANEAARTIPGRENGGNCDIKNLSRGSKIYLPVFVEGANLSTGDMHFSQGDGEISFCGAIEMSGFLELKCEIIRNGMQEYLTPMGPTPLHVNPIFEIGPVEPRFSEWLVFEGISVDESGKQHYLDATVAYKRAVLNAIDYLFKFGYSKEQVLVFAA

SEQ ID NO: 84035 - protein, 334 aa, Arabidopsis thaliana
  peptide (1)..(334): Ceres Seq. ID no. 12672920
  misc_feature (1)..(154): Pfam Name: Acetamidase/Formamidase family Pfam Description: Acetamidase/Formamidase family
  misc_feature (1)..(334): Homolog of NCBI NO: 18420069 NR Description: formamidase - like protein; protein id:
  misc_feature (1)..(334): Homolog of NCBI NO: 21592429 NR Description: formamidase-like protein [Arabidopsis thaliana]
  misc_feature (1)..(154): Homolog of NCBI NO: 7488106 NR Description: probable formamidase (EC 3.5.1.49) F19F18.40 -
  misc_feature (166)..(334): Homolog of NCBI NO: 7488106 NR Description: probable formamidase (EC 3.5.1.49) F19F18.40 -
  misc_feature (1)..(334): Homolog of NCBI NO: 18420071 NR Description: formamidase - like protein; protein id: supported by cDNA: gi_14334653 [Arabidopsis thaliana]
  misc_feature (1)..(334): Homolog of NCBI NO: 14334654 NR Description: putative formamidase [Arabidopsis thaliana]
  misc_feature (1)..(334): Homolog of NCBI NO: 34909818 NR Description: putative formamidase [Oryza sativa (japonica group)] >gi|15289900|dbj|BAB63595.1| putative formamidase [Oryza
  misc_feature (1)..(330): Homolog of NCBI NO: 3913682 NR Description: Formamidase (Formamide amidohydrolase)
  misc_feature (1)..(328): Homolog of NCBI NO: 23009240 NR Description: hypothetical protein [Magnetospirillum
  misc_feature (1)..(334): Homolog of NCBI NO: 27376083 NR Description: amidase [Bradyrhizobium japonicum]
MIDAMGGVIKDNDSASDIKNLVLTTTHHLSGPIRVVDEEGVAAKAGDLLAVEICNLGPLPGDEWGFTGSFDRENGGGFLTDHFPCATKAIWYFEGIYAYSPQIPGVRFPGLTHPGVIGTAPSNELLRIWNDRERQLEESGVESLTLCEVVHQRPLACLPTTKGCLLGNIEEGTPEWERIANEAARTIPGRENGGNCDIKNLSRGSKIYLPVFVEGANLSTGDMHFSQGDGEISFCGAIEMSGFLELKCEIIRNGMQEYLTPMGPTPLHVNPIFEIGPVEPRFSEWLVFEGISVDESGKQHYLDATVAYKRAVLNAIDYLFKFGYSKEQVLVFAA

SEQ ID NO: 84036 - protein, 330 aa, Arabidopsis thaliana
  peptide (1)..(330): Ceres Seq. ID no. 12672921
  misc_feature (1)..(150): Pfam Name: Acetamidase/Formamidase family Pfam Description: Acetamidase/Formamidase family
  misc_feature (1)..(330): Homolog of NCBI NO: 18420069 NR Description: formamidase - like protein; protein id:
  misc_feature (1)..(330): Homolog of NCBI NO: 21592429 NR Description: formamidase-like protein [Arabidopsis thaliana]
  misc_feature (1)..(150): Homolog of NCBI NO: 7488106 NR Description: probable formamidase (EC 3.5.1.49) F19F18.40 -
  misc_feature (162)..(330): Homolog of NCBI NO: 7488106 NR Description: probable formamidase (EC 3.5.1.49) F19F18.40 -
  misc_feature (1)..(330): Homolog of NCBI NO: 18420071 NR Description: formamidase - like protein; protein id: supported by cDNA: gi_14334653 [Arabidopsis thaliana]
  misc_feature (1)..(330): Homolog of NCBI NO: 14334654 NR Description: putative formamidase [Arabidopsis thaliana]
  misc_feature (1)..(330): Homolog of NCBI NO: 34909818 NR Description: putative formamidase [Oryza sativa (japonica group)] >gi|15289900|dbj|BAB63595.1| putative formamidase [Oryza
  misc_feature (1)..(326): Homolog of NCBI NO: 3913682 NR Description: Formamidase (Formamide amidohydrolase)
  misc_feature (1)..(324): Homolog of NCBI NO: 23009240 NR Description: hypothetical protein [Magnetospirillum
  misc_feature (1)..(330): Homolog of NCBI NO: 27376083 NR Description: amidase [Bradyrhizobium japonicum]
MGGVIKDNDSASDIKNLVLTTTHHLSGPIRVVDEEGVAAKAGDLLAVEICNLGPLPGDEWGFTGSFDRENGGGFLTDHFPCATKAIWYFEGIYAYSPQIPGVRFPGLTHPGVIGTAPSNELLRIWNDRERQLEESGVESLTLCEVVHQRPLACLPTTKGCLLGNIEEGTPEWERIANEAARTIPGRENGGNCDIKNLSRGSKIYLPVFVEGANLSTGDMHFSQGDGEISFCGAIEMSGFLELKCEIIRNGMQEYLTPMGPTPLHVNPIFEIGPVEPRFSEWLVFEGISVDESGKQHYLDATVAYKRAVLNAIDYLFKFGYSKEQVLVFAA

SEQ ID NO: 84037 - DNA, 1359 bp, Arabidopsis thaliana
  misc_feature (1)..(1359): Ceres Seq. ID no. 12672922
  misc_feature: MA Experiment ID: 20000173 Result: Down-regulated in Transcription
  misc_feature: MA Experiment 20000173 PARAMETER Experiment Name: At_42deg_Heat_P Parameter: Age (day) Value: 14
  misc_feature: MA Experiment 20000173 PARAMETER Experiment Name: At_42deg_Heat_P Parameter: Organism Value: A. thaliana
  misc_feature: MA Experiment 20000173 PARAMETER Experiment Name: At_42deg_Heat_P Parameter: Plant Line Value: WS
  misc_feature: MA Experiment 20000173 PARAMETER Experiment Name: At_42deg_Heat_P Parameter: Temperature (deg C) Value: 42 vs. 22
  misc_feature: MA Experiment 20000173 PARAMETER Experiment Name: At_42deg_Heat_P Parameter: Timepoint (hr) Value: 6
  misc_feature: MA Experiment 20000173 PARAMETER Experiment Name: At_42deg_Heat_P Parameter: Tissue Value: Aerial
  misc_feature: MA Experiment ID: 20000182 Result: Up-regulated in Transcription
  misc_feature: MA Experiment 20000182 PARAMETER Experiment Name: At_2mM_SA_P Parameter: Age (day) Value: 14
  misc_feature: MA Experiment 20000182 PARAMETER Experiment Name: At_2mM_SA_P Parameter: Organism Value: A. thaliana
  misc_feature: MA Experiment 20000182 PARAMETER Experiment Name: At_2mM_SA_P Parameter: Plant Line Value: WS
  misc_feature: MA Experiment 20000182 PARAMETER Experiment Name: At_2mM_SA_P Parameter: Timepoint (hr) Value: 6
  misc_feature: MA Experiment 20000182 PARAMETER Experiment Name: At_2mM_SA_P Parameter: Tissue Value: Aerial
  misc_feature: MA Experiment 20000182 PARAMETER Experiment Name: At_2mM_SA_P Parameter: Treatment Value: 2mM SA vs. No Treatment
  misc_feature: MA Experiment ID: 20000184 Result: Down-regulated in Transcription
  misc_feature: MA Experiment 20000184 PARAMETER Experiment Name: At_Shoots__P Parameter: Age (day) Value: 7
  misc_feature: MA Experiment 20000184 PARAMETER Experiment Name: At_Shoots__P Parameter: Tissue Value: Shoots vs. Whole Plant
  misc_feature: MA Experiment ID: 20000227 Result: Down-regulated in Transcription
  misc_feature: MA Experiment 20000227 PARAMETER Experiment Name: At_Root-Tips-vs-Tops_P Parameter: Tissue Value: Root Tips vs. Root Tops
  misc_feature: MA Experiment ID: 20000234 Result: Down-regulated in Transcription
  misc_feature: MA Experiment 20000234 PARAMETER Experiment Name: At_Siliques_P Parameter: Age (day) Value: 21
  misc_feature: MA Experiment 20000234 PARAMETER Experiment Name: At_Siliques_P Parameter: Organism Value: A. thaliana
  misc_feature: MA Experiment 20000234 PARAMETER Experiment Name: At_Siliques_P Parameter: Plant Line Value: WS
  misc_feature: MA Experiment 20000234 PARAMETER Experiment Name: At_Siliques_P Parameter: Tissue Value: Less Than 5mm Siliques vs. Whole Plant
  misc_feature: MA Experiment ID: 20000235 Result: Down-regulated in Transcription
  misc_feature: MA Experiment 20000235 PARAMETER Experiment Name: At_Siliques_P Parameter: Age (day) Value: 21
  misc_feature: MA Experiment 20000235 PARAMETER Experiment Name: At_Siliques_P Parameter: Organism Value: A. thaliana
  misc_feature: MA Experiment 20000235 PARAMETER Experiment Name: At_Siliques_P Parameter: Plant Line Value: WS
  misc_feature: MA Experiment 20000235 PARAMETER Experiment Name: At_Siliques_P Parameter: Tissue Value: 5-10mm Siliques vs. Whole Plant
  misc_feature: MA Experiment ID: 20000437 Result: Up-regulated in Transcription
  misc_feature: MA Experiment 20000437 PARAMETER Experiment Name: At_Drought_P Parameter: Age (day) Value: 8
  misc_feature: MA Experiment 20000437 PARAMETER Experiment Name: At_Drought_P Parameter: Organism Value: A. thaliana
  misc_feature: MA Experiment 20000437 PARAMETER Experiment Name: At_Drought_P Parameter: Plant Line Value: WS
  misc_feature: MA Experiment 20000437 PARAMETER Experiment Name: At_Drought_P Parameter: Timepoint (hr) Value: 24
  misc_feature: MA Experiment 20000437 PARAMETER Experiment Name: At_Drought_P Parameter: Tissue Value: Whole Plant
  misc_feature: MA Experiment 20000437 PARAMETER Experiment Name: At_Drought_P Parameter: Treatment Value: Drought vs. No Drought
  misc_feature: MA Experiment ID: 20000438 Result: Down-regulated in Transcription
  misc_feature: MA Experiment 20000438 PARAMETER Experiment Name: At_Shoots__P Parameter: Age (day) Value: 14
  misc_feature: MA Experiment 20000438 PARAMETER Experiment Name: At_Shoots__P Parameter: Tissue Value: Shoots vs. Whole Plant
  misc_feature: MA Experiment ID: 20001451 Result: Up-regulated in Transcription
  misc_feature: MA Experiment 20001451 PARAMETER Experiment Name: At_Far-red-induction_P Parameter: Age (day) Value: 7
  misc_feature: MA Experiment 20001451 PARAMETER Experiment Name: At_Far-red-induction_P Parameter: Light Value: Far-red vs. White
  misc_feature: MA Experiment 20001451 PARAMETER Experiment Name: At_Far-red-induction_P Parameter: Organism Value: A. thaliana
  misc_feature: MA Experiment 20001451 PARAMETER Experiment Name: At_Far-red-induction_P Parameter: Plant Line Value: Columbia
  misc_feature: MA Experiment 20001451 PARAMETER Experiment Name: At_Far-red-induction_P Parameter: Timepoint (hr) Value: 24
  misc_feature: MA Experiment 20001451 PARAMETER Experiment Name: At_Far-red-induction_P Parameter: Tissue Value: Whole Plant
aaacttcaccagaagaaattcttaacaaacaattttcttcataatattaattctcaagatcttaaagattatattaatacgaagagaaaattcaaatgggtcttgatgattcatgcaacacaggtcttgttcttggtttaggcctctcaccaacgcctaataattacaatcatgccatcaagaaatcttcctccactgtggaccatcgtttcatcaggctcgatccgtcgttgactctaagcctatccggtgagagctacaagatcaagactggtgccggcgccggcgaccaaatttgccggcagacctcgtcccacagcggcatctcatctttctcgagcggaagggtaaagagagaaagagaaatctccggcggcgatggagaagaagaggcggaggagacgacggagagagtggtgtgttcgagagtgagtgatgatcatgacgatgaagaaggtgttagtgctcgtaaaaagcttagactcactaaacaacaatctgctcttctcgaagataacttcaaacttcatagcacccttaatcccgtatgatatagttaattatttccttaattaaactaatcagtctcttcttatttacgttaatcatatcgttaattattttttctatgaatttacagaagcaaaaacaagctcttgcgagacagctgaatctaaggcctagacaagttgaagtgtggttccaaaacaggagagctagaacaaaactaaagcaaacagaagtggattgtgagtttttgaagaaatgttgcgagactttaacggatgagaatagaaggcttcaaaaagagcttcaagaccttaaggctttaaaattgtctcaaccgttttacatgcacatgccggcggcgactttgactatgtgcccttcttgtgagagactcggcggtggtggtgtcggaggagatacgacggcggttgatgaagaaacggcgaaaggagctttctccatcgtcacaaagcctcgtttctataaccctttcactaatccttctgcagcatgttagttacttattagttatttaatttctttttgttggttttttttttgtttcttaaatcaaattaggaattagttagaagataaatcccagggaaaaaatattacgttgaaattggggggaaatggggtatagtctttatagataagactcttcaacgattccactttatttttcggtgggattgttggttgatgaagaaaaaaaaatagtttgtaattacaggtttaaatatgtagagaaaaaatgacgaatatgtattatcttgtttttttttccttcgaatatgtattacggtaatataaatttgcttgtaaaaataataaatatattatttg

SEQ ID NO: 84038 - protein, 151 aa, Arabidopsis thaliana
  peptide (1)..(151): Ceres Seq. ID no. 12672923
  misc_feature (1)..(150): Homolog of NCBI NO: 15235712 NR Description: homeobox protein HAT22; protein id: At4g37790.1, by cDNA: 36691., supported by cDNA: gi_527628 [Arabidopsis
  misc_feature (1)..(150): Homolog of NCBI NO: 15227754 NR Description: homeobox-leucine zipper protein HAT9 (HD-Zip
  misc_feature (1)..(150): Homolog of NCBI NO: 25386242 NR Description: homeobox protein HAT9 [imported] - Arabidopsis >gi|549892|gb|AAA56907.1| homeobox protein
  misc_feature (1)..(150): Homolog of NCBI NO: 25386244 NR Description: homeobox protein HAT9 [imported] - Arabidopsis
  misc_feature (1)..(150): Homolog of NCBI NO: 7446246 NR Description: homeobox leucine zipper protein Hb-2,
  misc_feature (42)..(150): Homolog of NCBI NO: 27311238 NR Description: Hypothetical protein [Oryza sativa (japonica group)] >gi|27356671|gb|AAO06960.1| Hypothetical protein [Oryza
  misc_feature (76)..(150): Homolog of NCBI NO: 7489329 NR Description: homeobox protein - common sunflower
  misc_feature (76)..(150): Homolog of NCBI NO: 12230908 NR Description: Homeobox-leucine zipper protein HAT14 (HD-ZIP leucine zipper protein~gene_id:MPH15.6 [Arabidopsis thaliana]
  misc_feature (76)..(150): Homolog of NCBI NO: 22326632 NR Description: homeobox-leucine zipper protein HAT14 (HD-Zip
  misc_feature (76)..(150): Homolog of NCBI NO: 29028870 NR Description: At5g06710 [Arabidopsis thaliana]
MGLDDSCNTGLVLGLGLSPTPNNYNHAIKKSSSTVDHRFIRLDPSLTLSLSGESYKIKTGAGAGDQICRQTSSHSGISSFSSGRVKREREISGGDGEEEAEETTERVVCSRVSDDHDDEEGVSARKKLRLTKQQSALLEDNFKLHSTLNPV

SEQ ID NO: 84039 - protein, 132 aa, Arabidopsis thaliana
  peptide (1)..(132): Ceres Seq. ID no. 12672924
  misc_feature (35)..(79): Pfam Name: Homeobox associated leucine zipper Pfam Description: Homeobox associated leucine zipper
  misc_feature (5)..(132): Homolog of NCBI NO: 15235712 NR Description: homeobox protein HAT22; protein id: At4g37790.1, by cDNA: 36691., supported by cDNA: gi_527628 [Arabidopsis
  misc_feature (5)..(132): Homolog of NCBI NO: 15227754 NR Description: homeobox-leucine zipper protein HAT9 (HD-Zip
  misc_feature (5)..(132): Homolog of NCBI NO: 25386242 NR Description: homeobox protein HAT9 [imported] - Arabidopsis >gi|549892|gb|AAA56907.1| homeobox protein
  misc_feature (5)..(132): Homolog of NCBI NO: 25386244 NR Description: homeobox protein HAT9 [imported] - Arabidopsis
  misc_feature (5)..(131): Homolog of NCBI NO: 7446246 NR Description: homeobox leucine zipper protein Hb-2,
  misc_feature (5)..(132): Homolog of NCBI NO: 27311238 NR Description: Hypothetical protein [Oryza sativa (japonica group)] >gi|27356671|gb|AAO06960.1| Hypothetical protein [Oryza
  misc_feature (5)..(132): Homolog of NCBI NO: 7489329 NR Description: homeobox protein - common sunflower
  misc_feature (5)..(120): Homolog of NCBI NO: 12230908 NR Description: Homeobox-leucine zipper protein HAT14 (HD-ZIP leucine zipper protein~gene_id:MPH15.6 [Arabidopsis thaliana]
  misc_feature (5)..(120): Homolog of NCBI NO: 22326632 NR Description: homeobox-leucine zipper protein HAT14 (HD-Zip
  misc_feature (5)..(120): Homolog of NCBI NO: 29028870 NR Description: At5g06710 [Arabidopsis thaliana]
MNLQKQKQALARQLNLRPRQVEVWFQNRRARTKLKQTEVDCEFLKKCCETLTDENRRLQKELQDLKALKLSQPFYMHMPAATLTMCPSCERLGGGGVGGDTTAVDEETAKGAFSIVTKPRFYNPFTNPSAAC

SEQ ID NO: 84040 - DNA, 1058 bp, Arabidopsis thaliana
  misc_feature (1)..(1058): Ceres Seq. ID no. 12672956
  misc_feature: MA Experiment ID: 20000173 Result: Up-regulated in Transcription
  misc_feature: MA Experiment 20000173 PARAMETER Experiment Name: At_42deg_Heat_P Parameter: Age (day) Value: 14
  misc_feature: MA Experiment 20000173 PARAMETER Experiment Name: At_42deg_Heat_P Parameter: Organism Value: A. thaliana
  misc_feature: MA Experiment 20000173 PARAMETER Experiment Name: At_42deg_Heat_P Parameter: Plant Line Value: WS
  misc_feature: MA Experiment 20000173 PARAMETER Experiment Name: At_42deg_Heat_P Parameter: Temperature (deg C) Value: 42 vs. 22
  misc_feature: MA Experiment 20000173 PARAMETER Experiment Name: At_42deg_Heat_P Parameter: Timepoint (hr) Value: 6
  misc_feature: MA Experiment 20000173 PARAMETER Experiment Name: At_42deg_Heat_P Parameter: Tissue Value: Aerial
  misc_feature: MA Experiment ID: 20000227 Result: Down-regulated in Transcription
  misc_feature: MA Experiment 20000227 PARAMETER Experiment Name: At_Root-Tips-vs-Tops_P Parameter: Tissue Value: Root Tips vs. Root Tops
  misc_feature: MA Experiment ID: 20000234 Result: Down-regulated in Transcription
  misc_feature: MA Experiment 20000234 PARAMETER Experiment Name: At_Siliques_P Parameter: Age (day) Value: 21
  misc_feature: MA Experiment 20000234 PARAMETER Experiment Name: At_Siliques_P Parameter: Organism Value: A. thaliana
  misc_feature: MA Experiment 20000234 PARAMETER Experiment Name: At_Siliques_P Parameter: Plant Line Value: WS
  misc_feature: MA Experiment 20000234 PARAMETER Experiment Name: At_Siliques_P Parameter: Tissue Value: Less Than 5mm Siliques vs. Whole Plant
  misc_feature: MA Experiment ID: 20000235 Result: Down-regulated in Transcription
  misc_feature: MA Experiment 20000235 PARAMETER Experiment Name: At_Siliques_P Parameter: Age (day) Value: 21
  misc_feature: MA Experiment 20000235 PARAMETER Experiment Name: At_Siliques_P Parameter: Organism Value: A. thaliana
  misc_feature: MA Experiment 20000235 PARAMETER Experiment Name: At_Siliques_P Parameter: Plant Line Value: WS
  misc_feature: MA Experiment 20000235 PARAMETER Experiment Name: At_Siliques_P Parameter: Tissue Value: 5-10mm Siliques vs. Whole Plant
  misc_feature: MA Experiment ID: 20000264 Result: Down-regulated in Transcription
  misc_feature: MA Experiment 20000264 PARAMETER Experiment Name: At_Open_Flower_P Parameter: Age (day) Value: 21
  misc_feature: MA Experiment 20000264 PARAMETER Experiment Name: At_Open_Flower_P Parameter: Plant Line Value: WS
  misc_feature: MA Experiment 20000264 PARAMETER Experiment Name: At_Open_Flower_P Parameter: Tissue Value: Open Flower vs. Whole Plant
  misc_feature: MA Experiment ID: 20000265 Result: Down-regulated in Transcription
  misc_feature: MA Experiment 20000265 PARAMETER Experiment Name: At_Open_Flower_P Parameter: Age (day) Value: 21
  misc_feature: MA Experiment 20000265 PARAMETER Experiment Name: At_Open_Flower_P Parameter: Plant Line Value: WS
  misc_feature: MA Experiment 20000265 PARAMETER Experiment Name: At_Open_Flower_P Parameter: Tissue Value: Closed Flower vs. Whole Plant
  misc_feature: MA Experiment ID: 20000286 Result: Down-regulated in Transcription
  misc_feature: MA Experiment 20000286 PARAMETER Experiment Name: At_Open_Flower_P Parameter: Age (day) Value: 21
  misc_feature: MA Experiment 20000286 PARAMETER Experiment Name: At_Open_Flower_P Parameter: Plant Line Value: WS
  misc_feature: MA Experiment 20000286 PARAMETER Experiment Name: At_Open_Flower_P Parameter: Tissue Value: Half Open vs. Whole Plant
  misc_feature: MA Experiment ID: 20000437 Result: Up-regulated in Transcription
  misc_feature: MA Experiment 20000437 PARAMETER Experiment Name: At_Drought_P Parameter: Age (day) Value: 8
  misc_feature: MA Experiment 20000437 PARAMETER Experiment Name: At_Drought_P Parameter: Organism Value: A. thaliana
  misc_feature: MA Experiment 20000437 PARAMETER Experiment Name: At_Drought_P Parameter: Plant Line Value: WS
  misc_feature: MA Experiment 20000437 PARAMETER Experiment Name: At_Drought_P Parameter: Timepoint (hr) Value: 24
  misc_feature: MA Experiment 20000437 PARAMETER Experiment Name: At_Drought_P Parameter: Tissue Value: Whole Plant
  misc_feature: MA Experiment 20000437 PARAMETER Experiment Name: At_Drought_P Parameter: Treatment Value: Drought vs. No Drought
  misc_feature: MA Experiment ID: 20000438 Result: Down-regulated in Transcription
  misc_feature: MA Experiment 20000438 PARAMETER Experiment Name: At_Shoots__P Parameter: Age (day) Value: 14
  misc_feature: MA Experiment 20000438 PARAMETER Experiment Name: At_Shoots__P Parameter: Tissue Value: Shoots vs. Whole Plant
  misc_feature: MA Experiment ID: 20000495 Result: Up-regulated in Transcription
  misc_feature: MA Experiment 20000495 PARAMETER Experiment Name: At_Guard_Cells_P Parameter: Harvest Date Value: 8/2/2002
  misc_feature: MA Experiment 20000495 PARAMETER Experiment Name: At_Guard_Cells_P Parameter: Organism Value: A. thaliana
  misc_feature: MA Experiment 20000495 PARAMETER Experiment Name: At_Guard_Cells_P Parameter: Tissue Value: Guard Cells vs. Leaves
  misc_feature: MA Experiment ID: 20001247 Result: Up-regulated in Transcription
  misc_feature: MA Experiment 20001247 PARAMETER Experiment Name: At_Far-red-induction_P Parameter: Age (day) Value: 7
  misc_feature: MA Experiment 20001247 PARAMETER Experiment Name: At_Far-red-induction_P Parameter: Light Value: Far-red vs. White
  misc_feature: MA Experiment 20001247 PARAMETER Experiment Name: At_Far-red-induction_P Parameter: Organism Value: A. thaliana
  misc_feature: MA Experiment 20001247 PARAMETER Experiment Name: At_Far-red-induction_P Parameter: Plant Line Value: Columbia
  misc_feature: MA Experiment 20001247 PARAMETER Experiment Name: At_Far-red-induction_P Parameter: Timepoint (hr) Value: 1
  misc_feature: MA Experiment 20001247 PARAMETER Experiment Name: At_Far-red-induction_P Parameter: Tissue Value: Whole Plant
  misc_feature: MA Experiment ID: 20001248 Result: Up-regulated in Transcription
  misc_feature: MA Experiment 20001248 PARAMETER Experiment Name: At_Far-red-induction_P Parameter: Age (day) Value: 7
  misc_feature: MA Experiment 20001248 PARAMETER Experiment Name: At_Far-red-induction_P Parameter: Light Value: Far-red vs. White
  misc_feature: MA Experiment 20001248 PARAMETER Experiment Name: At_Far-red-induction_P Parameter: Organism Value: A. thaliana
  misc_feature: MA Experiment 20001248 PARAMETER Experiment Name: At_Far-red-induction_P Parameter: Plant Line Value: Columbia
  misc_feature: MA Experiment 20001248 PARAMETER Experiment Name: At_Far-red-induction_P Parameter: Timepoint (hr) Value: 4
  misc_feature: MA Experiment 20001248 PARAMETER Experiment Name: At_Far-red-induction_P Parameter: Tissue Value: Whole Plant
  misc_feature: MA Experiment ID: 20001450 Result: Up-regulated in Transcription
  misc_feature: MA Experiment 20001450 PARAMETER Experiment Name: At_Far-red-induction_P Parameter: Age (day) Value: 7
  misc_feature: MA Experiment 20001450 PARAMETER Experiment Name: At_Far-red-induction_P Parameter: Light Value: Far-red vs. White
  misc_feature: MA Experiment 20001450 PARAMETER Experiment Name: At_Far-red-induction_P Parameter: Organism Value: A. thaliana
  misc_feature: MA Experiment 20001450 PARAMETER Experiment Name: At_Far-red-induction_P Parameter: Plant Line Value: Columbia
  misc_feature: MA Experiment 20001450 PARAMETER Experiment Name: At_Far-red-induction_P Parameter: Timepoint (hr) Value: 8
  misc_feature: MA Experiment 20001450 PARAMETER Experiment Name: At_Far-red-induction_P Parameter: Tissue Value: Whole Plant
  misc_feature: MA Experiment ID: 20001451 Result: Up-regulated in Transcription
  misc_feature: MA Experiment 20001451 PARAMETER Experiment Name: At_Far-red-induction_P Parameter: Age (day) Value: 7
  misc_feature: MA Experiment 20001451 PARAMETER Experiment Name: At_Far-red-induction_P Parameter: Light Value: Far-red vs. White
  misc_feature: MA Experiment 20001451 PARAMETER Experiment Name: At_Far-red-induction_P Parameter: Organism Value: A. thaliana
  misc_feature: MA Experiment 20001451 PARAMETER Experiment Name: At_Far-red-induction_P Parameter: Plant Line Value: Columbia
  misc_feature: MA Experiment 20001451 PARAMETER Experiment Name: At_Far-red-induction_P Parameter: Timepoint (hr) Value: 24
  misc_feature: MA Experiment 20001451 PARAMETER Experiment Name: At_Far-red-induction_P Parameter: Tissue Value: Whole Plant
  misc_feature: MA Experiment ID: 20001560 Result: Down-regulated in Transcription
  misc_feature: MA Experiment 20001560 PARAMETER Experiment Name: At_Drought_Soil_Dry_P Parameter: Age (day) Value: 28
  misc_feature: MA Experiment 20001560 PARAMETER Experiment Name: At_Drought_Soil_Dry_P Parameter: Organism Value: A. thaliana
  misc_feature: MA Experiment 20001560 PARAMETER Experiment Name: At_Drought_Soil_Dry_P Parameter: Plant Line Value: WS
  misc_feature: MA Experiment 20001560 PARAMETER Experiment Name: At_Drought_Soil_Dry_P Parameter: Post Timepoint (hr) Value: None
  misc_feature: MA Experiment 20001560 PARAMETER Experiment Name: At_Drought_Soil_Dry_P Parameter: Post-Treatment Value: None
  misc_feature: MA Experiment 20001560 PARAMETER Experiment Name: At_Drought_Soil_Dry_P Parameter: Timepoint (day) Value: 14
  misc_feature: MA Experiment 20001560 PARAMETER Experiment Name: At_Drought_Soil_Dry_P Parameter: Treatment Value: Drought vs. No Drought
  misc_feature: MA Experiment ID: 20001911 Result: Up-regulated in Transcription
  misc_feature: MA Experiment 20001911 PARAMETER Experiment Name: At_Drought_Reproduction_P Parameter: Age (day) Value: 40
  misc_feature: MA Experiment 20001911 PARAMETER Experiment Name: At_Drought_Reproduction_P Parameter: Organism Value: A. thaliana
  misc_feature: MA Experiment 20001911 PARAMETER Experiment Name: At_Drought_Reproduction_P Parameter: Plant Line Value: WS
  misc_feature: MA Experiment 20001911 PARAMETER Experiment Name: At_Drought_Reproduction_P Parameter: Timepoint (day) Value: 10
  misc_feature: MA Experiment 20001911 PARAMETER Experiment Name: At_Drought_Reproduction_P Parameter: Tissue Value: Flowers
  misc_feature: MA Experiment 20001911 PARAMETER Experiment Name: At_Drought_Reproduction_P Parameter: Treatment Value: Drought vs. No Drought
ctctctctctctctctctctctctctctctttcttctatcttctccgtcatcgttctctctctctcctctcccggagatttttactcaggcgttcttctgtggatcagaggtgaaaaagatgaatcattgcaaccttcagcagaacgccttcatgtctcgtgaggagatgatgggatttgacctcaagctgcagccgacttgtgtgattctaaagctggtgctgagcttttggaaatcattcgtagaaaggaggataatggaacaatagggcagttactatcatcatccccaccgtattttcccggttcaccaccgagtagagcggcgaacccattagcccaagatgctcgttttcgagatgagaaactcaatccaatctcaccaaactctcctttccttcagccatattcggcaaccgggtttccatctccatcttcttcctcatcatcgtcgtcttcccgtggttgtgttagaatgaaatttggactcaactcgcctgcagttagagtagaaggatttgattgcttgaaccgtgaccgtcaaaactcgagcatccctgccatggcttagtagacaaacaacaaaaaaacaagtgtacatagagattccggaatcgttcgttcgccaatgcctaacagaggaggatttgattactactgctgcaactattactactaccatttttgaaagtaaatgaatatgtttttgtttttcatcttctcctaagagagagagagagggaagaggaaggaggaagatgaagatcagttaccgtcgccggtcaccgtttaactgttttattcaggttagtgtttgtatataaagatgcagtatttaaaagaagagtcgaatctatgtattcgtttggtgtttttctgggtcgggcggatctttagtactgtttcatatataactaagagggaagattagaagatgaagaagctgtaaaattttcttgggaagaaaactctggtttctatcttctcgttgtaatatagataatcaacttggatttatcttctttcagattcaccattgtatatagtaatgtttattt

SEQ ID NO: 84041 - protein, 88 aa, Arabidopsis thaliana
  peptide (1)..(88): Ceres Seq. ID no. 12672957
  misc_feature (1)..(67): Homolog of NCBI NO: 30685676 NR Description: expressed protein [Arabidopsis thaliana]
  misc_feature (40)..(67): Homolog of NCBI NO: 11762168 NR Description: AT5g16110 [Arabidopsis thaliana]
  misc_feature (40)..(59): Homolog of NCBI NO: 18396232 NR Description: Expressed protein; protein id: At3g02555.1, by cDNA: 1232. [Arabidopsis thaliana] >gi|21537194|gb|AAM61535.1|
LSLSLSLSLFLLSSPSSFSLSPLPEIFTQAFFCGSEVKKMNHCNLQQNAFMSREEMMGFDLKLQPTCVILKLVLSFWKSFVERRIMEQ

SEQ ID NO: 84042 - protein, 53 aa, Arabidopsis thaliana
  peptide (1)..(53): Ceres Seq. ID no. 12672958
SLSLSLSLSLSSIFSVIVLSLSSPGDFYSGVLLWIRGEKDESLQPSAERLHVS

SEQ ID NO: 84043 - protein, 49 aa, Arabidopsis thaliana
  peptide (1)..(49): Ceres Seq. ID no. 12672959
  misc_feature (1)..(28): Homolog of NCBI NO: 30685676 NR Description: expressed protein [Arabidopsis thaliana]
  misc_feature (1)..(28): Homolog of NCBI NO: 11762168 NR Description: AT5g16110 [Arabidopsis thaliana]
  misc_feature (1)..(20): Homolog of NCBI NO: 18396232 NR Description: Expressed protein; protein id: At3g02555.1, by cDNA: 1232. [Arabidopsis thaliana] >gi|21537194|gb|AAM61535.1|
MNHCNLQQNAFMSREEMMGFDLKLQPTCVILKLVLSFWKSFVERRIMEQ

SEQ ID NO: 84044 - DNA, 1152 bp, Arabidopsis thaliana
  misc_feature (1)..(1152): Ceres Seq. ID no. 12672960
  misc_feature: MA Experiment ID: 108464 Result: Up-regulated in Transcription
  misc_feature: MA Experiment 108464 PARAMETER Experiment Name: At_Germinating_Seeds_cDNA_P Parameter: Age (day) Value: 4 vs. 0
  misc_feature: MA Experiment 108464 PARAMETER Experiment Name: At_Germinating_Seeds_cDNA_P Parameter: Tissue Value: Germinating Seeds
  misc_feature: MA Experiment ID: 108488 Result: Down-regulated in Transcription
  misc_feature: MA Experiment ID: 108501 Result: Down-regulated in Transcription
  misc_feature: MA Experiment 108501 PARAMETER Experiment Name: At_ap2_floral_buds_cDNA_P Parameter: Plant Line Value: ap2 (Ler.)
  misc_feature: MA Experiment 108501 PARAMETER Experiment Name: At_ap2_floral_buds_cDNA_P Parameter: Tissue Value: Closed Flower
  misc_feature: MA Experiment ID: 108572 Result: Up-regulated in Transcription
  misc_feature: MA Experiment 108572 PARAMETER Experiment Name: At_Drought_cDNA_P Parameter: Timepoint (hr) Value: 1
  misc_feature: MA Experiment 108572 PARAMETER Experiment Name: At_Drought_cDNA_P Parameter: Tissue Value: Aerial
  misc_feature: MA Experiment 108572 PARAMETER Experiment Name: At_Drought_cDNA_P Parameter: Treatment Value: Drought vs. No Drought
  misc_feature: MA Experiment ID: 108573 Result: Up-regulated in Transcription
  misc_feature: MA Experiment 108573 PARAMETER Experiment Name: At_Drought_cDNA_P Parameter: Timepoint (hr) Value: 6
  misc_feature: MA Experiment 108573 PARAMETER Experiment Name: At_Drought_cDNA_P Parameter: Tissue Value: Aerial
  misc_feature: MA Experiment 108573 PARAMETER Experiment Name: At_Drought_cDNA_P Parameter: Treatment Value: Drought vs. No Drought
  misc_feature: MA Experiment ID: 108574 Result: Down-regulated in Transcription
  misc_feature: MA Experiment 108574 PARAMETER Experiment Name: At_Wounding__cDNA_P Parameter: Timepoint (hr) Value: 1
  misc_feature: MA Experiment 108574 PARAMETER Experiment Name: At_Wounding__cDNA_P Parameter: Tissue Value: Aerial
  misc_feature: MA Experiment 108574 PARAMETER Experiment Name: At_Wounding__cDNA_P Parameter: Treatment Value: Wounding vs. No Wounding
  misc_feature: MA Experiment ID: 108579 Result: Down-regulated in Transcription
  misc_feature: MA Experiment 108579 PARAMETER Experiment Name: At_4deg_Cold_cDNA_P Parameter: Temperature (deg C) Value: 4 vs. 22
  misc_feature: MA Experiment 108579 PARAMETER Experiment Name: At_4deg_Cold_cDNA_P Parameter: Timepoint (hr) Value: 6
  misc_feature: MA Experiment 108579 PARAMETER Experiment Name: At_4deg_Cold_cDNA_P Parameter: Tissue Value: Aerial
  misc_feature: MA Experiment ID: 108585 Result: Up-regulated in Transcription
  misc_feature: MA Experiment 108585 PARAMETER Experiment Name: At_5mM_NaNP_cDNA_P Parameter: Timepoint (hr) Value: 6
  misc_feature: MA Experiment 108585 PARAMETER Experiment Name: At_5mM_NaNP_cDNA_P Parameter: Tissue Value: Aerial
  misc_feature: MA Experiment 108585 PARAMETER Experiment Name: At_5mM_NaNP_cDNA_P Parameter: Treatment Value: null
  misc_feature: MA Experiment ID: 20000111 Result: Up-regulated in Transcription
  misc_feature: MA Experiment 20000111 PARAMETER Experiment Name: At_42deg_Heat_cDNA_P Parameter: Temperature (deg C) Value: 42 vs. 22
  misc_feature: MA Experiment 20000111 PARAMETER Experiment Name: At_42deg_Heat_cDNA_P Parameter: Timepoint (hr) Value: 6
  misc_feature: MA Experiment 20000111 PARAMETER Experiment Name: At_42deg_Heat_cDNA_P Parameter: Tissue Value: Aerial
  misc_feature: MA Experiment ID: 20000112 Result: Up-regulated in Transcription
  misc_feature: MA Experiment 20000112 PARAMETER Experiment Name: At_42deg_Heat_cDNA_P Parameter: Temperature (deg C) Value: 42 vs. 22
  misc_feature: MA Experiment 20000112 PARAMETER Experiment Name: At_42deg_Heat_cDNA_P Parameter: Timepoint (hr) Value: 2
  misc_feature: MA Experiment 20000112 PARAMETER Experiment Name: At_42deg_Heat_cDNA_P Parameter: Tissue Value: Aerial
  misc_feature: MA Experiment ID: 20000113 Result: Up-regulated in Transcription
  misc_feature: MA Experiment 20000113 PARAMETER Experiment Name: At_42deg_Heat_cDNA_P Parameter: Temperature (deg C) Value: 42 vs. 22
  misc_feature: MA Experiment 20000113 PARAMETER Experiment Name: At_42deg_Heat_cDNA_P Parameter: Timepoint (hr) Value: 8
  misc_feature: MA Experiment 20000113 PARAMETER Experiment Name: At_42deg_Heat_cDNA_P Parameter: Tissue Value: Aerial
  misc_feature: MA Experiment ID: 20000173 Result: Up-regulated in Transcription
  misc_feature: MA Experiment 20000173 PARAMETER Experiment Name: At_42deg_Heat_P Parameter: Age (day) Value: 14
  misc_feature: MA Experiment 20000173 PARAMETER Experiment Name: At_42deg_Heat_P Parameter: Organism Value: A. thaliana
  misc_feature: MA Experiment 20000173 PARAMETER Experiment Name: At_42deg_Heat_P Parameter: Plant Line Value: WS
  misc_feature: MA Experiment 20000173 PARAMETER Experiment Name: At_42deg_Heat_P Parameter: Temperature (deg C) Value: 42 vs. 22
  misc_feature: MA Experiment 20000173 PARAMETER Experiment Name: At_42deg_Heat_P Parameter: Timepoint (hr) Value: 6
  misc_feature: MA Experiment 20000173 PARAMETER Experiment Name: At_42deg_Heat_P Parameter: Tissue Value: Aerial
  misc_feature: MA Experiment ID: 20000224 Result: Down-regulated in Transcription
  misc_feature: MA Experiment ID: 20000227 Result: Down-regulated in Transcription
  misc_feature: MA Experiment 20000227 PARAMETER Experiment Name: At_Root-Tips-vs-Tops_P Parameter: Tissue Value: Root Tips vs. Root Tops
  misc_feature: MA Experiment ID: 20000234 Result: Down-regulated in Transcription
  misc_feature: MA Experiment 20000234 PARAMETER Experiment Name: At_Siliques_P Parameter: Age (day) Value: 21
  misc_feature: MA Experiment 20000234 PARAMETER Experiment Name: At_Siliques_P Parameter: Organism Value: A. thaliana
  misc_feature: MA Experiment 20000234 PARAMETER Experiment Name: At_Siliques_P Parameter: Plant Line Value: WS
  misc_feature: MA Experiment 20000234 PARAMETER Experiment Name: At_Siliques_P Parameter: Tissue Value: Less Than 5mm Siliques vs. Whole Plant
  misc_feature: MA Experiment ID: 20000235 Result: Down-regulated in Transcription
  misc_feature: MA Experiment 20000235 PARAMETER Experiment Name: At_Siliques_P Parameter: Age (day) Value: 21
  misc_feature: MA Experiment 20000235 PARAMETER Experiment Name: At_Siliques_P Parameter: Organism Value: A. thaliana
  misc_feature: MA Experiment 20000235 PARAMETER Experiment Name: At_Siliques_P Parameter: Plant Line Value: WS
  misc_feature: MA Experiment 20000235 PARAMETER Experiment Name: At_Siliques_P Parameter: Tissue Value: 5-10mm Siliques vs. Whole Plant
  misc_feature: MA Experiment ID: 20000264 Result: Down-regulated in Transcription
  misc_feature: MA Experiment 20000264 PARAMETER Experiment Name: At_Open_Flower_P Parameter: Age (day) Value: 21
  misc_feature: MA Experiment 20000264 PARAMETER Experiment Name: At_Open_Flower_P Parameter: Plant Line Value: WS
  misc_feature: MA Experiment 20000264 PARAMETER Experiment Name: At_Open_Flower_P Parameter: Tissue Value: Open Flower vs. Whole Plant
  misc_feature: MA Experiment ID: 20000265 Result: Down-regulated in Transcription
  misc_feature: MA Experiment 20000265 PARAMETER Experiment Name: At_Open_Flower_P Parameter: Age (day) Value: 21
  misc_feature: MA Experiment 20000265 PARAMETER Experiment Name: At_Open_Flower_P Parameter: Plant Line Value: WS
  misc_feature: MA Experiment 20000265 PARAMETER Experiment Name: At_Open_Flower_P Parameter: Tissue Value: Closed Flower vs. Whole Plant
  misc_feature: MA Experiment ID: 20000286 Result: Down-regulated in Transcription
  misc_feature: MA Experiment 20000286 PARAMETER Experiment Name: At_Open_Flower_P Parameter: Age (day) Value: 21
  misc_feature: MA Experiment 20000286 PARAMETER Experiment Name: At_Open_Flower_P Parameter: Plant Line Value: WS
  misc_feature: MA Experiment 20000286 PARAMETER Experiment Name: At_Open_Flower_P Parameter: Tissue Value: Half Open vs. Whole Plant
  misc_feature: MA Experiment ID: 20000437 Result: Up-regulated in Transcription
  misc_feature: MA Experiment 20000437 PARAMETER Experiment Name: At_Drought_P Parameter: Age (day) Value: 8
  misc_feature: MA Experiment 20000437 PARAMETER Experiment Name: At_Drought_P Parameter: Organism Value: A. thaliana
  misc_feature: MA Experiment 20000437 PARAMETER Experiment Name: At_Drought_P Parameter: Plant Line Value: WS
  misc_feature: MA Experiment 20000437 PARAMETER Experiment Name: At_Drought_P Parameter: Timepoint (hr) Value: 24
  misc_feature: MA Experiment 20000437 PARAMETER Experiment Name: At_Drought_P Parameter: Tissue Value: Whole Plant
  misc_feature: MA Experiment 20000437 PARAMETER Experiment Name: At_Drought_P Parameter: Treatment Value: Drought vs. No Drought
  misc_feature: MA Experiment ID: 20000438 Result: Down-regulated in Transcription
  misc_feature: MA Experiment 20000438 PARAMETER Experiment Name: At_Shoots__P Parameter: Age (day) Value: 14
  misc_feature: MA Experiment 20000438 PARAMETER Experiment Name: At_Shoots__P Parameter: Tissue Value: Shoots vs. Whole Plant
  misc_feature: MA Experiment ID: 20000495 Result: Up-regulated in Transcription
  misc_feature: MA Experiment 20000495 PARAMETER Experiment Name: At_Guard_Cells_P Parameter: Harvest Date Value: 8/2/2002
  misc_feature: MA Experiment 20000495 PARAMETER Experiment Name: At_Guard_Cells_P Parameter: Organism Value: A. thaliana
  misc_feature: MA Experiment 20000495 PARAMETER Experiment Name: At_Guard_Cells_P Parameter: Tissue Value: Guard Cells vs. Leaves
  misc_feature: MA Experiment ID: 20001247 Result: Up-regulated in Transcription
  misc_feature: MA Experiment 20001247 PARAMETER Experiment Name: At_Far-red-induction_P Parameter: Age (day) Value: 7
  misc_feature: MA Experiment 20001247 PARAMETER Experiment Name: At_Far-red-induction_P Parameter: Light Value: Far-red vs. White
  misc_feature: MA Experiment 20001247 PARAMETER Experiment Name: At_Far-red-induction_P Parameter: Organism Value: A. thaliana
  misc_feature: MA Experiment 20001247 PARAMETER Experiment Name: At_Far-red-induction_P Parameter: Plant Line Value: Columbia
  misc_feature: MA Experiment 20001247 PARAMETER Experiment Name: At_Far-red-induction_P Parameter: Timepoint (hr) Value: 1
  misc_feature: MA Experiment 20001247 PARAMETER Experiment Name: At_Far-red-induction_P Parameter: Tissue Value: Whole Plant
  misc_feature: MA Experiment ID: 20001248 Result: Up-regulated in Transcription
  misc_feature: MA Experiment 20001248 PARAMETER Experiment Name: At_Far-red-induction_P Parameter: Age (day) Value: 7
  misc_feature: MA Experiment 20001248 PARAMETER Experiment Name: At_Far-red-induction_P Parameter: Light Value: Far-red vs. White
  misc_feature: MA Experiment 20001248 PARAMETER Experiment Name: At_Far-red-induction_P Parameter: Organism Value: A. thaliana
  misc_feature: MA Experiment 20001248 PARAMETER Experiment Name: At_Far-red-induction_P Parameter: Plant Line Value: Columbia
  misc_feature: MA Experiment 20001248 PARAMETER Experiment Name: At_Far-red-induction_P Parameter: Timepoint (hr) Value: 4
  misc_feature: MA Experiment 20001248 PARAMETER Experiment Name: At_Far-red-induction_P Parameter: Tissue Value: Whole Plant
  misc_feature: MA Experiment ID: 20001450 Result: Up-regulated in Transcription
  misc_feature: MA Experiment 20001450 PARAMETER Experiment Name: At_Far-red-induction_P Parameter: Age (day) Value: 7
  misc_feature: MA Experiment 20001450 PARAMETER Experiment Name: At_Far-red-induction_P Parameter: Light Value: Far-red vs. White
  misc_feature: MA Experiment 20001450 PARAMETER Experiment Name: At_Far-red-induction_P Parameter: Organism Value: A. thaliana
  misc_feature: MA Experiment 20001450 PARAMETER Experiment Name: At_Far-red-induction_P Parameter: Plant Line Value: Columbia
  misc_feature: MA Experiment 20001450 PARAMETER Experiment Name: At_Far-red-induction_P Parameter: Timepoint (hr) Value: 8
  misc_feature: MA Experiment 20001450 PARAMETER Experiment Name: At_Far-red-induction_P Parameter: Tissue Value: Whole Plant
  misc_feature: MA Experiment ID: 20001451 Result: Up-regulated in Transcription
  misc_feature: MA Experiment 20001451 PARAMETER Experiment Name: At_Far-red-induction_P Parameter: Age (day) Value: 7
  misc_feature: MA Experiment 20001451 PARAMETER Experiment Name: At_Far-red-induction_P Parameter: Light Value: Far-red vs. White
  misc_feature: MA Experiment 20001451 PARAMETER Experiment Name: At_Far-red-induction_P Parameter: Organism Value: A. thaliana
  misc_feature: MA Experiment 20001451 PARAMETER Experiment Name: At_Far-red-induction_P Parameter: Plant Line Value: Columbia
  misc_feature: MA Experiment 20001451 PARAMETER Experiment Name: At_Far-red-induction_P Parameter: Timepoint (hr) Value: 24
  misc_feature: MA Experiment 20001451 PARAMETER Experiment Name: At_Far-red-induction_P Parameter: Tissue Value: Whole Plant
  misc_feature: MA Experiment ID: 20001560 Result: Down-regulated in Transcription
  misc_feature: MA Experiment 20001560 PARAMETER Experiment Name: At_Drought_Soil_Dry_P Parameter: Age (day) Value: 28
  misc_feature: MA Experiment 20001560 PARAMETER Experiment Name: At_Drought_Soil_Dry_P Parameter: Organism Value: A. thaliana
  misc_feature: MA Experiment 20001560 PARAMETER Experiment Name: At_Drought_Soil_Dry_P Parameter: Plant Line Value: WS
  misc_feature: MA Experiment 20001560 PARAMETER Experiment Name: At_Drought_Soil_Dry_P Parameter: Post Timepoint (hr) Value: None
  misc_feature: MA Experiment 20001560 PARAMETER Experiment Name: At_Drought_Soil_Dry_P Parameter: Post-Treatment Value: None
  misc_feature: MA Experiment 20001560 PARAMETER Experiment Name: At_Drought_Soil_Dry_P Parameter: Timepoint (day) Value: 14
  misc_feature: MA Experiment 20001560 PARAMETER Experiment Name: At_Drought_Soil_Dry_P Parameter: Treatment Value: Drought vs. No Drought
  misc_feature: MA Experiment ID: 20001911 Result: Up-regulated in Transcription
  misc_feature: MA Experiment 20001911 PARAMETER Experiment Name: At_Drought_Reproduction_P Parameter: Age (day) Value: 40
  misc_feature: MA Experiment 20001911 PARAMETER Experiment Name: At_Drought_Reproduction_P Parameter: Organism Value: A. thaliana
  misc_feature: MA Experiment 20001911 PARAMETER Experiment Name: At_Drought_Reproduction_P Parameter: Plant Line Value: WS
  misc_feature: MA Experiment 20001911 PARAMETER Experiment Name: At_Drought_Reproduction_P Parameter: Timepoint (day) Value: 10
  misc_feature: MA Experiment 20001911 PARAMETER Experiment Name: At_Drought_Reproduction_P Parameter: Tissue Value: Flowers
  misc_feature: MA Experiment 20001911 PARAMETER Experiment Name: At_Drought_Reproduction_P Parameter: Treatment Value: Drought vs. No Drought
ctctctctctctctctctctctctctctctttcttctatcttctccgtcatcgttctctctctctcctctcccggagatttttactcaggcgttcttctgtggatcagaggtgaaaaagatgaatcattgcaaccttcagcagaacgccttcatgtctcgtgaggagatgatgggatttgaccgtaaggatcttgttgtttgtcctaagcctcgacgtgttggtttactcgccaacaacgttattcgtcctcttagattacatatgagtcaagctgcagccgacttgtgtgattctaaagctggtgctgagcttttggaaatcattcgtagaaaggaggataatggaacaatagggcagttactatcatcatccccaccgtattttcccggttcaccaccgagtagagcggcgaacccattagcccaagatgctcgttttcgagatgagaaactcaatccaatctcaccaaactctcctttccttcagccatattcggcaaccgggtttccatctccatcttcttcctcatcatcgtcgtcttcccgtggttgtgttagaatgaaatttggactcaactcgcctgcagttagagtagaaggatttgattgcttgaaccgtgaccgtcaaaactcgagcatccctgccatggcttagtagacaaacaacaaaaaaacaagtgtacatagagattccggaatcgttcgttcgccaatgcctaacagaggaggatttgattactactgctgcaactattactactaccatttttgaaagtaaatgaatatgtttttgtttttcatcttctcctaagagagagagagagggaagaggaaggaggaagatgaagatcagttaccgtcgccggtcaccgtttaactgttttattcaggttagtgtttgtatataaagatgcagtatttaaaagaagagtcgaatctatgtattcgtttggtgtttttctgggtcgggcggatctttagtactgtttcatatataactaagagggaagattagaagatgaagaagctgtaaaattttcttgggaagaaaactctggtttctatcttctcgttgtaatatagataatcaacttggatttatcttctttcagattcaccattgtatatagtaatgtttatttttcttggtg

SEQ ID NO: 84045 - protein, 217 aa, Arabidopsis thaliana
  peptide (1)..(217): Ceres Seq. ID no. 12672961
  misc_feature (1)..(217): Homolog of NCBI NO: 30685676 NR Description: expressed protein [Arabidopsis thaliana]
  misc_feature (40)..(217): Homolog of NCBI NO: 11762168 NR Description: AT5g16110 [Arabidopsis thaliana]
  misc_feature (40)..(217): Homolog of NCBI NO: 18409044 NR Description: expressed protein; protein id: At1g68490.1, by cDNA: 37060. [Arabidopsis thaliana] >gi|25404742|pir||A96709
  misc_feature (40)..(217): Homolog of NCBI NO: 18396232 NR Description: Expressed protein; protein id: At3g02555.1, by cDNA: 1232. [Arabidopsis thaliana] >gi|21537194|gb|AAM61535.1|
  misc_feature (40)..(217): Homolog of NCBI NO: 15222278 NR Description: unknown protein; protein id: At1g13390.1 thaliana] >gi|9958074|gb|AAG09563.1|AC011810_22 Unknown protein
LSLSLSLSLFLLSSPSSFSLSPLPEIFTQAFFCGSEVKKMNHCNLQQNAFMSREEMMGFDRKDLVVCPKPRRVGLLANNVIRPLRLHMSQAAADLCDSKAGAELLEIIRRKEDNGTIGQLLSSSPPYFPGSPPSRAANPLAQDARFRDEKLNPISPNSPFLQPYSATGFPSPSSSSSSSSSRGCVRMKFGLNSPAVRVEGFDCLNRDRQNSSIPAMA

SEQ ID NO: 84046 - protein, 178 aa, Arabidopsis thaliana; identical to SEQ ID NO: 36312
  peptide (1)..(178): Ceres Seq. ID no. 12672962
  misc_feature (1)..(178): Homolog of NCBI NO: 30685676 NR Description: expressed protein [Arabidopsis thaliana]
  misc_feature (1)..(178): Homolog of NCBI NO: 11762168 NR Description: AT5g16110 [Arabidopsis thaliana]
  misc_feature (1)..(178): Homolog of NCBI NO: 18409044 NR Description: expressed protein; protein id: At1g68490.1, by cDNA: 37060. [Arabidopsis thaliana] >gi|25404742|pir||A96709
  misc_feature (1)..(178): Homolog of NCBI NO: 18396232 NR Description: Expressed protein; protein id: At3g02555.1, by cDNA: 1232. [Arabidopsis thaliana] >gi|21537194|gb|AAM61535.1|
  misc_feature (1)..(178): Homolog of NCBI NO: 15222278 NR Description: unknown protein; protein id: At1g13390.1 thaliana] >gi|9958074|gb|AAG09563.1|AC011810_22 Unknown protein

SEQ ID NO: 84047 - protein, 167 aa, Arabidopsis thaliana; identical to SEQ ID NO: 36313
  peptide (1)..(167): Ceres Seq. ID no. 12672963
  misc_feature (1)..(167): Homolog of NCBI NO: 30685676 NR Description: expressed protein [Arabidopsis thaliana]
  misc_feature (1)..(167): Homolog of NCBI NO: 11762168 NR Description: AT5g16110 [Arabidopsis thaliana]
  misc_feature (1)..(167): Homolog of NCBI NO: 18409044 NR Description: expressed protein; protein id: At1g68490.1, by cDNA: 37060. [Arabidopsis thaliana] >gi|25404742|pir||A96709
  misc_feature (1)..(167): Homolog of NCBI NO: 18396232 NR Description: Expressed protein; protein id: At3g02555.1, by cDNA: 1232. [Arabidopsis thaliana] >gi|21537194|gb|AAM61535.1|
  misc_feature (1)..(167): Homolog of NCBI NO: 15222278 NR Description: unknown protein; protein id: At1g13390.1 thaliana] >gi|9958074|gb|AAG09563.1|AC011810_22 Unknown protein

SEQ ID NO: 84048 - DNA, 1074 bp, Arabidopsis thaliana
  misc_feature (1)..(1074): Ceres Seq. ID no. 12672964
  misc_feature: MA Experiment ID: 108461 Result: Up-regulated in Transcription
  misc_feature: MA Experiment 108461 PARAMETER Experiment Name: At_Germinating_Seeds_cDNA_P Parameter: Age (day) Value: 1 vs. 0
  misc_feature: MA Experiment 108461 PARAMETER Experiment Name: At_Germinating_Seeds_cDNA_P Parameter: Tissue Value: Germinating Seeds
  misc_feature: MA Experiment ID: 108462 Result: Up-regulated in Transcription
  misc_feature: MA Experiment 108462 PARAMETER Experiment Name: At_Germinating_Seeds_cDNA_P Parameter: Age (day) Value: 2 vs. 0
  misc_feature: MA Experiment 108462 PARAMETER Experiment Name: At_Germinating_Seeds_cDNA_P Parameter: Tissue Value: Germinating Seeds
  misc_feature: MA Experiment ID: 108463 Result: Up-regulated in Transcription
  misc_feature: MA Experiment 108463 PARAMETER Experiment Name: At_Germinating_Seeds_cDNA_P Parameter: Age (day) Value: 3 vs. 0
  misc_feature: MA Experiment 108463 PARAMETER Experiment Name: At_Germinating_Seeds_cDNA_P Parameter: Tissue Value: Germinating Seeds
  misc_feature: MA Experiment ID: 108464 Result: Up-regulated in Transcription
  misc_feature: MA Experiment 108464 PARAMETER Experiment Name: At_Germinating_Seeds_cDNA_P Parameter: Age (day) Value: 4 vs. 0
  misc_feature: MA Experiment 108464 PARAMETER Experiment Name: At_Germinating_Seeds_cDNA_P Parameter: Tissue Value: Germinating Seeds
  misc_feature: MA Experiment ID: 108579 Result: Up-regulated in Transcription
  misc_feature: MA Experiment 108579 PARAMETER Experiment Name: At_4deg_Cold_cDNA_P Parameter: Temperature (deg C) Value: 4 vs. 22
  misc_feature: MA Experiment 108579 PARAMETER Experiment Name: At_4deg_Cold_cDNA_P Parameter: Timepoint (hr) Value: 6
  misc_feature: MA Experiment 108579 PARAMETER Experiment Name: At_4deg_Cold_cDNA_P Parameter: Tissue Value: Aerial
  misc_feature: MA Experiment ID: 20000086 Result: Down-regulated in Transcription
  misc_feature: MA Experiment 20000086 PARAMETER Experiment Name: At_100uM_ABA_Mutants_cDNA_P Parameter: Plant Line Value: CS22
  misc_feature: MA Experiment 20000086 PARAMETER Experiment Name: At_100uM_ABA_Mutants_cDNA_P Parameter: Timepoint (hr) Value: 6
  misc_feature: MA Experiment 20000086 PARAMETER Experiment Name: At_100uM_ABA_Mutants_cDNA_P Parameter: Tissue Value: Aerial
  misc_feature: MA Experiment 20000086 PARAMETER Experiment Name: At_100uM_ABA_Mutants_cDNA_P Parameter: Treatment Value: 100uM ABA vs. No Treatment
  misc_feature: MA Experiment ID: 20000090 Result: Down-regulated in Transcription
  misc_feature: MA Experiment ID: 20000180 Result: Up-regulated in Transcription
  misc_feature: MA Experiment 20000180 PARAMETER Experiment Name: At_Germinating_Seeds_P Parameter: Age (hr) Value: 24 vs. 0
  misc_feature: MA Experiment 20000180 PARAMETER Experiment Name: At_Germinating_Seeds_P Parameter: Tissue Value: Germinating Seeds
  misc_feature: MA Experiment ID: 20000184 Result: Up-regulated in Transcription
  misc_feature: MA Experiment 20000184 PARAMETER Experiment Name: At_Shoots__P Parameter: Age (day) Value: 7
  misc_feature: MA Experiment 20000184 PARAMETER Experiment Name: At_Shoots__P Parameter: Tissue Value: Shoots vs. Whole Plant
  misc_feature: MA Experiment ID: 20000185 Result: Up-regulated in Transcription
  misc_feature: MA Experiment 20000185 PARAMETER Experiment Name: At_Roots__P Parameter: Age (day) Value: 7 vs. 21
  misc_feature: MA Experiment 20000185 PARAMETER Experiment Name: At_Roots__P Parameter: Organism Value: A. thaliana
  misc_feature: MA Experiment 20000185 PARAMETER Experiment Name: At_Roots__P Parameter: Tissue Value: Roots vs. Whole Plant
  misc_feature: MA Experiment ID: 20000438 Result: Up-regulated in Transcription
  misc_feature: MA Experiment 20000438 PARAMETER Experiment Name: At_Shoots__P Parameter: Age (day) Value: 14
  misc_feature: MA Experiment 20000438 PARAMETER Experiment Name: At_Shoots__P Parameter: Tissue Value: Shoots vs. Whole Plant
  misc_feature: MA Experiment ID: 20001248 Result: Down-regulated in Transcription
  misc_feature: MA Experiment 20001248 PARAMETER Experiment Name: At_Far-red-induction_P Parameter: Age (day) Value: 7
  misc_feature: MA Experiment 20001248 PARAMETER Experiment Name: At_Far-red-induction_P Parameter: Light Value: Far-red vs. White
  misc_feature: MA Experiment 20001248 PARAMETER Experiment Name: At_Far-red-induction_P Parameter: Organism Value: A. thaliana
  misc_feature: MA Experiment 20001248 PARAMETER Experiment Name: At_Far-red-induction_P Parameter: Plant Line Value: Columbia
  misc_feature: MA Experiment 20001248 PARAMETER Experiment Name: At_Far-red-induction_P Parameter: Timepoint (hr) Value: 4
  misc_feature: MA Experiment 20001248 PARAMETER Experiment Name: At_Far-red-induction_P Parameter: Tissue Value: Whole Plant
aagtttcaattcatcttcattccgggagaaaaagtcgcgatacttgagctactcagctttagggtttaacatgttaaggtctctgatttggaaacgatcacaggcatattcttcagtcgtcacgatgtcttcaatcagtcagagaggaaatgaaaggcttttgtctgaagtcgctggttcacattcaagagataataagatattggttttgggaggaaatggttatgtaggttcacacatatgtaaggaggcactgagacaaggtttctctgtatctagtcttagcaggtctggaagatcttctcttcacgattcgtgggtcgatgatgtaacctggcatcaaggtgatttgctttcacccgattctctgaagcctgcactagaaggaattacatctgtgatttcatgtgttggtggttttggttccaactcacaaatggtcagaattaacggtactgcaaacatcaatgctgttaaagctgcagcagaacaaggtgtgaagagatttgtgtatatatcagctgcggattttggtgtcataaataacttgattcgaggatatttcgaagggaagagagcaaccgaagctgagattttggataaatttggaaacagaggttcggttttaaggccaggattcatacatgggactcgtcaggtcggtagcataaagctgccacttagtctcattggagctcctctcgaaatggttttgaagctgttgccaaaagaggtgacgaaaattcctgtgatcgggccacttttaatacctccggtcaatgtcaaatccgttgcagcaacagcggtaaaagctgcagttgatcccgagtttgcttctggagtcatcgatgtgtaccggattcttcaacatggtcactgaaaacaacacctgtcttaacaaagttctcctcaatacggttttaaatgtcaaattcaaatgtaaccaataaccatcgtctctggtcttctgctaccaaataaactatgactttcgcatattacacaataggagaacaaataatgaaatctttttgaaactggaaccaataaccatcgtcattagagattcaactt

SEQ ID NO: 84049 - protein, 292 aa, Arabidopsis thaliana
  peptide (1)..(292): Ceres Seq. ID no. 12672965
  misc_feature (66)..(227): Pfam Name: Isoflavone reductase Pfam Description: Isoflavone reductase
  misc_feature (24)..(292): Homolog of NCBI NO: 18417824 NR Description: putative protein; protein id: At5g15910.1, by cDNA: 22994., supported by cDNA: gi_15292960, supported by gi_21280840 [Arabidopsis thaliana] >gi|15292961|gb|AAK93591.1|
  misc_feature (42)..(292): Homolog of NCBI NO: 21592373 NR Description: unknown [Arabidopsis thaliana]
  misc_feature (66)..(292): Homolog of NCBI NO: 18416362 NR Description: putative protein; protein id: At5g10730.1, by cDNA: 10217., supported by cDNA: gi_13926272, supported by gi_16323237, supported by cDNA: gi_19698948 [Arabidopsis
  misc_feature (66)..(292): Homolog of NCBI NO: 10129651 NR Description: putative protein [Arabidopsis thaliana]
  misc_feature (146)..(292): Homolog of NCBI NO: 11346175 NR Description: hypothetical protein F1N13_50 - Arabidopsis >gi|9755637|emb|CAC01790.1| putative protein [Arabidopsis
  misc_feature (63)..(287): Homolog of NCBI NO: 38346147 NR Description: OSJNBb0118P14.7 [Oryza sativa (japonica
  misc_feature (63)..(287): Homolog of NCBI NO: 18398333 NR Description: expressed protein; protein id: At1g32220.1, by cDNA: 3464. [Arabidopsis thaliana] >gi|25403150|pir||G86446
  misc_feature (131)..(287): Homolog of NCBI NO: 8744993 NR Description: hypothetical protein P1295.07 [Leishmania major]
  misc_feature (66)..(255): Homolog of NCBI NO: 23037289 NR Description: hypothetical protein [Oenococcus oeni MCW]
  misc_feature (66)..(262): Homolog of NCBI NO: 22536918 NR Description: conserved domain protein [Streptococcus NEM316] >gi|22533770|gb|AAM99641.1|AE014226_1 conserved domain
SFNSSSFREKKSRYLSYSALGFNMLRSLIWKRSQAYSSVVTMSSISQRGNERLLSEVAGSHSRDNKILVLGGNGYVGSHICKEALRQGFSVSSLSRSGRSSLHDSWVDDVTWHQGDLLSPDSLKPALEGITSVISCVGGFGSNSQMVRINGTANINAVKAAAEQGVKRFVYISAADFGVINNLIRGYFEGKRATEAEILDKFGNRGSVLRPGFIHGTRQVGSIKLPLSLIGAPLEMVLKLLPKEVTKIPVIGPLLIPPVNVKSVAATAVKAAVDPEFASGVIDVYRILQHGH

SEQ ID NO: 84050 - protein, 269 aa, Arabidopsis thaliana; identical to SEQ ID NO: 35416
  peptide (1)..(269): Ceres Seq. ID no. 12672966
  misc_feature (43)..(204): Pfam Name: Isoflavone reductase Pfam Description: Isoflavone reductase
  misc_feature (1)..(269): Homolog of NCBI NO: 18417824 NR Description: putative protein; protein id: At5g15910.1, by cDNA: 22994., supported by cDNA: gi_15292960, supported by gi_21280840 [Arabidopsis thaliana] >gi|15292961|gb|AAK93591.1|
  misc_feature (19)..(269): Homolog of NCBI NO: 21592373 NR Description: unknown [Arabidopsis thaliana]
  misc_feature (43)..(269): Homolog of NCBI NO: 18416362 NR Description: putative protein; protein id: At5g10730.1, by cDNA: 10217., supported by cDNA: gi_13926272, supported by gi_16323237, supported by cDNA: gi_19698948 [Arabidopsis
  misc_feature (43)..(269): Homolog of NCBI NO: 10129651 NR Description: putative protein [Arabidopsis thaliana]
  misc_feature (123)..(269): Homolog of NCBI NO: 11346175 NR Description: hypothetical protein F1N13_50 - Arabidopsis >gi|9755637|emb|CAC01790.1| putative protein [Arabidopsis
  misc_feature (40)..(264): Homolog of NCBI NO: 38346147 NR Description: OSJNBb0118P14.7 [Oryza sativa (japonica
  misc_feature (40)..(264): Homolog of NCBI NO: 18398333 NR Description: expressed protein; protein id: At1g32220.1, by cDNA: 3464. [Arabidopsis thaliana] >gi|25403150|pir||G86446
  misc_feature (108)..(264): Homolog of NCBI NO: 8744993 NR Description: hypothetical protein P1295.07 [Leishmania major]
  misc_feature (43)..(232): Homolog of NCBI NO: 23037289 NR Description: hypothetical protein [Oenococcus oeni MCW]
  misc_feature (43)..(239): Homolog of NCBI NO: 22536918 NR Description: conserved domain protein [Streptococcus NEM316] >gi|22533770|gb|AAM99641.1|AE014226_1 conserved domain

SEQ ID NO: 84051 - protein, 251 aa, Arabidopsis thaliana; identical to SEQ ID NO: 35417
  peptide (1)..(251): Ceres Seq. ID no. 12672967
  misc_feature (25)..(186): Pfam Name: Isoflavone reductase Pfam Description: Isoflavone reductase
  misc_feature (1)..(251): Homolog of NCBI NO: 18417824 NR Description: putative protein; protein id: At5g15910.1, by cDNA: 22994., supported by cDNA: gi_15292960, supported by gi_21280840 [Arabidopsis thaliana] >gi|15292961|gb|AAK93591.1|
  misc_feature (1)..(251): Homolog of NCBI NO: 21592373 NR Description: unknown [Arabidopsis thaliana]
  misc_feature (25)..(251): Homolog of NCBI NO: 18416362 NR Description: putative protein; protein id: At5g10730.1, by cDNA: 10217., supported by cDNA: gi_13926272, supported by gi_16323237, supported by cDNA: gi_19698948 [Arabidopsis
  misc_feature (25)..(251): Homolog of NCBI NO: 10129651 NR Description: putative protein [Arabidopsis thaliana]
  misc_feature (105)..(251): Homolog of NCBI NO: 11346175 NR Description: hypothetical protein F1N13_50 - Arabidopsis >gi|9755637|emb|CAC01790.1| putative protein [Arabidopsis
  misc_feature (22)..(246): Homolog of NCBI NO: 38346147 NR Description: OSJNBb0118P14.7 [Oryza sativa (japonica
  misc_feature (22)..(246): Homolog of NCBI NO: 18398333 NR Description: expressed protein; protein id: At1g32220.1, by cDNA: 3464. [Arabidopsis thaliana] >gi|25403150|pir||G86446
  misc_feature (90)..(246): Homolog of NCBI NO: 8744993 NR Description: hypothetical protein P1295.07 [Leishmania major]
  misc_feature (25)..(214): Homolog of NCBI NO: 23037289 NR Description: hypothetical protein [Oenococcus oeni MCW]
  misc_feature (25)..(221): Homolog of NCBI NO: 22536918 NR Description: conserved domain protein [Streptococcus NEM316] >gi|22533770|gb|AAM99641.1|AE014226_1 conserved domain

SEQ ID NO: 84052 - DNA, 914 bp, Arabidopsis thaliana
  misc_feature (1)..(914): Ceres Seq. ID no. 12672968
  misc_feature: MA Experiment ID: 20000213 Result: Up-regulated in Transcription
  misc_feature: MA Experiment 20000213 PARAMETER Experiment Name: At_4deg_Cold_P Parameter: Timepoint (hr) Value: 2
  misc_feature: MA Experiment ID: 20000437 Result: Up-regulated in Transcription
  misc_feature: MA Experiment 20000437 PARAMETER Experiment Name: At_Drought_P Parameter: Age (day) Value: 8
  misc_feature: MA Experiment 20000437 PARAMETER Experiment Name: At_Drought_P Parameter: Organism Value: A. thaliana
  misc_feature: MA Experiment 20000437 PARAMETER Experiment Name: At_Drought_P Parameter: Plant Line Value: WS
  misc_feature: MA Experiment 20000437 PARAMETER Experiment Name: At_Drought_P Parameter: Timepoint (hr) Value: 24
  misc_feature: MA Experiment 20000437 PARAMETER Experiment Name: At_Drought_P Parameter: Tissue Value: Whole Plant
  misc_feature: MA Experiment 20000437 PARAMETER Experiment Name: At_Drought_P Parameter: Treatment Value: Drought vs. No Drought
  misc_feature: MA Experiment ID: 20000438 Result: Down-regulated in Transcription
  misc_feature: MA Experiment 20000438 PARAMETER Experiment Name: At_Shoots__P Parameter: Age (day) Value: 14
  misc_feature: MA Experiment 20000438 PARAMETER Experiment Name: At_Shoots__P Parameter: Tissue Value: Shoots vs. Whole Plant
  misc_feature: MA Experiment ID: 20001451 Result: Up-regulated in Transcription
  misc_feature: MA Experiment 20001451 PARAMETER Experiment Name: At_Far-red-induction_P Parameter: Age (day) Value: 7
  misc_feature: MA Experiment 20001451 PARAMETER Experiment Name: At_Far-red-induction_P Parameter: Light Value: Far-red vs. White
  misc_feature: MA Experiment 20001451 PARAMETER Experiment Name: At_Far-red-induction_P Parameter: Organism Value: A. thaliana
  misc_feature: MA Experiment 20001451 PARAMETER Experiment Name: At_Far-red-induction_P Parameter: Plant Line Value: Columbia
  misc_feature: MA Experiment 20001451 PARAMETER Experiment Name: At_Far-red-induction_P Parameter: Timepoint (hr) Value: 24
  misc_feature: MA Experiment 20001451 PARAMETER Experiment Name: At_Far-red-induction_P Parameter: Tissue Value: Whole Plant
  misc_feature: MA Experiment ID: 20001557 Result: Up-regulated in Transcription
  misc_feature: MA Experiment 20001557 PARAMETER Experiment Name: At_Drought_Soil_Dry_P Parameter: Age (day) Value: 27
  misc_feature: MA Experiment 20001557 PARAMETER Experiment Name: At_Drought_Soil_Dry_P Parameter: Organism Value: A. thaliana
  misc_feature: MA Experiment 20001557 PARAMETER Experiment Name: At_Drought_Soil_Dry_P Parameter: Plant Line Value: WS
  misc_feature: MA Experiment 20001557 PARAMETER Experiment Name: At_Drought_Soil_Dry_P Parameter: Post Timepoint (hr) Value: 3
  misc_feature: MA Experiment 20001557 PARAMETER Experiment Name: At_Drought_Soil_Dry_P Parameter: Post-Treatment Value: Re-Water vs. No Drought
  misc_feature: MA Experiment 20001557 PARAMETER Experiment Name: At_Drought_Soil_Dry_P Parameter: Timepoint (day) Value: 13
  misc_feature: MA Experiment 20001557 PARAMETER Experiment Name: At_Drought_Soil_Dry_P Parameter: Treatment Value: Drought vs. No Drought
tttcaatggcgtccggtgatgttgagtatcggtgcttcgttggaggtctagcatgggccactgatgacagagctcttgagactgccttcgctcaatacggcgacgttattgattccaaggtctgttacacgccgagatcggactccgagtgatatcgatgatctcatcctcgacggatctgttccgatcttgtgtttctctgttacttgattcgattactctgttactattctcgttctttgttactactactactactactgttacttgtattttcccaaatcgtaacgatcgtgagactggaagatcaaggggattcggattcgtcaccttcaaggatgagaaagccatgaaggatgcgattgagggaatgaacggacaagatctcgatggccgtagcatcactgttaacgaggctcagtcacgaggaagcggtggcggcggaggccaccgtggaggtggtggcggtggataccgcagcggcggtggtggaggttactccggtggaggtggtagctacggaggtggcggcggtagacgcgagggtggaggaggatacagcggcggcggcggcggttactcctcaagaggtggtggtggcggaagctacggtggtggaagacgtgagggaggaggaggatacggtggtggtgaaggaggaggttacggaggaagcggtggtggtggaggatggtaattcctttaattaggtttgggattaccaatgaatgttctctctctcgcttgttatgcttctacttggttttgtgtgttctctattttgttctggttctgctttagatttgatgtaacagttcgtgattaggtattttggtatctggaaacgtaatgttaagtcacttgtcattctctaaataacaaatttcttcggagatattatctctgttgattga

SEQ ID NO: 84053 - protein, 179 aa, Arabidopsis thaliana
  peptide (1)..(179): Ceres Seq. ID no. 12672969
  misc_feature (91)..(177): Pfam Name: Herpesvirus large structural phosphoprotein UL32 Pfam Description: Herpesvirus large structural phosphoprotein UL32
  misc_feature (44)..(179): Homolog of NCBI NO: 15226605 NR Description: glycine-rich RNA binding protein AtGRP7; protein At2g21660.1, supported by cDNA: 13879., supported by cDNA: supported by cDNA: gi_16226371, supported by cDNA: gi_166836
  misc_feature (44)..(179): Homolog of NCBI NO: 21553354 NR Description: glycine-rich RNA binding protein 7 [Arabidopsis
  misc_feature (44)..(179): Homolog of NCBI NO: 30681492 NR Description: glycine-rich RNA-binding protein (AtGRP7)
  misc_feature (44)..(179): Homolog of NCBI NO: 1346181 NR Description: Glycine-rich RNA-binding protein GRP2A
  misc_feature (44)..(179): Homolog of NCBI NO: 1346180 NR Description: Glycine-rich RNA-binding protein GRP1A
  misc_feature (44)..(179): Homolog of NCBI NO: 15235002 NR Description: glycine-rich RNA-binding protein 8 (GRP8); id: At4g39260.1, supported by cDNA: gi_166838 [Arabidopsis
  misc_feature (44)..(179): Homolog of NCBI NO: 34851124 NR Description: putative glycine-rich RNA-binding protein [Prunus
  misc_feature (65)..(179): Homolog of NCBI NO: 14596077 NR Description: glycine-rich RNA binding protein [Arabidopsis
  misc_feature (44)..(179): Homolog of NCBI NO: 544416 NR Description: Glycine-rich RNA-binding protein 10
  misc_feature (45)..(179): Homolog of NCBI NO: 544423 NR Description: Glycine-rich RNA-binding protein 2
MISSSTDLFRSCVSLLLDSITLLLFSFFVTTTTTTVTCIFPNRNDRETGRSRGFGFVTFKDEKAMKDAIEGMNGQDLDGRSITVNEAQSRGSGGGGGHRGGGGGGYRSGGGGGYSGGGGSYGGGGGRREGGGGYSGGGGGYSSRGGGGGSYGGGRREGGGGYGGGEGGGYGGSGGGGGW

SEQ ID NO: 84054 - protein, 115 aa, Arabidopsis thaliana; identical to SEQ ID NO: 76878
  peptide (1)..(115): Ceres Seq. ID no. 12672970
  misc_feature (27)..(113): Pfam Name: Herpesvirus large structural phosphoprotein UL32 Pfam Description: Herpesvirus large structural phosphoprotein UL32
  misc_feature (1)..(115): Homolog of NCBI NO: 15226605 NR Description: glycine-rich RNA binding protein AtGRP7; protein At2g21660.1, supported by cDNA: 13879., supported by cDNA: supported by cDNA: gi_16226371, supported by cDNA: gi_166836
  misc_feature (1)..(115): Homolog of NCBI NO: 21553354 NR Description: glycine-rich RNA binding protein 7 [Arabidopsis
  misc_feature (1)..(115): Homolog of NCBI NO: 30681492 NR Description: glycine-rich RNA-binding protein (AtGRP7)
  misc_feature (1)..(115): Homolog of NCBI NO: 1346181 NR Description: Glycine-rich RNA-binding protein GRP2A
  misc_feature (1)..(115): Homolog of NCBI NO: 1346180 NR Description: Glycine-rich RNA-binding protein GRP1A
  misc_feature (1)..(115): Homolog of NCBI NO: 15235002 NR Description: glycine-rich RNA-binding protein 8 (GRP8); id: At4g39260.1, supported by cDNA: gi_166838 [Arabidopsis
  misc_feature (1)..(115): Homolog of NCBI NO: 34851124 NR Description: putative glycine-rich RNA-binding protein [Prunus
  misc_feature (1)..(115): Homolog of NCBI NO: 14596077 NR Description: glycine-rich RNA binding protein [Arabidopsis
  misc_feature (1)..(115): Homolog of NCBI NO: 544416 NR Description: Glycine-rich RNA-binding protein 10
  misc_feature (1)..(115): Homolog of NCBI NO: 544423 NR Description: Glycine-rich RNA-binding protein 2

SEQ ID NO: 84055 - protein, 108 aa, Arabidopsis thaliana; identical to SEQ ID NO: 76879
  peptide (1)..(108): Ceres Seq. ID no. 12672971
  misc_feature (20)..(106): Pfam Name: Herpesvirus large structural phosphoprotein UL32 Pfam Description: Herpesvirus large structural phosphoprotein UL32
  misc_feature (1)..(108): Homolog of NCBI NO: 15226605 NR Description: glycine-rich RNA binding protein AtGRP7; protein At2g21660.1, supported by cDNA: 13879., supported by cDNA: supported by cDNA: gi_16226371, supported by cDNA: gi_166836
  misc_feature (1)..(108): Homolog of NCBI NO: 21553354 NR Description: glycine-rich RNA binding protein 7 [Arabidopsis
  misc_feature (1)..(108): Homolog of NCBI NO: 30681492 NR Description: glycine-rich RNA-binding protein (AtGRP7)
  misc_feature (1)..(108): Homolog of NCBI NO: 1346181 NR Description: Glycine-rich RNA-binding protein GRP2A
  misc_feature (1)..(108): Homolog of NCBI NO: 1346180 NR Description: Glycine-rich RNA-binding protein GRP1A
  misc_feature (1)..(108): Homolog of NCBI NO: 15235002 NR Description: glycine-rich RNA-binding protein 8 (GRP8); id: At4g39260.1, supported by cDNA: gi_166838 [Arabidopsis
  misc_feature (1)..(108): Homolog of NCBI NO: 34851124 NR Description: putative glycine-rich RNA-binding protein [Prunus
  misc_feature (1)..(108): Homolog of NCBI NO: 14596077 NR Description: glycine-rich RNA binding protein [Arabidopsis
  misc_feature (1)..(108): Homolog of NCBI NO: 544416 NR Description: Glycine-rich RNA-binding protein 10
  misc_feature (1)..(108): Homolog of NCBI NO: 544423 NR Description: Glycine-rich RNA-binding protein 2

SEQ ID NO: 84056 - DNA, 1120 bp, Arabidopsis thaliana
  misc_feature (1)..(1120): Ceres Seq. ID no. 12672999
  misc_feature: MA Experiment ID: 20000213 Result: Up-regulated in Transcription
  misc_feature: MA Experiment 20000213 PARAMETER Experiment Name: At_4deg_Cold_P Parameter: Timepoint (hr) Value: 2
  misc_feature: MA Experiment ID: 20000437 Result: Up-regulated in Transcription
  misc_feature: MA Experiment 20000437 PARAMETER Experiment Name: At_Drought_P Parameter: Age (day) Value: 8
  misc_feature: MA Experiment 20000437 PARAMETER Experiment Name: At_Drought_P Parameter: Organism Value: A. thaliana
  misc_feature: MA Experiment 20000437 PARAMETER Experiment Name: At_Drought_P Parameter: Plant Line Value: WS
  misc_feature: MA Experiment 20000437 PARAMETER Experiment Name: At_Drought_P Parameter: Timepoint (hr) Value: 24
  misc_feature: MA Experiment 20000437 PARAMETER Experiment Name: At_Drought_P Parameter: Tissue Value: Whole Plant
  misc_feature: MA Experiment 20000437 PARAMETER Experiment Name: At_Drought_P Parameter: Treatment Value: Drought vs. No Drought
  misc_feature: MA Experiment ID: 20000438 Result: Down-regulated in Transcription
  misc_feature: MA Experiment 20000438 PARAMETER Experiment Name: At_Shoots__P Parameter: Age (day) Value: 14
  misc_feature: MA Experiment 20000438 PARAMETER Experiment Name: At_Shoots__P Parameter: Tissue Value: Shoots vs. Whole Plant
  misc_feature: MA Experiment ID: 20001451 Result: Up-regulated in Transcription
  misc_feature: MA Experiment 20001451 PARAMETER Experiment Name: At_Far-red-induction_P Parameter: Age (day) Value: 7
  misc_feature: MA Experiment 20001451 PARAMETER Experiment Name: At_Far-red-induction_P Parameter: Light Value: Far-red vs. White
  misc_feature: MA Experiment 20001451 PARAMETER Experiment Name: At_Far-red-induction_P Parameter: Organism Value: A. thaliana
  misc_feature: MA Experiment 20001451 PARAMETER Experiment Name: At_Far-red-induction_P Parameter: Plant Line Value: Columbia
  misc_feature: MA Experiment 20001451 PARAMETER Experiment Name: At_Far-red-induction_P Parameter: Timepoint (hr) Value: 24
  misc_feature: MA Experiment 20001451 PARAMETER Experiment Name: At_Far-red-induction_P Parameter: Tissue Value: Whole Plant
  misc_feature: MA Experiment ID: 20001557 Result: Up-regulated in Transcription
  misc_feature: MA Experiment 20001557 PARAMETER Experiment Name: At_Drought_Soil_Dry_P Parameter: Age (day) Value: 27
  misc_feature: MA Experiment 20001557 PARAMETER Experiment Name: At_Drought_Soil_Dry_P Parameter: Organism Value: A. thaliana
  misc_feature: MA Experiment 20001557 PARAMETER Experiment Name: At_Drought_Soil_Dry_P Parameter: Plant Line Value: WS
  misc_feature: MA Experiment 20001557 PARAMETER Experiment Name: At_Drought_Soil_Dry_P Parameter: Post Timepoint (hr) Value: 3
  misc_feature: MA Experiment 20001557 PARAMETER Experiment Name: At_Drought_Soil_Dry_P Parameter: Post-Treatment Value: Re-Water vs. No Drought
  misc_feature: MA Experiment 20001557 PARAMETER Experiment Name: At_Drought_Soil_Dry_P Parameter: Timepoint (day) Value: 13
  misc_feature: MA Experiment 20001557 PARAMETER Experiment Name: At_Drought_Soil_Dry_P Parameter: Treatment Value: Drought vs. No Drought
acacatctcactgctcactactctcactgtaatcccttagatcttcttttcaaatttcaatggcgtccggtgatgttgagtatcggtgcttcgttggaggtctagcatgggccactgatgacagagctcttgagactgccttcgctcaatacggcgacgttattgattccaaggtctgttacacgccgagatcggactccgagtgatatcgatgatctcatcctcgacggatctgttccgatcttgtgtttctctgttacttgattcgattactctgttactattctcgttctttgttactactactactactactgttacttgtattttcccaaatcggtacgttcatcttcctgcttctgtgagcccggagatcgatcggatttttttgtattttgtatatttgttgtagatctaaatgcttttgttcagttttgttggattgttttgctgatctggtttttgtattatttggataacagatcattaacgatcgtgagactggaagatcaaggggattcggattcgtcaccttcaaggatgagaaagccatgaaggatgcgattgagggaatgaacggacaagatctcgatggccgtagcatcactgttaacgaggctcagtcacgaggaagcggtggcggcggaggccaccgtggaggtggtggcggtggataccgcagcggcggtggtggaggttactccggtggaggtggtagctacggaggtggcggcggtagacgcgagggtggaggaggatacagcggcggcggcggcggttactcctcaagaggtggtggtggcggaagctacggtggtggaagacgtgagggaggaggaggatacggtggtggtgaaggaggaggttacggaggaagcggtggtggtggaggatggtaattcctttaattaggtttgggattaccaatgaatgttctctctctcgcttgttatgcttctacttggttttgtgtgttctctattttgttctggttctgctttagatttgatgtaacagttcgtgattaggtattttggtatctggaaacgtaatgttaagtcacttgtcattctctaaataacaaatttcttcggagatattatctctgttgattgattct

SEQ ID NO: 84057 - protein, 115 aa, Arabidopsis thaliana; identical to SEQ ID NO: 76878
  peptide (1)..(115): Ceres Seq. ID no. 12673000
  misc_feature (27)..(113): Pfam Name: Herpesvirus large structural phosphoprotein UL32 Pfam Description: Herpesvirus large structural phosphoprotein UL32
  misc_feature (1)..(115): Homolog of NCBI NO: 15226605 NR Description: glycine-rich RNA binding protein AtGRP7; protein At2g21660.1, supported by cDNA: 13879., supported by cDNA: supported by cDNA: gi_16226371, supported by cDNA: gi_166836
  misc_feature (1)..(115): Homolog of NCBI NO: 21553354 NR Description: glycine-rich RNA binding protein 7 [Arabidopsis
  misc_feature (1)..(115): Homolog of NCBI NO: 30681492 NR Description: glycine-rich RNA-binding protein (AtGRP7)
  misc_feature (1)..(115): Homolog of NCBI NO: 1346181 NR Description: Glycine-rich RNA-binding protein GRP2A
  misc_feature (1)..(115): Homolog of NCBI NO: 1346180 NR Description: Glycine-rich RNA-binding protein GRP1A
  misc_feature (1)..(115): Homolog of NCBI NO: 15235002 NR Description: glycine-rich RNA-binding protein 8 (GRP8); id: At4g39260.1, supported by cDNA: gi_166838 [Arabidopsis
  misc_feature (1)..(115): Homolog of NCBI NO: 34851124 NR Description: putative glycine-rich RNA-binding protein [Prunus
  misc_feature (1)..(115): Homolog of NCBI NO: 544416 NR Description: Glycine-rich RNA-binding protein 10
  misc_feature (1)..(115): Homolog of NCBI NO: 14596077 NR Description: glycine-rich RNA binding protein [Arabidopsis
  misc_feature (1)..(115): Homolog of NCBI NO: 544423 NR Description: Glycine-rich RNA-binding protein 2

SEQ ID NO: 84058 - protein, 108 aa, Arabidopsis thaliana; identical to SEQ ID NO: 76879
  peptide (1)..(108): Ceres Seq. ID no. 12673001
  misc_feature (20)..(106): Pfam Name: Herpesvirus large structural phosphoprotein UL32 Pfam Description: Herpesvirus large structural phosphoprotein UL32
  misc_feature (1)..(108): Homolog of NCBI NO: 15226605 NR Description: glycine-rich RNA binding protein AtGRP7; protein At2g21660.1, supported by cDNA: 13879., supported by cDNA: supported by cDNA: gi_16226371, supported by cDNA: gi_166836
  misc_feature (1)..(108): Homolog of NCBI NO: 21553354 NR Description: glycine-rich RNA binding protein 7 [Arabidopsis
  misc_feature (1)..(108): Homolog of NCBI NO: 30681492 NR Description: glycine-rich RNA-binding protein (AtGRP7)
  misc_feature (1)..(108): Homolog of NCBI NO: 1346181 NR Description: Glycine-rich RNA-binding protein GRP2A
  misc_feature (1)..(108): Homolog of NCBI NO: 1346180 NR Description: Glycine-rich RNA-binding protein GRP1A
  misc_feature (1)..(108): Homolog of NCBI NO: 15235002 NR Description: glycine-rich RNA-binding protein 8 (GRP8); id: At4g39260.1, supported by cDNA: gi_166838 [Arabidopsis
  misc_feature (1)..(108): Homolog of NCBI NO: 34851124 NR Description: putative glycine-rich RNA-binding protein [Prunus
  misc_feature (1)..(108): Homolog of NCBI NO: 544416 NR Description: Glycine-rich RNA-binding protein 10
  misc_feature (1)..(108): Homolog of NCBI NO: 14596077 NR Description: glycine-rich RNA binding protein [Arabidopsis
  misc_feature (1)..(108): Homolog of NCBI NO: 544423 NR Description: Glycine-rich RNA-binding protein 2

SEQ ID NO: 84059 - protein, 106 aa, Arabidopsis thaliana
  peptide (1)..(106): Ceres Seq. ID no. 12673002
MAVASLLTRLSHEEAVAAEATVEVVAVDTAAAVVEVTPVEVVATEVAAVDARVEEDTAAAAAVTPQEVVVAEATVVEDVREEEDTVVVKEEVTEEAVVVEDGNSFN

SEQ ID NO: 84060 - DNA, 927 bp, Arabidopsis thaliana
  misc_feature (1)..(927): Ceres Seq. ID no. 12673003
  misc_feature: MA Experiment ID: 20000213 Result: Up-regulated in Transcription
  misc_feature: MA Experiment 20000213 PARAMETER Experiment Name: At_4deg_Cold_P Parameter: Timepoint (hr) Value: 2
  misc_feature: MA Experiment ID: 20000437 Result: Up-regulated in Transcription
  misc_feature: MA Experiment 20000437 PARAMETER Experiment Name: At_Drought_P Parameter: Age (day) Value: 8
  misc_feature: MA Experiment 20000437 PARAMETER Experiment Name: At_Drought_P Parameter: Organism Value: A. thaliana
  misc_feature: MA Experiment 20000437 PARAMETER Experiment Name: At_Drought_P Parameter: Plant Line Value: WS
  misc_feature: MA Experiment 20000437 PARAMETER Experiment Name: At_Drought_P Parameter: Timepoint (hr) Value: 24
  misc_feature: MA Experiment 20000437 PARAMETER Experiment Name: At_Drought_P Parameter: Tissue Value: Whole Plant
  misc_feature: MA Experiment 20000437 PARAMETER Experiment Name: At_Drought_P Parameter: Treatment Value: Drought vs. No Drought
  misc_feature: MA Experiment ID: 20000438 Result: Down-regulated in Transcription
  misc_feature: MA Experiment 20000438 PARAMETER Experiment Name: At_Shoots__P Parameter: Age (day) Value: 14
  misc_feature: MA Experiment 20000438 PARAMETER Experiment Name: At_Shoots__P Parameter: Tissue Value: Shoots vs. Whole Plant
  misc_feature: MA Experiment ID: 20001451 Result: Up-regulated in Transcription
  misc_feature: MA Experiment 20001451 PARAMETER Experiment Name: At_Far-red-induction_P Parameter: Age (day) Value: 7
  misc_feature: MA Experiment 20001451 PARAMETER Experiment Name: At_Far-red-induction_P Parameter: Light Value: Far-red vs. White
  misc_feature: MA Experiment 20001451 PARAMETER Experiment Name: At_Far-red-induction_P Parameter: Organism Value: A. thaliana
  misc_feature: MA Experiment 20001451 PARAMETER Experiment Name: At_Far-red-induction_P Parameter: Plant Line Value: Columbia
  misc_feature: MA Experiment 20001451 PARAMETER Experiment Name: At_Far-red-induction_P Parameter: Timepoint (hr) Value: 24
  misc_feature: MA Experiment 20001451 PARAMETER Experiment Name: At_Far-red-induction_P Parameter: Tissue Value: Whole Plant
  misc_feature: MA Experiment ID: 20001557 Result: Up-regulated in Transcription
  misc_feature: MA Experiment 20001557 PARAMETER Experiment Name: At_Drought_Soil_Dry_P Parameter: Age (day) Value: 27
  misc_feature: MA Experiment 20001557 PARAMETER Experiment Name: At_Drought_Soil_Dry_P Parameter: Organism Value: A. thaliana
  misc_feature: MA Experiment 20001557 PARAMETER Experiment Name: At_Drought_Soil_Dry_P Parameter: Plant Line Value: WS
  misc_feature: MA Experiment 20001557 PARAMETER Experiment Name: At_Drought_Soil_Dry_P Parameter: Post Timepoint (hr) Value: 3
  misc_feature: MA Experiment 20001557 PARAMETER Experiment Name: At_Drought_Soil_Dry_P Parameter: Post-Treatment Value: Re-Water vs. No Drought
  misc_feature: MA Experiment 20001557 PARAMETER Experiment Name: At_Drought_Soil_Dry_P Parameter: Timepoint (day) Value: 13
  misc_feature: MA Experiment 20001557 PARAMETER Experiment Name: At_Drought_Soil_Dry_P Parameter: Treatment Value: Drought vs. No Drought
atctcactgctcactactctcactgtaatcccttagatcttcttttcaaatttcaatggcgtccggtgatgttgagtatcggtgcttcgttggaggtctagcatgggccactgatgacagagctcttgagactgccttcgctcaatacggcgacgttattgattccaaggtctgttacacgccgagatcggactccgagtgatatcgatgatctcatcctcgacggatctgttccgatcttgtgtttctctgttacttgattcgattactctgttactattctcgttctttgttactactactactactactgttacttgtattttcccaaatcgatcattaacgatcgtgagactggaagatcaaggggattcggattcgtcaccttcaaggatgagaaagccatgaaggatgcgattgagggaatgaacggacaagatctcgatggccgtagcatcactgttaacgaggctcagtcacgaggaagcggtggcggcggaggccaccgtggaggtggtggcggtggataccgcagcggcggtggtggaggttactccggtggaggtggtagctacggaggtggcggcggtagacgcgagggtggaggaggatacagcggcggcggcggcggttactcctcaagaggtggtggtggcggaagctacggtggtggaagacgtgagggaggaggaggatacggtggtggtgaaggaggaggttacggaggaagcggtggtggtggaggatggtaattcctttaattaggtttgggattaccaatgaatgttctctctctcgcttgttatgcttctacttggttttgtgtgttctctattttgttctggttctgctttagatttgatgtaacagttcgtgattaggtattttggtatctggaaacgtaatgttaagtcacttgtcattctc

SEQ ID NO: 84061 - protein, 115 aa, Arabidopsis thaliana; identical to SEQ ID NO: 76878
  peptide (1)..(115): Ceres Seq. ID no. 12673004
  misc_feature (27)..(113): Pfam Name: Herpesvirus large structural phosphoprotein UL32 Pfam Description: Herpesvirus large structural phosphoprotein UL32
  misc_feature (1)..(115): Homolog of NCBI NO: 15226605 NR Description: glycine-rich RNA binding protein AtGRP7; protein At2g21660.1, supported by cDNA: 13879., supported by cDNA: supported by cDNA: gi_16226371, supported by cDNA: gi_166836
  misc_feature (1)..(115): Homolog of NCBI NO: 21553354 NR Description: glycine-rich RNA binding protein 7 [Arabidopsis
  misc_feature (1)..(115): Homolog of NCBI NO: 30681492 NR Description: glycine-rich RNA-binding protein (AtGRP7)
  misc_feature (1)..(115): Homolog of NCBI NO: 1346181 NR Description: Glycine-rich RNA-binding protein GRP2A
  misc_feature (1)..(115): Homolog of NCBI NO: 1346180 NR Description: Glycine-rich RNA-binding protein GRP1A
  misc_feature (1)..(115): Homolog of NCBI NO: 15235002 NR Description: glycine-rich RNA-binding protein 8 (GRP8); id: At4g39260.1, supported by cDNA: gi_166838 [Arabidopsis
  misc_feature (1)..(115): Homolog of NCBI NO: 34851124 NR Description: putative glycine-rich RNA-binding protein [Prunus
  misc_feature (1)..(115): Homolog of NCBI NO: 544416 NR Description: Glycine-rich RNA-binding protein 10
  misc_feature (1)..(115): Homolog of NCBI NO: 14596077 NR Description: glycine-rich RNA binding protein [Arabidopsis
  misc_feature (1)..(115): Homolog of NCBI NO: 544423 NR Description: Glycine-rich RNA-binding protein 2

SEQ ID NO: 84062 - protein, 108 aa, Arabidopsis thaliana; identical to SEQ ID NO: 76879
  peptide (1)..(108): Ceres Seq. ID no. 12673005
  misc_feature (20)..(106): Pfam Name: Herpesvirus large structural phosphoprotein UL32 Pfam Description: Herpesvirus large structural phosphoprotein UL32
  misc_feature (1)..(108): Homolog of NCBI NO: 15226605 NR Description: glycine-rich RNA binding protein AtGRP7; protein At2g21660.1, supported by cDNA: 13879., supported by cDNA: supported by cDNA: gi_16226371, supported by cDNA: gi_166836
  misc_feature (1)..(108): Homolog of NCBI NO: 21553354 NR Description: glycine-rich RNA binding protein 7 [Arabidopsis
  misc_feature (1)..(108): Homolog of NCBI NO: 30681492 NR Description: glycine-rich RNA-binding protein (AtGRP7)
  misc_feature (1)..(108): Homolog of NCBI NO: 1346181 NR Description: Glycine-rich RNA-binding protein GRP2A
  misc_feature (1)..(108): Homolog of NCBI NO: 1346180 NR Description: Glycine-rich RNA-binding protein GRP1A
  misc_feature (1)..(108): Homolog of NCBI NO: 15235002 NR Description: glycine-rich RNA-binding protein 8 (GRP8); id: At4g39260.1, supported by cDNA: gi_166838 [Arabidopsis
  misc_feature (1)..(108): Homolog of NCBI NO: 34851124 NR Description: putative glycine-rich RNA-binding protein [Prunus
  misc_feature (1)..(108): Homolog of NCBI NO: 544416 NR Description: Glycine-rich RNA-binding protein 10
  misc_feature (1)..(108): Homolog of NCBI NO: 14596077 NR Description: glycine-rich RNA binding protein [Arabidopsis
  misc_feature (1)..(108): Homolog of NCBI NO: 544423 NR Description: Glycine-rich RNA-binding protein 2

SEQ ID NO: 84063 - protein, 106 aa, Arabidopsis thaliana; identical to SEQ ID NO: 84059
  peptide (1)..(106): Ceres Seq. ID no. 12673006

SEQ ID NO: 84064 - DNA, 743 bp, Arabidopsis thaliana
  misc_feature (1)..(743): Ceres Seq. ID no. 12673011
  misc_feature: MA Experiment ID: 108434 Result: Up-regulated in Transcription
  misc_feature: MA Experiment 108434 PARAMETER Experiment Name: At_Root_Tips_cDNA_P Parameter: Tissue Value: Root Tips
  misc_feature: MA Experiment ID: 108462 Result: Down-regulated in Transcription
  misc_feature: MA Experiment 108462 PARAMETER Experiment Name: At_Germinating_Seeds_cDNA_P Parameter: Age (day) Value: 2 vs. 0
  misc_feature: MA Experiment 108462 PARAMETER Experiment Name: At_Germinating_Seeds_cDNA_P Parameter: Tissue Value: Germinating Seeds
  misc_feature: MA Experiment ID: 108463 Result: Down-regulated in Transcription
  misc_feature: MA Experiment 108463 PARAMETER Experiment Name: At_Germinating_Seeds_cDNA_P Parameter: Age (day) Value: 3 vs. 0
  misc_feature: MA Experiment 108463 PARAMETER Experiment Name: At_Germinating_Seeds_cDNA_P Parameter: Tissue Value: Germinating Seeds
  misc_feature: MA Experiment ID: 108488 Result: Down-regulated in Transcription
  misc_feature: MA Experiment ID: 108577 Result: Down-regulated in Transcription
  misc_feature: MA Experiment 108577 PARAMETER Experiment Name: At_42deg_Heat_cDNA_P Parameter: Temperature (deg C) Value: 42 vs. 22
  misc_feature: MA Experiment 108577 PARAMETER Experiment Name: At_42deg_Heat_cDNA_P Parameter: Timepoint (hr) Value: 6
  misc_feature: MA Experiment 108577 PARAMETER Experiment Name: At_42deg_Heat_cDNA_P Parameter: Tissue Value: Aerial
  misc_feature: MA Experiment ID: 108607 Result: Down-regulated in Transcription
  misc_feature: MA Experiment 108607 PARAMETER Experiment Name: At_100uM_ABA_cDNA_P Parameter: Timepoint (hr) Value: 4
  misc_feature: MA Experiment 108607 PARAMETER Experiment Name: At_100uM_ABA_cDNA_P Parameter: Tissue Value: Aerial
  misc_feature: MA Experiment 108607 PARAMETER Experiment Name: At_100uM_ABA_cDNA_P Parameter: Treatment Value: 100uM ABA vs. No Treatment
  misc_feature: MA Experiment ID: 20000069 Result: Up-regulated in Transcription
  misc_feature: MA Experiment 20000069 PARAMETER Experiment Name: At_100uM_ABA_Mutants_cDNA_P Parameter: Plant Line Value: CS23
  misc_feature: MA Experiment 20000069 PARAMETER Experiment Name: At_100uM_ABA_Mutants_cDNA_P Parameter: Timepoint (hr) Value: 6
  misc_feature: MA Experiment 20000069 PARAMETER Experiment Name: At_100uM_ABA_Mutants_cDNA_P Parameter: Tissue Value: Aerial
  misc_feature: MA Experiment 20000069 PARAMETER Experiment Name: At_100uM_ABA_Mutants_cDNA_P Parameter: Treatment Value: 100uM ABA vs. No Treatment
  misc_feature: MA Experiment ID: 20000070 Result: Up-regulated in Transcription
  misc_feature: MA Experiment 20000070 PARAMETER Experiment Name: At_100uM_ABA_Mutants_cDNA_P Parameter: Plant Line Value: CS24
  misc_feature: MA Experiment 20000070 PARAMETER Experiment Name: At_100uM_ABA_Mutants_cDNA_P Parameter: Timepoint (hr) Value: 6
  misc_feature: MA Experiment 20000070 PARAMETER Experiment Name: At_100uM_ABA_Mutants_cDNA_P Parameter: Tissue Value: Aerial
  misc_feature: MA Experiment 20000070 PARAMETER Experiment Name: At_100uM_ABA_Mutants_cDNA_P Parameter: Treatment Value: 100uM ABA vs. No Treatment
  misc_feature: MA Experiment ID: 20000071 Result: Up-regulated in Transcription
  misc_feature: MA Experiment 20000071 PARAMETER Experiment Name: At_100uM_ABA_Mutants_cDNA_P Parameter: Plant Line Value: CS8104
  misc_feature: MA Experiment 20000071 PARAMETER Experiment Name: At_100uM_ABA_Mutants_cDNA_P Parameter: Timepoint (hr) Value: 6
  misc_feature: MA Experiment 20000071 PARAMETER Experiment Name: At_100uM_ABA_Mutants_cDNA_P Parameter: Tissue Value: Aerial
  misc_feature: MA Experiment 20000071 PARAMETER Experiment Name: At_100uM_ABA_Mutants_cDNA_P Parameter: Treatment Value: 100uM ABA vs. No Treatment
  misc_feature: MA Experiment ID: 20000072 Result: Up-regulated in Transcription
  misc_feature: MA Experiment 20000072 PARAMETER Experiment Name: At_100uM_ABA_Mutants_cDNA_P Parameter: Plant Line Value: CS8105
  misc_feature: MA Experiment 20000072 PARAMETER Experiment Name: At_100uM_ABA_Mutants_cDNA_P Parameter: Timepoint (hr) Value: 6
  misc_feature: MA Experiment 20000072 PARAMETER Experiment Name: At_100uM_ABA_Mutants_cDNA_P Parameter: Tissue Value: Aerial
  misc_feature: MA Experiment 20000072 PARAMETER Experiment Name: At_100uM_ABA_Mutants_cDNA_P Parameter: Treatment Value: 100uM ABA vs. No Treatment
  misc_feature: MA Experiment ID: 20000087 Result: Up-regulated in Transcription
  misc_feature: MA Experiment 20000087 PARAMETER Experiment Name: At_100uM_ABA_Mutants_cDNA_P Parameter: Plant Line Value: WS
  misc_feature: MA Experiment 20000087 PARAMETER Experiment Name: At_100uM_ABA_Mutants_cDNA_P Parameter: Timepoint (hr) Value: 6
  misc_feature: MA Experiment 20000087 PARAMETER Experiment Name: At_100uM_ABA_Mutants_cDNA_P Parameter: Tissue Value: Aerial
  misc_feature: MA Experiment 20000087 PARAMETER Experiment Name: At_100uM_ABA_Mutants_cDNA_P Parameter: Treatment Value: 100uM ABA vs. No Treatment
  misc_feature: MA Experiment ID: 20000088 Result: Up-regulated in Transcription
  misc_feature: MA Experiment 20000088 PARAMETER Experiment Name: At_100uM_ABA_Mutants_cDNA_P Parameter: Plant Line Value: Landsberg
  misc_feature: MA Experiment 20000088 PARAMETER Experiment Name: At_100uM_ABA_Mutants_cDNA_P Parameter: Timepoint (hr) Value: 6
  misc_feature: MA Experiment 20000088 PARAMETER Experiment Name: At_100uM_ABA_Mutants_cDNA_P Parameter: Tissue Value: Aerial
  misc_feature: MA Experiment 20000088 PARAMETER Experiment Name: At_100uM_ABA_Mutants_cDNA_P Parameter: Treatment Value: 100uM ABA vs. No Treatment
  misc_feature: MA Experiment ID: 20000089 Result: Up-regulated in Transcription
  misc_feature: MA Experiment ID: 20000090 Result: Up-regulated in Transcription
  misc_feature: MA Experiment ID: 20000111 Result: Down-regulated in Transcription
  misc_feature: MA Experiment 20000111 PARAMETER Experiment Name: At_42deg_Heat_cDNA_P Parameter: Temperature (deg C) Value: 42 vs. 22
  misc_feature: MA Experiment 20000111 PARAMETER Experiment Name: At_42deg_Heat_cDNA_P Parameter: Timepoint (hr) Value: 6
  misc_feature: MA Experiment 20000111 PARAMETER Experiment Name: At_42deg_Heat_cDNA_P Parameter: Tissue Value: Aerial
  misc_feature: MA Experiment ID: 20000117 Result: Up-regulated in Transcription
  misc_feature: MA Experiment 20000117 PARAMETER Experiment Name: At_100uM_ABA_Mutants_cDNA_P Parameter: Plant Line Value: Columbia
  misc_feature: MA Experiment 20000117 PARAMETER Experiment Name: At_100uM_ABA_Mutants_cDNA_P Parameter: Timepoint (hr) Value: 6
  misc_feature: MA Experiment 20000117 PARAMETER Experiment Name: At_100uM_ABA_Mutants_cDNA_P Parameter: Tissue Value: Aerial
  misc_feature: MA Experiment 20000117 PARAMETER Experiment Name: At_100uM_ABA_Mutants_cDNA_P Parameter: Treatment Value: 100uM ABA vs. No Treatment
  misc_feature: MA Experiment ID: 20000213 Result: Up-regulated in Transcription
  misc_feature: MA Experiment 20000213 PARAMETER Experiment Name: At_4deg_Cold_P Parameter: Timepoint (hr) Value: 2
  misc_feature: MA Experiment ID: 20000224 Result: Down-regulated in Transcription
  misc_feature: MA Experiment ID: 20000437 Result: Up-regulated in Transcription
  misc_feature: MA Experiment 20000437 PARAMETER Experiment Name: At_Drought_P Parameter: Age (day) Value: 8
  misc_feature: MA Experiment 20000437 PARAMETER Experiment Name: At_Drought_P Parameter: Organism Value: A. thaliana
  misc_feature: MA Experiment 20000437 PARAMETER Experiment Name: At_Drought_P Parameter: Plant Line Value: WS
  misc_feature: MA Experiment 20000437 PARAMETER Experiment Name: At_Drought_P Parameter: Timepoint (hr) Value: 24
  misc_feature: MA Experiment 20000437 PARAMETER Experiment Name: At_Drought_P Parameter: Tissue Value: Whole Plant
  misc_feature: MA Experiment 20000437 PARAMETER Experiment Name: At_Drought_P Parameter: Treatment Value: Drought vs. No Drought
  misc_feature: MA Experiment ID: 20000438 Result: Down-regulated in Transcription
  misc_feature: MA Experiment 20000438 PARAMETER Experiment Name: At_Shoots__P Parameter: Age (day) Value: 14
  misc_feature: MA Experiment 20000438 PARAMETER Experiment Name: At_Shoots__P Parameter: Tissue Value: Shoots vs. Whole Plant
  misc_feature: MA Experiment ID: 20001451 Result: Up-regulated in Transcription
  misc_feature: MA Experiment 20001451 PARAMETER Experiment Name: At_Far-red-induction_P Parameter: Age (day) Value: 7
  misc_feature: MA Experiment 20001451 PARAMETER Experiment Name: At_Far-red-induction_P Parameter: Light Value: Far-red vs. White
  misc_feature: MA Experiment 20001451 PARAMETER Experiment Name: At_Far-red-induction_P Parameter: Organism Value: A. thaliana
  misc_feature: MA Experiment 20001451 PARAMETER Experiment Name: At_Far-red-induction_P Parameter: Plant Line Value: Columbia
  misc_feature: MA Experiment 20001451 PARAMETER Experiment Name: At_Far-red-induction_P Parameter: Timepoint (hr) Value: 24
  misc_feature: MA Experiment 20001451 PARAMETER Experiment Name: At_Far-red-induction_P Parameter: Tissue Value: Whole Plant
  misc_feature: MA Experiment ID: 20001557 Result: Up-regulated in Transcription
  misc_feature: MA Experiment 20001557 PARAMETER Experiment Name: At_Drought_Soil_Dry_P Parameter: Age (day) Value: 27
  misc_feature: MA Experiment 20001557 PARAMETER Experiment Name: At_Drought_Soil_Dry_P Parameter: Organism Value: A. thaliana
  misc_feature: MA Experiment 20001557 PARAMETER Experiment Name: At_Drought_Soil_Dry_P Parameter: Plant Line Value: WS
  misc_feature: MA Experiment 20001557 PARAMETER Experiment Name: At_Drought_Soil_Dry_P Parameter: Post Timepoint (hr) Value: 3
  misc_feature: MA Experiment 20001557 PARAMETER Experiment Name: At_Drought_Soil_Dry_P Parameter: Post-Treatment Value: Re-Water vs. No Drought
  misc_feature: MA Experiment 20001557 PARAMETER Experiment Name: At_Drought_Soil_Dry_P Parameter: Timepoint (day) Value: 13
  misc_feature: MA Experiment 20001557 PARAMETER Experiment Name: At_Drought_Soil_Dry_P Parameter: Treatment Value: Drought vs. No Drought
acatctcactgctcactactctcactgtaatcccttagatcttcttttcaaatttcaatggcgtccggtgatgttgagtatcggtgcttcgttggaggtctagcatgggccactgatgacagagctcttgagactgccttcgctcaatacggcgacgttattgattccaagatcattaacgatcgtgagactggaagatcaaggggattcggattcgtcaccttcaaggatgagaaagccatgaaggatgcgattgagggaatgaacggacaagatctcgatggccgtagcatcactgttaacgaggctcagtcacgaggaagcggtggcggcggaggccaccgtggaggtggcggcggtagacgcgagggtggaggaggatacagcggcggcggcggcggttactcctcaagaggtggtggtggcggaagctacggtggtggaagacgtgagggaggaggaggatacggtggtggtgaaggaggaggttacggaggaagcggtggtggtggaggatggtaattcctttaattaggtttgggattaccaatgaatgttctctctctcgcttgttatgcttctacttggttttgtgtgttctctattttgttctggttctgctttagatttgatgtaacagttcgtgattaggtattttggtatctggaaacgtaatgttaagtcacttgtcattctctaaataacaaatttcttcggagatattatctctgttgattgattct

SEQ ID NO: 84065 - protein, 154 aa, Arabidopsis thaliana
  peptide (1)..(154): Ceres Seq. ID no. 12673012
  misc_feature (10)..(81): Pfam Name: RNA recognition motif. (a.k.a. RRM, RBD, or RNP domain) Pfam Description: RNA recognition motif. (a.k.a. RRM, RBD, or RNP
  misc_feature (1)..(154): Homolog of NCBI NO: 30681492 NR Description: glycine-rich RNA-binding protein (AtGRP7)
  misc_feature (1)..(154): Homolog of NCBI NO: 15226605 NR Description: glycine-rich RNA binding protein AtGRP7; protein At2g21660.1, supported by cDNA: 13879., supported by cDNA: supported by cDNA: gi_16226371, supported by cDNA: gi_166836
  misc_feature (1)..(154): Homolog of NCBI NO: 21553354 NR Description: glycine-rich RNA binding protein 7 [Arabidopsis
  misc_feature (1)..(154): Homolog of NCBI NO: 1346181 NR Description: Glycine-rich RNA-binding protein GRP2A
  misc_feature (1)..(154): Homolog of NCBI NO: 1346180 NR Description: Glycine-rich RNA-binding protein GRP1A
  misc_feature (1)..(151): Homolog of NCBI NO: 2267567 NR Description: glycine-rich RNA binding protein 1 [Pelargonium x
  misc_feature (3)..(152): Homolog of NCBI NO: 7439998 NR Description: glycine-rich RNA-binding protein GRP1 -
MASGDVEYRCFVGGLAWATDDRALETAFAQYGDVIDSKIINDRETGRSRGFGFVTFKDEKAMKDAIEGMNGQDLDGRSITVNEAQSRGSGGGGGHRGGGGGRREGGGGYSGGGGGYSSRGGGGGSYGGGRREGGGGYGGGEGGGYGGSGGGGGW

SEQ ID NO: 84066 - protein, 93 aa, Arabidopsis thaliana; identical to SEQ ID NO: 43293
  peptide (1)..(93): Ceres Seq. ID no. 12673013
  misc_feature (23)..(92): Pfam Name: Herpesvirus latent membrane protein 1 (LMP1) Pfam Description: Herpesvirus latent membrane protein 1 (LMP1)
  misc_feature (1)..(93): Homolog of NCBI NO: 30681492 NR Description: glycine-rich RNA-binding protein (AtGRP7)
  misc_feature (1)..(93): Homolog of NCBI NO: 15226605 NR Description: glycine-rich RNA binding protein AtGRP7; protein At2g21660.1, supported by cDNA: 13879., supported by cDNA: supported by cDNA: gi_16226371, supported by cDNA: gi_166836
  misc_feature (1)..(93): Homolog of NCBI NO: 21553354 NR Description: glycine-rich RNA binding protein 7 [Arabidopsis
  misc_feature (1)..(93): Homolog of NCBI NO: 1346181 NR Description: Glycine-rich RNA-binding protein GRP2A
  misc_feature (1)..(93): Homolog of NCBI NO: 1346180 NR Description: Glycine-rich RNA-binding protein GRP1A
  misc_feature (1)..(90): Homolog of NCBI NO: 2267567 NR Description: glycine-rich RNA binding protein 1 [Pelargonium x
  misc_feature (1)..(91): Homolog of NCBI NO: 7439998 NR Description: glycine-rich RNA-binding protein GRP1 -

SEQ ID NO: 84067 - protein, 86 aa, Arabidopsis thaliana; identical to SEQ ID NO: 43294
  peptide (1)..(86): Ceres Seq. ID no. 12673014
  misc_feature (16)..(85): Pfam Name: Herpesvirus latent membrane protein 1 (LMP1) Pfam Description: Herpesvirus latent membrane protein 1 (LMP1)
  misc_feature (1)..(86): Homolog of NCBI NO: 30681492 NR Description: glycine-rich RNA-binding protein (AtGRP7)
  misc_feature (1)..(86): Homolog of NCBI NO: 15226605 NR Description: glycine-rich RNA binding protein AtGRP7; protein At2g21660.1, supported by cDNA: 13879., supported by cDNA: supported by cDNA: gi_16226371, supported by cDNA: gi_166836
  misc_feature (1)..(86): Homolog of NCBI NO: 21553354 NR Description: glycine-rich RNA binding protein 7 [Arabidopsis
  misc_feature (1)..(86): Homolog of NCBI NO: 1346181 NR Description: Glycine-rich RNA-binding protein GRP2A
  misc_feature (1)..(86): Homolog of NCBI NO: 1346180 NR Description: Glycine-rich RNA-binding protein GRP1A
  misc_feature (1)..(83): Homolog of NCBI NO: 2267567 NR Description: glycine-rich RNA binding protein 1 [Pelargonium x
  misc_feature (1)..(84): Homolog of NCBI NO: 7439998 NR Description: glycine-rich RNA-binding protein GRP1 -

SEQ ID NO: 84068 - DNA, 720 bp, Arabidopsis thaliana
  misc_feature (1)..(720): Ceres Seq. ID no. 12673015
  misc_feature: MA Experiment ID: 20000213 Result: Up-regulated in Transcription
  misc_feature: MA Experiment 20000213 PARAMETER Experiment Name: At_4deg_Cold_P Parameter: Timepoint (hr) Value: 2
  misc_feature: MA Experiment ID: 20000437 Result: Up-regulated in Transcription
  misc_feature: MA Experiment 20000437 PARAMETER Experiment Name: At_Drought_P Parameter: Age (day) Value: 8
  misc_feature: MA Experiment 20000437 PARAMETER Experiment Name: At_Drought_P Parameter: Organism Value: A. thaliana
  misc_feature: MA Experiment 20000437 PARAMETER Experiment Name: At_Drought_P Parameter: Plant Line Value: WS
  misc_feature: MA Experiment 20000437 PARAMETER Experiment Name: At_Drought_P Parameter: Timepoint (hr) Value: 24
  misc_feature: MA Experiment 20000437 PARAMETER Experiment Name: At_Drought_P Parameter: Tissue Value: Whole Plant
  misc_feature: MA Experiment 20000437 PARAMETER Experiment Name: At_Drought_P Parameter: Treatment Value: Drought vs. No Drought
  misc_feature: MA Experiment ID: 20000438 Result: Down-regulated in Transcription
  misc_feature: MA Experiment 20000438 PARAMETER Experiment Name: At_Shoots__P Parameter: Age (day) Value: 14
  misc_feature: MA Experiment 20000438 PARAMETER Experiment Name: At_Shoots__P Parameter: Tissue Value: Shoots vs. Whole Plant
  misc_feature: MA Experiment ID: 20001451 Result: Up-regulated in Transcription
  misc_feature: MA Experiment 20001451 PARAMETER Experiment Name: At_Far-red-induction_P Parameter: Age (day) Value: 7
  misc_feature: MA Experiment 20001451 PARAMETER Experiment Name: At_Far-red-induction_P Parameter: Light Value: Far-red vs. White
  misc_feature: MA Experiment 20001451 PARAMETER Experiment Name: At_Far-red-induction_P Parameter: Organism Value: A. thaliana
  misc_feature: MA Experiment 20001451 PARAMETER Experiment Name: At_Far-red-induction_P Parameter: Plant Line Value: Columbia
  misc_feature: MA Experiment 20001451 PARAMETER Experiment Name: At_Far-red-induction_P Parameter: Timepoint (hr) Value: 24
  misc_feature: MA Experiment 20001451 PARAMETER Experiment Name: At_Far-red-induction_P Parameter: Tissue Value: Whole Plant
  misc_feature: MA Experiment ID: 20001557 Result: Up-regulated in Transcription
  misc_feature: MA Experiment 20001557 PARAMETER Experiment Name: At_Drought_Soil_Dry_P Parameter: Age (day) Value: 27
  misc_feature: MA Experiment 20001557 PARAMETER Experiment Name: At_Drought_Soil_Dry_P Parameter: Organism Value: A. thaliana
  misc_feature: MA Experiment 20001557 PARAMETER Experiment Name: At_Drought_Soil_Dry_P Parameter: Plant Line Value: WS
  misc_feature: MA Experiment 20001557 PARAMETER Experiment Name: At_Drought_Soil_Dry_P Parameter: Post Timepoint (hr) Value: 3
  misc_feature: MA Experiment 20001557 PARAMETER Experiment Name: At_Drought_Soil_Dry_P Parameter: Post-Treatment Value: Re-Water vs. No Drought
  misc_feature: MA Experiment 20001557 PARAMETER Experiment Name: At_Drought_Soil_Dry_P Parameter: Timepoint (day) Value: 13
  misc_feature: MA Experiment 20001557 PARAMETER Experiment Name: At_Drought_Soil_Dry_P Parameter: Treatment Value: Drought vs. No Drought
acatctcactgctcactactctcactgtaatcccttagatcttcttttcaaatttcaatggcgtccggtgatgttgagtatcggtgcttcgttggaggtctagcatgggccactgatgacagagctcttgagactgccttcgctcaatacggcgacgttattgattccaagatcattaacgatcgtgagactggaagatcaaggggattcggattcgtcaccttcaaggatgagaaagccatgaaggatgcgattgagggaatgaacggacaagatctcgatggccgtagcatcactgttaacgaggctcagtcacgaggaagcggtggcggcggtagacgcgagggtggaggaggatacagcggcggcggcggcggttactcctcaagaggtggtggtggcggaagctacggtggtggaagacgtgagggaggaggaggatacggtggtggtgaaggaggaggttacggaggaagcggtggtggtggaggatggtaattcctttaattaggtttgggattaccaatgaatgttctctctctcgcttgttatgcttctacttggttttgtgtgttctctattttgttctggttctgctttagatttgatgtaacagttcgtgattaggtattttggtatctggaaacgtaatgttaagtcacttgtcattctctaaataacaaatttcttcggagatattatctctgttgattgattcta

SEQ ID NO: 84069 - protein, 146 aa, Arabidopsis thaliana
  peptide (1)..(146): Ceres Seq. ID no. 12673016
  misc_feature (10)..(81): Pfam Name: RNA recognition motif. (a.k.a. RRM, RBD, or RNP domain) Pfam Description: RNA recognition motif. (a.k.a. RRM, RBD, or RNP
  misc_feature (1)..(146): Homolog of NCBI NO: 30681492 NR Description: glycine-rich RNA-binding protein (AtGRP7)
  misc_feature (1)..(146): Homolog of NCBI NO: 15226605 NR Description: glycine-rich RNA binding protein AtGRP7; protein At2g21660.1, supported by cDNA: 13879., supported by cDNA: supported by cDNA: gi_16226371, supported by cDNA: gi_166836
  misc_feature (1)..(146): Homolog of NCBI NO: 21553354 NR Description: glycine-rich RNA binding protein 7 [Arabidopsis
  misc_feature (1)..(146): Homolog of NCBI NO: 1346181 NR Description: Glycine-rich RNA-binding protein GRP2A
  misc_feature (1)..(146): Homolog of NCBI NO: 1346180 NR Description: Glycine-rich RNA-binding protein GRP1A
  misc_feature (5)..(146): Homolog of NCBI NO: 544426 NR Description: Glycine-rich RNA-binding protein
  misc_feature (1)..(139): Homolog of NCBI NO: 2267567 NR Description: glycine-rich RNA binding protein 1 [Pelargonium x
  misc_feature (5)..(145): Homolog of NCBI NO: 2119044 NR Description: glycine-rich RNA-binding protein RGP-1b - wood
  misc_feature (3)..(144): Homolog of NCBI NO: 7439998 NR Description: glycine-rich RNA-binding protein GRP1 -
  misc_feature (5)..(145): Homolog of NCBI NO: 2119042 NR Description: glycine-rich RNA-binding protein RGP-1a - wood
MASGDVEYRCFVGGLAWATDDRALETAFAQYGDVIDSKIINDRETGRSRGFGFVTFKDEKAMKDAIEGMNGQDLDGRSITVNEAQSRGSGGGGRREGGGGYSGGGGGYSSRGGGGGSYGGGRREGGGGYGGGEGGGYGGSGGGGGW

SEQ ID NO: 84070 - protein, 85 aa, Arabidopsis thaliana
  peptide (1)..(85): Ceres Seq. ID no. 12673017
  misc_feature (27)..(84): Pfam Name: Herpesvirus latent membrane protein 1 (LMP1) Pfam Description: Herpesvirus latent membrane protein 1 (LMP1)
  misc_feature (1)..(85): Homolog of NCBI NO: 30681492 NR Description: glycine-rich RNA-binding protein (AtGRP7)
  misc_feature (1)..(85): Homolog of NCBI NO: 15226605 NR Description: glycine-rich RNA binding protein AtGRP7; protein At2g21660.1, supported by cDNA: 13879., supported by cDNA: supported by cDNA: gi_16226371, supported by cDNA: gi_166836
  misc_feature (1)..(85): Homolog of NCBI NO: 21553354 NR Description: glycine-rich RNA binding protein 7 [Arabidopsis
  misc_feature (1)..(85): Homolog of NCBI NO: 1346181 NR Description: Glycine-rich RNA-binding protein GRP2A
  misc_feature (1)..(85): Homolog of NCBI NO: 1346180 NR Description: Glycine-rich RNA-binding protein GRP1A
  misc_feature (1)..(85): Homolog of NCBI NO: 544426 NR Description: Glycine-rich RNA-binding protein
  misc_feature (1)..(78): Homolog of NCBI NO: 2267567 NR Description: glycine-rich RNA binding protein 1 [Pelargonium x
  misc_feature (1)..(84): Homolog of NCBI NO: 2119044 NR Description: glycine-rich RNA-binding protein RGP-1b - wood
  misc_feature (1)..(83): Homolog of NCBI NO: 7439998 NR Description: glycine-rich RNA-binding protein GRP1 -
  misc_feature (1)..(84): Homolog of NCBI NO: 2119042 NR Description: glycine-rich RNA-binding protein RGP-1a - wood
MKDAIEGMNGQDLDGRSITVNEAQSRGSGGGGRREGGGGYSGGGGGYSSRGGGGGSYGGGRREGGGGYGGGEGGGYGGSGGGGGW

SEQ ID NO: 84071 - protein, 78 aa, Arabidopsis thaliana
  peptide (1)..(78): Ceres Seq. ID no. 12673018
  misc_feature (20)..(77): Pfam Name: Herpesvirus latent membrane protein 1 (LMP1) Pfam Description: Herpesvirus latent membrane protein 1 (LMP1)
  misc_feature (1)..(78): Homolog of NCBI NO: 30681492 NR Description: glycine-rich RNA-binding protein (AtGRP7)
  misc_feature (1)..(78): Homolog of NCBI NO: 15226605 NR Description: glycine-rich RNA binding protein AtGRP7; protein At2g21660.1, supported by cDNA: 13879., supported by cDNA: supported by cDNA: gi_16226371, supported by cDNA: gi_166836
  misc_feature (1)..(78): Homolog of NCBI NO: 21553354 NR Description: glycine-rich RNA binding protein 7 [Arabidopsis
  misc_feature (1)..(78): Homolog of NCBI NO: 1346181 NR Description: Glycine-rich RNA-binding protein GRP2A
  misc_feature (1)..(78): Homolog of NCBI NO: 1346180 NR Description: Glycine-rich RNA-binding protein GRP1A
  misc_feature (1)..(78): Homolog of NCBI NO: 544426 NR Description: Glycine-rich RNA-binding protein
  misc_feature (1)..(71): Homolog of NCBI NO: 2267567 NR Description: glycine-rich RNA binding protein 1 [Pelargonium x
  misc_feature (1)..(77): Homolog of NCBI NO: 2119044 NR Description: glycine-rich RNA-binding protein RGP-1b - wood
  misc_feature (1)..(76): Homolog of NCBI NO: 7439998 NR Description: glycine-rich RNA-binding protein GRP1 -
  misc_feature (1)..(77): Homolog of NCBI NO: 2119042 NR Description: glycine-rich RNA-binding protein RGP-1a - wood
MNGQDLDGRSITVNEAQSRGSGGGGRREGGGGYSGGGGGYSSRGGGGGSYGGGRREGGGGYGGGEGGGYGGSGGGGGW
